United States Patent Application Publication US 2014/0057251 A1 - sequence listing, part 52

SEQ ID NO: 68208 - DNA, 2451 bp, Cannabis sativa
cggagaagatgactgaaattccagccaaatcagcctgagaagatgaatgaaccagtgagacgatggtagtggtgagagagagagagtatacatgacttttattctgtatataataatacaaaataggttgtattaaaaattagggatgtaatatttattacaatacaaggttccacctaaacattgtagtattataatttaatacaatagaaggcccttattcagggctccaaacgaggcctagaaagttaataatcattcagaacaacatgaaaagaaaaagtaaataaataagaagattgtagtccttgaactaccatgagtgaatctatttcaatgaaatccactgtcatattgagagatatgagccattacagacttaaagccaggattattgcctccatgtcttcagatttaaaatgaccctgaattggtttaaataaacctgcaacaatagcacccgatgagtctcttaagattgcaccaacaccaataaaacttttagacttatcaatagcatcatctgtgtttagtttcaatcttcccgatggtggagctagccatttgggctttgaagtagaataagaaggcgcacttgcatccatggttgctgtagatggatgtgtctcaggcctttgagtagtggttcgagcatattgatattcatgaagatatgatttcgcaaacaagagaattgcatcaatttttttttttgtagttttctatggtattcaacatttctttcaaactagatacactagcaaattaaaatgaactgctcaaaatgtgttgtaggaaggcttgctgaaagatgcatcaggaaatcttcacatgatgtcgaataagcactattaaaatcattttgtaatcccaagagatgccatacttcccttgctcttttgcaaaaaataaaccatgatttattgtttcaagatgagatctacagagaggacatagagagtccgcagggaggtgtctttgatgaagcccaacagtaactagtagtgccgtgtgaaaagttctccacaaaaaaattcgaatctttgatggaagatttagcttcgaaaaagttgtccaccaacgctcaatggaggtggagctacttgcgtcctcctatttagctaggcttacagcaaagtgatatctcgattaaacaatgttacatcctgtgaatgagttatgccatatcaatgtatcttctattggaaacagattaagagaaatgctaataattatatcaacagcaacttggcaaaagtttgattgcaaggcaaccaaatcccactacctattctggtttatcaaataaacaactactaaaattggattagatcctttaaataaaaaaggggtgaaacaagtgtgccctgggatccaagggtaagttttgcagataatattattaacaaatctaactttccatgttaaaccttttagtaataactctttatcccaaataatacttctctagatcaaagatagggaatcaccaagttcaagtagcaagaaattgatcatttgagtaatacttatgttaaagaaattttctaagaagggagtgtggaaattccaaaagatgccaagcttgtttggccaaaagagcttgattaaaatgtatgaaattttgaaagcctaagccaccatggatctttgcatttgcaaaggaaattctaattcttccaatgaattgaattaccttatgtcatagaaccccaccaaaatctagccatcatgctttcaatttggcgacataaagttactggaaacctaaaacaactcatggtgtaggtaggaatggcttgtactatcgccattaagagaacttccttttagttttgtctagctctctaatgttatccatgaaagagagaacacatttatcgaggttgataacttagcctgaagcattgctatatagatcaagagatcatttgatggcccatgttgattatttagtagcacaataaaagagtacaccgtcatcaacaaagaaaaagtgtgacactggtggagctaacctggatacttttagaccttggaaagaactaatgttttccttgtgctataataatcaagagagaccttaagcacaaactaaaaataaataaggtgaaagaggatcaccttgtcgtatacctcggctaggaaccaagtcaccatgtaccaccccatttaataaaaacaaatatgatactatgaatgttacaactatatctctaaagtccatctgtaaatgcggttatgatttgaaaatcatatagctgtaattttcccgcttttaccggatcaaaaagatcatgtattttaacacatcattaatcgttgtatccagggatgtctcgacagaagcttggttccaaggatcataataacgagctgggccatttttccttccgaggtcgatggtgaacgtcttgtgatgatcaaggttcttatttacaaagagttctt

SEQ ID NO: 68209 - DNA, 640 bp, Cannabis sativa
aaacttcaaatttattttcgacacaataaattatttgattttttttttttaaatttacaaatataatattataactgtaacgaatatcatcacatttatgcatatatatatatttttaaaaaactattctaatatatatgttttaagatttaaattaaaaaatataaaaatatatatgttgtaattagcactccctcctctaaatatagagaggataatgattgttatcactcatttaacttacatatatgttttataaataataatgtatatttatttttaattaaatttgactccctacttaaaattatttaaaatatatattatttggctttttttacaatgcaatgcacccctaaaaatgattgttgataaactctatctatttcgatattagaagaatattttagtttaattttttttataatcgcgtaaaattttgaaaaatttataaaaagcagtacttaaacattttattttacattcacgtaaaataaaagagtcacgtatatttgactgtttcaaccctgttatcgacatgttaatttttttttgaaaatctcacaaatttataaattgtcttaaataattacaacatgcacaaccatgaaaaaaatttagctaaaacattctcacaaat

SEQ ID NO: 68210 - DNA, 1329 bp, Cannabis sativa
tatatgtatatatgtatatataggtagggacaaggccctttggctctgagttagctgagcttataaatgtgcgcacatcaatgaaaatgttgggcttcattgaaacctcttgcgtaactcttgtccactccaccacaacatctatctatcaagtgttgttacttgtacatttatctccctctctctatatatatataaaatataattatattacaagacttatctatgtgtatatatataatatatagagaaatgttaaagggtaccagtggtgtttagtgctatttcatgtgttaatatcgctattgatacaattaagtatcgggtctcatattatttaatataataatttttagagagtatcgctagccaatcgcaacacgacataccgcaaaagtgctagaagtggtgcctactaacaatgctctaatatatatgttaattaattaataagtaatagagttcatatacataaataaatatttatataagttgaaaataaagaagtggtgtatcagagagatcgagattttctgggacacccttcgttgggatgggagaaaaaacctcgaattgaagttctggccatatcttcacttttgtcttttgatttttattttatttttttgataatatcaagagcgtaaagtttgagacattaatattagaatttgttttgaaaaagaaaagagaacaaaaagaaaagagcattgctattaggtaccagtggtgtctagcacattctcgacatatcgtgttgcgggctagcgatactctctataaactattatattaaattatataggactcgatacttagttggaccaataacgatattgacacataggagggtgctaagcaccactggtgtcctttaacatttttcaaaaaaaaaagtttaatttgaaattagtaaattccgtatatgcccattatttttggttagtggttttgcttttgtgattcataataataataataataataattatgatgatgatgttagaagtcttacttttgttttgattgttctttttaaagtgactcatatggttggacaaggtcatgcaaatgcacatgtgcattatgtccatggtgttcttattcttaccccaaaattaattttagctctaataataatattcaattttattaaaaatggattggcttgatttttgcaaaatcttattaattaggtatgggttttgttcctttttctttttgaaaaaaaaattgaaagctaacctttttaggaaatgataattatttattcgcatggcacatgatgatgatctagctacacaaagtacaaatctaagtaatatggtt

SEQ ID NO: 68211 - DNA, 919 bp, Cannabis sativa
aagacctactaaatggagggcttcagattgcggtgtcatcctagataatcttagtatgaaactaagtggatgggctagtcgaaacttgtcctttgctggccgagctcagctaatccactcggttcttcttggaattcgaaattgttggatgagtcttttcatcttacctcaaaaagttgttgcagctatagacaagaagtgtcgagacttgctttggggtattagtggaaatagaagcaaacttcatctcccatcatgggagaaagtttgtcttccaaaacagtttggtggcattgggttcagagaagggaagaagtggaacttggccatggtagctaaacacttatgggcactctcgagcaaacaagataacctttgggttaaatggatcaactccatttacttaaagacccaggatatttggtcttgtcctataaaatcagacctcaactggtatttcaagaaacttttgaagatccgaaatgtgacaaacatgggcttgctgaaccaggcgataaaagggggtaggttcaaagtttgtagattttatattgaactcattggggcagcgaagattgactatgctgctactgtttggcacaagtttattattcctaaacacaggttcattttctggcaaatcatcaatgaacaattgctcacccgagatcatttgagcagaattctgaccatccctttggatctttgtgtggtttgtgagaatgctttggaatctcataattacttgtttgtggactgcatttataccagaaagcttgttgatagtgtggaaaattgggctggctgtttgagttggccgaagtgcttcagggagctgcaggagagaaagtgcccagccaagcccgatctgcctgagctggttttgaatgctatatattcagctactctataccagttg

SEQ ID NO: 68212 - DNA, 1244 bp, Cannabis sativa
acttccatgttttgtccaatctggcctttgagcatcttgttgactaacctttgtgaggtagctccaacattcttgagaccaaacagtatgactttatatcagtatagattgatgtctgttttgaagcttgcgtgttctttgtcaggtagatgcattcgtatcctgttgtacctggaataagcatccataaagcttaagatttcatgtctggttattgcatccgcgagttgatcgattcttgggagttgaatatagccttttggacatgccttattgaggtcagtgaagtcaatacatactagacatttcttgtttggcttgggcaccattactgggttgtccactcaagctgggtagaaagtttcagtaataaatctatttatccggagcctttctacctcttcttttagtgcatgtgcacattctttatctaggaatctccttttctactaacaggacaaaagtctagatcaatataaaggacatgagatatgacggtgggatcaattccaaccatgtcctcatgcgaccaagaaaaaatgtctaggtttgctcttagaaattttattaaggctaattttatttcaagaaacaaaactttaccaattttgagtttcctagtcagcatggctagatcaatctccacttcttctagctcttctactggcccaacgtttgtgtttgtttccccacgtcagagatccatgtcttcgttcccgccttggacgaattcctattggtcaatgccttttcccttctctaaactctagctagaagtatcttctttcttggtgttagataaagcaaggttgtagcattcccatgcagtttgatgcattccttttagatagcatactccactccatgttggaaacttaacgcacatgtgaaagactgatgtgacagctcttagtcatatagggcttgttggcccaacatgacattaaaaggtgaagggatgtcaatcactaagaacagtgccattgttgttgtaatcgtcagagcatgtcctattgtgagtggttagtgaatctgtccaagtggtgctacactttggccggagaatccgtagaccagctgagtgcatgaaaccaaacctttaagctggagtcccattttcccatatgttttcttgaataaaaaatttttagaagctctattatctaccattgtccgagccaccattttgtttgcgattttcacttcaacgaccaaagggacattgtgcaaaaaaatgaagtggc

SEQ ID NO: 68213 - DNA, 799 bp, Cannabis sativa
tctttaatagtggcatcttctttaaaaggtgagcaggggtatccacttgacatctagaagctaaatttatggaataggctgcttgtagattcaatttatgtaagttgcacaggaacaaagaccaattaaagaataatatcgatatttatattctatttattgtgtctatgaaccaattgctcatagagtaactttttaatgttattctcttaggtccacatgcgtactatggtacccttgcaagacaaaacccatgcaaagtttgtaaaacttggtgaatagcaagtgaccaagagacttgtttgtatggtcacatgggggttacccctattgtacaatgcatcgtactagcacaaagaaattattgagaaaaattttattgcatagtataagctactaagcctgcctctaagtcctgcaggcatacttcggcttggcaaagtaaatcctgacccttacatgtcaaggccataagaagatagccaggattaaagaccgattggttggtcacataatccatgataaaaaattaatagggccaaatactagtagtgctcaaaaatagtgggcttatggccaaagatacgaacttgaaggccctagggctgataataaagtaatgttctaaaaaggcctcaggccacataggacatgaatgtaaagttcaaaaaaggccacaggccacatggaacgcaaaagttagtattgttctgaagctaaaaggccacaggccataaaaatccacatgctatgcagaacatgaaaacattgtctatgtgatacaaacataatgttgaat

SEQ ID NO: 68214 - DNA, 2050 bp, Cannabis sativa
tcatttccaaattcagataccaatttctttttgttatcttaacattgtccctaaatgttttacagggttgaccttggtacagtagataattttgccattgatgcacttttcaactgcttgacagtcttgagttcagagtaagtaaaataacatttccattttatcaccacttagatctttgctcatggatttcggacaaaaaactaaaagatctttgcttatgtattgtttatgaagttattcttttacacatgcaaaacacttgattcgtaattgtcttgtttttcattctggctgacagatatatagaaattgaacaaatagtttttgggggttgtagcatgggtgattgggaagaggggatgacaagtcctgagtatggatataagtacttcaagatctaagctttattgtgttttggatgcgtcttaaataacccatttctctgttctagctcacaagttccgaacttgtgtacaacatacaatttccaaatttgtgtataacatacgtgcttcatgtatctatccttttgattttatgccagttttgattctttatttttcttagtgtttgataattttgaatttaataaagtagatgcgaaaagggaggaatctgtgggcatctgggtgggagcaatgaggactggagacacttctaaaatgggtcgaacaacaataaaagtggttagcaatgagaggaaaattaaaatgtgctaaaaagataagcaggaaaacaaaagttgctactacacctaacttcttcttatttgtattagaaaaatgattcattcatatggctcatgttgttgacaggtgacaaacaatgattgagctgaagatgattatagagggaggataatttcagttgggatatgccaggtccctatttgctgaagtttttcttttgactttggaattgaccaacttacaaagcccacgacgtattaatgaaaatctcaaaatctagtttgttcattaaattacctttgaaagtatgcacactccactactcttcaatttcatcccatttcaatctccgggctttgttcaataactacgttgataaaaccaatgtccactcatggaactccatcattgccgacttggctcggagtggggactcagtcgaagcacttggagcattctcatccatgcgaaagctgtctctcactcccaacaggtccaccttcccttgcgtcatcaaatcatcttcggctttgttcgatcttcgctcgggcaaacaagcccaccaacaagctatggtctttggtttggactttgatctctttgtgtcctctgctcttgttgacatgtactctaaatgtggtgaattgagggacgcacgagtgctttttgattgtatacctcacagaaatgtagtgtcttggacgtctatgattactgggtatgttcaaaatggagactcccattcatcattgtcgctttttaaggagttcttgatcgaagaaggtgaaaatgtggatgtttctatagatccagttgttgtggttgcggttctctcagcttgttctcgtgtttcagaaaaggaagttactgaaggcattcatgggtttgtggtgaaaagaggctttgatggagatttaggggttgcaaacactttgatggatgcatatgccaagtgcagtgagctgcgtctgtctagaaagttgtttgatggaatgtttctaaaagatgtagtttcttggaactcaatgattgcggtgtatgcccagagtggattctcagcagacgctttggaagttttctacgagatgaaaaaggctggaaatatgaactataatgcggttaccttgtctgttttgctattagccactgctcattcaggcactctgcggactgggaagtgcatacacaatcaggtgtccacattccttctaatttgcatttgcattgcttttttttaaatgcaacactgaattgtgtattttattatcttcttcatatattgtttgcccattgttattcagatcattcgatgtgcttttacaggttctgaaaaagtgtttggaagagaatgttgtggt

SEQ ID NO: 68215 - DNA, 1056 bp, Cannabis sativa
ctttagtattctgagtaatgaagtcatgacaaatcattgtttgaatcccaaacattgaaaggagtcaaaacagaccccaagacttaggtgcctagggtttcacccagtccccaagttgacaacctagctagggtttcagtttttaagaccatcttagtgtagatgaccaaagcattacacttacacatgaattataaatgtcacaaatatatttgaggcaacataatcaggtttggaatactttcaattttgagaacctacaacattaggtgccccgagtacccgtcgccctggttgacatattctcatatgtcaacctggggcatcttcaccatcaaaataaagaactatcctagcatttctttgtctttgtccaaaatgaggaaacaagtgctttcagataagaaacaaatcactggaggccaaatggggacccatggcccaagttgacctacgctatgaacctagcgcccaggttgacacattgtcaacttgggccattttcaagcaaattttctgagaattcctccaagcatattctccgtttctgtcaaagattaagatacagctatttttggggatcaaacagagccatttggtggctaaaaattagacccaatgctcaggttgacattttgtcaacctgggacattccaattttttttcctaaaaaattgttctgggcactttttttcttcatcaaaaataactaagatacaactaaacttgaggagaaaattagaatccagaaggggccaagaactaagcggaacgcccaggttgacttggtgttgggcccaacccctaggttgacaatcaaacaggtgcgctagtttttgtcactcaaaggcgaattctgctctgggtattctctctggcatggtcaaaaatgggttaggagacctcttcctaaattttgaagaccctaaaagcataaaaaagacaactcaaaaaaaaaaaaaaaagcagtgagtgcccaggttgacgtatgacctagtgcaatggcctctacttattcaattctcattcgatcccaagcgttcatcgtgtttttca

SEQ ID NO: 68216 - DNA, 1293 bp, Cannabis sativa
ttagagatctgagtgggaggagacgtattattctgctgcaatcaatataaggtttcttaactttatatgtgtttaaattctattattttagagaattcttagttaggatattagtaaacatacttgttagtaaatctagatcctggtaagatatattccaacaataagtaaaccacgtacacattactaattatcacgtccgtgtaaatatagtgcactaataaatctcaagtttaaataagtttgaagcatataattacaattatttttcactataatgatgtcactatatgttcgagatttaatagaatctatatgttgaatatataaccatgtaacaaacatgtgaactatgtgatttatgaattttattgatttgaataatattaaattgtatttagggcataaaatccaacagaagatgcactggtgtacttggggaatattttgttggcacaatttgatggcagtatgggttttcctgatctttttgtatataataaagctctttttgcaaaacaaccttagagattatacaacttttccaattctttagctgtcaaggttatgaaaagtgtgtggttttttaattgagactttcttaatgttgataaaacatataaaggatcctacatttggaaaaatattttgtgagggcgcgagttgtttttggatggggtgtgctgacttattcgaagtgggcgaactgtcaatattagatctcatatgtgggttcgaaaaaagtcaactttgcttgcctattcttttcatggtcctccttctgttacaatggtttgagatttaaaattggaaaatggtgacttgaattgcccttggttgatgatttattttattttgaaggagctcttcaagttcttgctatacttgggcttttgcagtaaattgaccaactcatttggcattataatgcttcaggtgagtttttcgttaagagtgggtactgaaatgctattcacttattgggaaagagtcaatttgtttcttcttcagctttttcttcttggtagaattatctttggagccttaacactcctctcaagattaatgtcttcatttgaaaagcttgtttggattggattccaatttggctcatcatggtattttgactgagttattgtgtcctatttgtggagtggatgataagacatcgttccatgcactttgggattactctagcctcaagtcaatcacatcgaatgtaagctttgttcttacttttgcttctttgctgagaatgaacttgtattattttcttcaagaacaagagtcact

SEQ ID NO: 68217 - DNA, 589 bp, Cannabis sativa
agggcagcacaggggacgaatgctaattcaacctaaacctggagtgagaagaccacgaggcagacctcgtggctcacgaacaaggagacaggaaaatgcccgggcagcacaacccagggaaaatgagacaccccctgaaaatcaaaacgaacagccagacggcagacaaccagaaattgatgaacgggaaatccctcatgagaatgaggaggatcttgggactcaaccaggagaacggatgtcacctgctagaagtcatcagcgtccttcccaaacccatagagcgaggactcgtacagacgttgatgggggaaatacgataaaccactctggggatgaaagaacagagtgcaaagaagcaagtgtgacttcaagacggtcaagaacccatagtcgatcaactttaagagtagaaagtactgaacgagctaatgatcaagaaagtatgggaaccagcaaattcgcgagccactcagagacaaagtctgtgagtaggatgcgatatgtgaataagacaaggtctgccagcaattactctcaaccggatctgcgagagcacttgaatcggaagaaacctgaacttcgccaa

SEQ ID NO: 68218 - DNA, 726 bp, Cannabis sativa
tatatttgctcgtgttagaaattggaatctggttagttatattgaaaaagaattgacgaaaattgagctcatggtattattttgtatcatcatacaaaatatatgattcaatttattatttaacaaaataaaatccgattgatagcttttgtaaaacatagatgataatatttacccataataaaaattaacgaagtacatttttttataacaaatgaatcatcaatactatgcatagttttagctaattcttctttaaaaaagaaaaaataaataaattactccattcattttgtataaagtgagcttgtagatttatttgcatttcaacctttagagcagagttttattgcgtgcttgaacgaatttttaatggaacaagtgcatgaatacttaaatgtatacaatcaatttcatgtggactatattcttcatagttaattggactacattttctttttaagctaacatttatgaactaaatatgttgatttaaagatgttgatttcttgaccaatattttaattttaactattggcacaacaaatataacataatgcatgtagatactaactagtacgtgacttgaggctagctcaaacgatcataggagagttcgaggtccaggttatacattgtgtaatatataaacgtttaaataaaaaaaaaaaatactaatacatatgtgtgtgcgcacgcgtgcgtgccctcacattcaaaggaggc

SEQ ID NO: 68219 - DNA, 1227 bp, Cannabis sativa
tgaaattcaagaatatatggactaggacctaggcttccaagccactaaagctagcttagtggtgagggaaggatgagaaaaagggagatgtcatgggttcgaacctaggaccttgaaactattaagctattaactgtttgtaaaataccattacgttacactaaaaaaaaggacctaggcttccaattaataattcattaaataatatttttcagaagaatgctattatccatctctagagctagctgacattgtttgggctgggccgtagattttggactattcatttcaaatgaaatttggtgattttcaaaaaagaaaatattaaagataaatgttaccgactcaactggggatcgaacccagaatctctggttccgtagaccagcgccttatccattgggccattgagtcaatttgtctagctgtttacaagtattttataagaaaacattaaacaaagagaaatctgactagcttttggagcttcagttggggttgggtggaacaagacgacgacctcaacaaatttgaaaagtaaatattagcgtcatatacactcttctctccccggttcttcttcctttggtttggtccttcacacagaactaacatagatatagatgtttttctgcttttgtacataattttttctctttcttcatttgcctgaattgtggcacagaatccaaaataaattttatatcttttgaaaaaaaagctcaaataatagaaaagaggaagtgggatatttggaatcttgactaaatgaattgaaggattggggattacggataagtggttaggagttcataattatcaggttttttcgctatattaattaatataaaatatgggaagaaaacaatccatgcggagcaaagctgcccactttgtatctgatctcaccaccgtcttcctcaaccccatttcggataaaccctccaagtcccaacccacctcaccttctccggtttctgtaagtatatttttctcttttcttctctcttttgacctgcggagctttttcggctttcattaagtttcttcattggtttttgatcatttaccggcgatcaatgaagttgattatacggacacatatttaatctgtccgtttttttttttggctctatggttttgtgatgataatttgattattaggatgggttatggggatggttagtttgctagagtttaaattcaatgtgaaatatttatatatat

SEQ ID NO: 68220 - DNA, 899 bp, Cannabis sativa
gtaggataattttcatgaacatttctggaagcattagcaggaaaaaaaatcagaaaactcagaggacataggcccatccacaacaaaggaaaaaatatgctcatgaaaaataacatccatagagaaaaacactttattagtatgaaaatcatgaagcttgtaagctttcataccagctagataccctaagaaaacacaagggacggctctaggtgaaaattttgatcttcctacactcagagtggaagcataggccaaacatccaaaggctctcaaatgttcataattaggaaccttagaatgtaagattaatttcaaaaggagacttatgttttaggtttggtgtaggggttctattaatgatatatgcaacagtgttgatgcattctccccaataagttaagggaatgtgtgattgaaataaaatggccctagcaacattcaacaaatgttgatgtttcctttccacaatatagaattatgttgtggcctttgcacacaagaataatgataatgcacaattcctaaagatgagaatagatcaggaaattgtagctcctttgcattatcagacttaacacccctaattaatttgagcattatattgagtttttatcaactgtataaaggctggtataactaactgagcatcagatttgttctcgataaaggtgtatccatgtatatctagaacaatcattaataatagttatgaaatacctacagccttcaatagttcgagtattgtagggtccccaaatgtcaacatgtataagatcaaagcaatttttggacaaattgtgattactaacaataggtaattttctttgtttagcaaaatagcatatagaacaaagaaagtcaaaacaataagagtattgaaactgcaattttttatt

SEQ ID NO: 68221 - DNA, 1102 bp, Cannabis sativa
atactcatttgcaccattatatcaactttacatttttaggtcaatttaatagttctagcttgttttcttctcataggcttaaaacaaggaattcccaagcctatgatataatgcgctattgggtgagcaacatggatgtgagacatttttgtttttattgacttggctttgcagaatttgtggtataaagattgaatagaatcatcgaaaaggtaatctattgtagcaaaattcacagtaacaacaaaagcataattacctttttttttctaaaataatagaatatagtattcatatgctgaaacaacacaataaagaaatacaaaaaaaaaatgtgaacaaatattacaaaaacttaataacaatagctaaactaaaaaacaataataaaacaactataatacaactataaaaaatgtaaaaggaataagaaatgttaccgagtcattgataaacatgtcacaacaagataaatgataaaaccaagttttatcttcaacataatcgacacctaatcagaaccctgggaaaaatttcttcgcaccaccctcgtaaacattgtaaggcctatatcaaaaaacaaacgactaagaaacaatattgaattcaaataattggcaaaataaaaagaaatgcaaacaaaaaaaaaacagaataaagaaaataatcacctaggatattttagcaattctttgctaatccaatcatcaaacttagcctcaattttaggagagacgggatcagaaaatgaatcgttaagagcgtaaaggcccttcacatatgtaactatcttaaaatccccctcatctcctctagattgagaacctgaggacattacctccattggctgctgctcacatcagccgacccaaaatcaacaaaaggagatttcaatgtcgggacacgtttcctcttatccaacagaggagtacaagtaacagtgtcattctcttcttcatcaaaagcaatgtcatctgccttttcaacaataatatttggaatggaatctggaacctgaaagagaaaattaaaaaataaaaaaaaaaagtaaaagttgcaaaactaacataaaattgtctaacaactaaaaaaaactaacatg

SEQ ID NO: 68222 - DNA, 987 bp, Cannabis sativa
tttttgtcacaatacttgttgtgattaaaattaaattaatgataatttgaatttaaatactatgttttagtcacaagtaactttttattgtgacaaaattatatttagtcacaaagaatttatgttatgactaaaaatttatcgtaactattttttgtagtgtataataatgtcatgaagatatgtgattgaatgtataattgaattttaaagttagcatgatttaattagaaaatttaacctaattgtgagtataatctttcacaatagcaagatcactgtaaataattatcatattgagttcaccgttataaaactcgacaattacacttactcaacactatattttgattctatacgccttgaaaatccatttacaattgagaatttcaatccaaactaatgagcttgaactgcagatttcagcaagattcgccgaaccctcaagcatcgctcgtcgtaaaatctgcaggacatgttttgcgcgcatttgtaaatggaaaattcataggcaagaaagcgtgaactacaattgtcaagtgtttatttatttttcttttccttactctttttttatgtatactaacatttaggagctgcacatggttctcaccaaaatccaagattttcacttgagaataccattgctttaggtaaagggatgaactatatctctttacttagtcaaacagttggattagtggtatgaaatctcaaccacaatttctgaattttgttacctttttttgttatgttttgttactaataaaactgaattttataggattcaggagcttatatggagagcaaggttgctggactccgcagtgtaactattgaagacaatgatcttagaatttactcatggggttatcaggttgggttggtaggtgagaaactagaaatttattcagatgttggagcaagaaatgttcaatggaacaagtttggtagcttgactaatcaaacacaaccactcacatggta

SEQ ID NO: 68223 - DNA, 570 bp, Cannabis sativa
gttgactagctttataactgtttttagttactggttttgtactaagagcttgagctatataagactcactcttttctaatctcgatggatttaatataatacaattcatccattgcttcttttcttttactctctgttttgtaataataatagaggtacttaaattaatgcaacttacatgtagagaataaatagtgcattctttaaatttattttcatgatatttatgaataatgtaaatatgtgcaaaagttattattttaatagagtagaaaataaaaataatattaatttaatgatatagataaggctgtgcataaattatccaatccagtgacaacctaccgatccaataacaaccgaccacaaagaattagatattcaatcatgatcgaatcggacaatatttttgaaaattcaatattggatctaccggttgttggatgacatgtgaatctaatgaatccaaccgaaggatccaatccaataagcatccaatatcatctaattataattaatatttatatataattttaaaatatattattattttattatggaacattgaaa

SEQ ID NO: 68224 - DNA, 831 bp, Cannabis sativa
atcctccacatcatttaccataaacaaattatcattatttaaaataaaatcaacattttttgcaaaatcaacattacccacagtttgctccttatttttaggagctgaaaaaatatctccaacctccttccttgccgcacgcgacatctccctatcccttccaccagcctccacagaaatcggcttggacgaagacagaccacccacagccgcacccgtactggtactccggccaacaaactccatgtccgactcattaccatcctgcaaccattgcgatccaattaaattattcctcctccaaggttgagctctcatccaaaccccatacggttttacaatattttcaatcgacacttcaaaaagcttggaacaaaacttttcggattgaccgataacaccacaaataaagcaaaaagtagggacatactcatacttaaactctgcccagaaacccggatcatccatgcttcgctggagtttcttccttcgttttagcggcaccgtaatatcgattatgacacggacatgaatatattcacgccaaacttactgaaaattcttcgggtctgatttgataaatgtcccaacaaaattgcccaagcgttccacaatagatgccaatttaaaaccggtttggagcccatgtatctgaaccaacatatcaagactattgatgacgaccttcttaggatcttcacctctttggagccgcccaaaaacaaactattgacgattgaatgtccacagactcccctcaacgaccctttccaaatcaatatcatgataaaactgaaacaaatatcgattagaatcaatttcctttgcgta

SEQ ID NO: 68225 - DNA, 672 bp, Cannabis sativa
ctatttttcttatatgtatagtaagtaattatttaaatcttatttttaaaactataaagtattataaattttttaaaaatttacaaattttcttaaatacttaaaagggacgatatcatcaagaaaaaatatgagtaaattttttttcttaaatttcaatatagataacaagtgtactttctatatgtaagtttctcttcacaaatatataatatgtcaattgaatttttattttcaaaaaaaaaaaaaaaaggaaaagaaagttatattccatgactaggtgagacatattaacgagattagaaaaaatatgggatggtagctccaaaatacattaattcaaaggttaaaaatcaataccatacccaccatatatagggtcaggtaagggttttttttttttatttattttttatttttctctttcacaccttcacttattattacttttttctttgttttgggttctcaagaaaagaaagagagaaaagagaaatatttcatctatctttatctttgaagtgatatttgatttgacatggatagttggtgttgctagtaaactaggtggtagagttcactgatttaaaaggccactatctcttctttacttcttctacatatatacatatcaccacactgcagttagtaaaaaacttgtcaatcttttca

SEQ ID NO: 68226 - DNA, 510 bp, Cannabis sativa
cggtttgagtggtttgatgtacacccctagttggtagcatcgaccactggaggattctgagcagtggaggtagctgagatggtggccctagtacgcaccattgttaaagaggaaagaagcttcaattgatttcttgaagcttgaaggaggaggagtcttctgataccatattagtggaaacagagcatttttctttattgaacaaattgaatgtgaaatatttgttacaactgattgaatattaggggaggtacatatatatatactggcacagtaaaaggtaactaatataactgacttaaccaaaactaaactaatcgaataataggtcgtctaatcatgaattatatgtttctctttcatctcacccattaaggtagttgcggcctttgcatctttacacctaataagcaaactcataaaagcattataagccctaaaatcaggtcataagtttctcgcagagagtttatcaaacaatttttgtgccattattggattcggagcaat

SEQ ID NO: 68227 - DNA, 688 bp, Cannabis sativa
tttctatataattcaattattctaataattatgtattaaagttattggctatacttacaaagttaactattaatctttcctaacttactatataatagactttttaatatgacgttatttgtttattttaaaactaatattttattttttatttttattttaaattacattctattattattattattttaatttttatgagtatccatccaataggtccccatacctaatggaaattctccaatacccaaacacatcgagggttaagcgaggtaggagcggagatagaggacataaatgagaaacgataatgaaattgagaggtacattacccgtttattaaccaccaaatttccatctctagcaacattatcaattttaataataataaaaaataccataaactcattaattaaagaaattcaataaacaaaacaacgggaataccgtgaaaattttggaaggttcatagtgggatccattttttaatgcatgaagcttataagtttgcctagatttttaacattttgggagactcacaaaaataataaattgtttaaatttacttataattagatgtttgacacttgtaatttcctaacccaaatatttatgttttaaataaataaagaacgagcattgctattgggtaccagtggtgcctagcaccttctagatgtgtcgactt

SEQ ID NO: 68228 - DNA, 1036 bp, Cannabis sativa
tcaaggggttttggctaggaaattcatagaatttggaggatcaaagctaaaggtaagcttgttcttctttttctctttgaatttcaagttttgagattaggtttttttatgcaaaattctaaattggattactgtgctttaaactggttttagttattgtgattgggttttcagatctggatcattaaggatatacaccacttaagacttttcaggaacttgttgctcatatatgaatgtggtattatttaagattgtgctggtttagtgagagtttgtatttggaatgttctatcaagctgacacatatttatgctttaattctgcaaataaagtatgaacttaagttttgagtactctgaacgtattctttctattgagatttaagtataaagttagaaattataaagaattgatctcaattaatgaggactagttggagataagcatgctaagatcacatttgtatgtagtttctatgctacgcatccatgattgatatatgtgatcattgatggatttttccacgctaaatgttgtgaaagctgctttgatatcctatgttagtataatcactggacgagattgttttgaaatacctatataattatgatagcaaaagttaagcgcttataaggttacacaatgtacaatcaaaaaaacttatgtagcccaagtggcagattgttggattaaaatcctcaatatgggctcatatgtatattagtgtattgctagttgaagtttgacctgaaataaactgatcatttagtatttgtgtgtcattgtgtattaaagtgtcatgggctaaatgtgtagataccttaagaggtatttctaagatatttctaatttattgaggggttaattagaaatacttaaaattataacctttctatgaggtcatatattggcagtgatcctcaagaaacaaaagccactctattctcatcttcccccatcaagagagaaaactagagaacttaagtcttgtattctcagaagatcattacccaaaatcacaacaaagatcatc

SEQ ID NO: 68229 - DNA, 844 bp, Cannabis sativa
tagtcgctgccctctttgctcccatcataaaagaaaactacctatcatgctttgtttgagtgtgaaagagcaaaattggttggaagaacttctaaatttcatatgttgtaacatgactttgttggttatatataaaagtttatcttctaaaaaaaataaattttatttaactatatttattagtaaattactaaattaaatttacaaatatttgttaagaaattattatattgaaacatttaggggcgtttggtaatacttttatttttttaatttttttaatcacaaatatgaaagtaaatttgtgtttttaaaaaacaaaaatgtgttctataatttttactttatttttatttttaattttcttaaagtcggctccaggcttgagtctggggcaaggccgtggtttgagtccgggactggagttagggccaaagtctgagtcccaaagtccagattggggtcagagtttaaaatattaattaagaaaagaaaaattattaaaaaaaaatttaaaagtgatttctttttgttttcaaatttttaaaattttaattctcaattaaaaattgaatagtaaaaacagttttaaaaaacatatttttgaaaaatattttaatttttttaatttaaaaaataaaaaactaattaaaaaattattactaaacgcactcttaattttaaaaaaaatcaaaaataatttgtgccgactttgaacaccaaacatattttagaatataattactgaccatttttcgaaaataaagttttaattactttgtaaaatatacgtattccatttttttggcataatacatcacttctattactttgtaaaataata

SEQ ID NO: 68230 - DNA, 724 bp, Cannabis sativa
ttattaagctataccttataatatcttcaaaaaaaaaaagttataccgtataatcatgatgaaaacataggagcataatcaactaagaacagaaagatatgactagataaagcttgtttaacgtttagtaggtcgtataatattatattatattaaattatatgtcataatattatacaataatatattaaattttaatttatattaaaatataagtttatatgtctataaaaattaatattacatataattttatataaaaaataatttaatataatacaatgcgatataatacggatatcttcccatacgataaaatacgtcacatgcgacacattcgaatacctataagggtaagtgtcactcgtttgaacatacaacttctaagtcgccgaacatggttagggactcgtaaacctttaatgatagctcaattatataagtagtcaaatttttttaaagaaatacattaatagtaaaatatttttaacgcaagcacccaatttgagtacttaatttaccttacatttcccatttagttaattagatttttttcttctactaaataatactaaataaataagtgggcgtcgttgccaccacttcacaatgatattttatatatctcaaaatattacttctctttctctttcattttaagtggtttcgggacaacttatgacaagcaacttaaatgacgcccctattattgttgcccttgttg

SEQ ID NO: 68231 - DNA, 514 bp, Cannabis sativa
cacctatggagaatgtcaggttgatatgagaaaacttctcccatagcactgaaaccatttttgggcgtatattttgaacttatccaaaaacccaaaccgaaccccgcacacacgcacaaaataacaaagaatgaaagagagagtaccagctgtcgaagacagtaactgaagggtcgtcgtcgctctctgggaggagtaaccctcgtcgtcgtgggaggactgtcgtcgtcagaggaagagctggggaagagacgtatgtccttgtcgtcgtcctcgtcggggtagcgatcggagagagggtttgagagagggtcgtgggttttgagggtttgagcgagagggtcgtgtgtgtcgtgggttaagggtttcgacaaagggccgggtgtaataaactgaagagtccaatcgtatacacacctttgtcttcggtaatttggtggagccctttgttttcgaaaattttgtaattaccgaagacaaagctccttacaataataattaaaaaatttatatc

SEQ ID NO: 68232 - DNA, 1234 bp, Cannabis sativa
cacatatgagtgacatgaggccgatctcactttgcaacgtcctttataaaatcgcctcaaaggtagtggccaacagaatgaaaggtgtactgaatcataccatctctgaaactcagagcgcgtttgttgcaggaagattaatttcagataatgttatggtggcgtttgaagcaatgcattacttgaaaaggaagactaatggcaaaaaaggctacatggctcttaagctcgacatgagcaaggcctatgatcgtgtcgaatggagtttccttggttcgatccttcgagtaatggggttcagtgatcggtggataaacttgattcttagttgtgtgaactctgtccgttaccatgttcttaatagtggacaaaagatgggaccgatcgtcccttctcgaggtatccgccaaggctgcccgttatcaccttacttgttcattgtttgcgccgagggattctcatccttggtgagacactacgaggcttcaagactcataacgggttgcaaagttgctagaagtgcccctaccatttctcacctactgttcgcagatgacagttatgtgtactgccaagcctcggacgaagaagctagccatgtattacaacttctccaaacgtttgaaggcgcatctggtcaaaaagtaaatctccacaaatcatcagctttcttcagttctaatacttcggccaacatcagaaatcgcatttgtaacttgatgcatatccaggaagcgggtgaggatagcatgtacctggggctcctaagtatagtgggacgaaacaagaacgctgttctggggttccttaaagaaagaatgaggaagcggatcaatagttgggagggtcggtttctgtctcgggctgggaaagaaattcttattaagacagtggttcaatctcttccatcgtatgctatgaacgtattccttttcccaattggtacttgcaacgaaatagagcggatgatggcaagcttttggtggaaatcaaacaactctaatggtaatggtagtggaatcacttggatgagttgggatagaatgactaaacataaacacgatggaggtatggggttcagaagcttgagggactttaatctagccatgcttggaaaacaaggctggcgacttttattcaacatggactctcttgctagcaaagtgttcaaagctagatactttccacatggtgattacctctcggcggagttgggttcgaacccgagctttat

SEQ ID NO: 68233 - DNA, 1358 bp, Cannabis sativa
tgctcaagacgaacccgatggggtccattaggagatcctaactcttgattttgagcattataccaatcaacaaagtttagttttgccaaaaatagcacttcttcagatgtaggctgtttttcattccaaactacctcgtttctaaccttccaaatggaccacaatatcatacttgcctccaagcattcggcttccttccatacttgtaaaccatcttcccaccagctacagaaaagcatcgcagccaagccaacagcaggaagttgcgtctgccgccaacaattttgagcaaaaggacaccgaacaagaacatgtaaggaggtttctggggcagccaagcacatggggcagtcggaattaatggggacatgtttagttgtaagctgaaatcgggtggggaggctatttgtgcacacacgccaaagaaaatctttgactttcggaggtaatttgagctgccaaagcttcgtccatgcaccagtaagaaccggctggtgcgtgattaatttctgctgctgcagaattctatatgcacttcgcaccgtgaatagacccgaagcttccttattccaaaaccaaccatctttttcaacgtccgatgacaaaggaatcttccacactaattcttgatctcttgtcgtgagcacatcccgtaatacttcctcgtcccactcacgcacattaactttcatgagtgagtccaccattttatccactaaacacaattgctgagactcaacaaaaggattagtgtcatctaagagccacggatctttgagtatactcacagttgagccagttcccacaagcctccgtactccatctcgaaccaagccttgagcctccaaaacgcttcgccaaatatagctgggattattacctagtgttgccgtgaggaatgtaccattggcaaagtaccttgctttgaaaatcctcccaaccaaactattgtcacaagtaagcaacctccaaccttgttttgcaagtaaagcaatattaaaatcacggaaatcccgaaagcccatgccacccgtactcttatgatgcgaaagtctatcccaactcatccaatgtatgcctttgtttgtgttggaacgccaccaaaacttgcttattgatctttcaatatcttggcaaattccaactgggattagaaagacattcatagtgtaagcaggaagggcttgaaccaccgatttgataagaacttctttgccagctctggagagaaacttgttatcccaactctgaattctcttttgcactttgtcggacagatagctgaaaactgccttcttatttcttccaatagtactaggtagacccaagtacttgctccgctcatcagcctcatgaat

SEQ ID NO: 68234 - DNA, 753 bp, Cannabis sativa
  modified_base (185)..(185): a, c, t, g, unknown or other
gtagtaaatttgtgtgaaaattccacactaatttggtgaaatggtacattgttattagagatgctctaagaccatctccaatagttacactaatttggtgtaaaatcttttactttttatgtactctaataattagatataacatccaaaattctatcaaataaatatattttacttaaaagttntcacattttatattatttatattaataactaaaatagttattttgtgatatacgtataaaatagttgataataagaatttaaaatcttaaaataatttaataaaataaaatttttattaaatcaattacacgttatattttcttaaaaaaaatatattattaaaaattctatagttgattttaatatatgcgaccattttcaaatgaccaaaaaatatttttgcaaaaaagaactcacaaacattgtcaaatactttaagaatattaagattctcaaaatacttcaagtctatatagtaaatattttgatattcctcaagactaagatcctcaagtgaccaatttgactattaaattactattttacttaatgtttattttcatttatgtcatttttttagctttataactttttgttatattatttttattttatttaatattagtaatatatttgttattatattgtacttttaactatgtcaatattttaaattaattattatttttgtgataaattttaattggaggactaaaatttaatattatttgttaaaataaaataaaa

SEQ ID NO: 68235 - DNA, 586 bp, Cannabis sativa
taaagaatataataaagattgtttttttttttttttatcttaaagattgtattttttatctcatgcatgttttagagtaatagtacaaatttcagaggagtggagtcttaatttgatactaacacttggattgggttgggttgggttgattcataagggtgtgtttggttgagaaaatgaatgaaatgggattcaatccatttttagaacctagaatattattgaaccttaaagattgtctttttatcttaaagattgtatttttatctcatgcatgttgtagagtaatagtacaaatttcaaaagagtctaattttaatttgatactaacacttggatttggctgattcacaagggtgtgtttggttaggaaaatgaagaacctaagggagtgttgtgttgaagacttggttttttttgttcgatatatgtttagaagagttatgatacaaatttaaggcactaacaaatacttgtgttagcataactcacaagggtgtgtttggttgggataatgaatgagatgggatttagtccatcctttatggagtttcttttcttttcaaactgaaaaacatcacacata

SEQ ID NO: 68236 - DNA, 579 bp, Cannabis sativa
gactttgtttttcacccacaagttatccatagcctacttttgagggaagtataccagcccaatccaaaagaattttgggctaaggttgatgggcgttgtatacgattcagtgcagaggagtattacttgatcactggtcttgattgctttggtgattgtaaaaaactgttgttttcccaggaatcaaaccagttaattgaggtttgttttcgtgacgtaaaaaccattgatcataaagctatagaggatgctttcttgggaagtaggtggggacaggatgagcccctaggtttgaaactatctgttttgtatgtcatccaatgtttctttcttagcaacactggataaaaaagtttctaggtttgatctagatgtcattgatagcgattgatgggaggagtattgttggggtagggagttgtttgaattgactattaatgattcttttaaaggaagaatagagcatgggattaaaatgaaaactaaaaaagaagggaggtcagtcctatgatggttggtatagagtgttgggttgtccttgggtgtttattgtttggttttatgaatgttgtcctgcga

SEQ ID NO: 68237 - DNA, 951 bp, Cannabis sativa
ggtttaaaaatttttttttggtttaggtttagggttagggaaaaaaaaattttaagattttctaagtatagaaaatcaaatttccctaatattattggcttcatgttaaaaattatagttccattttaaaattaattcgtaatgagtaaagtagttcatgtttttttatagagcattgctattaggcactagtggtgcttagcaccttctcgacatgtcatgttgcgattgactagcgatactccttaaaatctattatattaaattatgtgggactcgatacttagttggaccaatagcgatactgacacataggagggtgttaggcaccaatagtgccctttagcatttctcttttttatatatataatttaatatttttatatttaattcacgtagaaaaatattgtattattaattattatcatttattagtgatatggtttcataataatagacctccatacagttatcttcttctcctaatatttatctgggaaaaggaagctcctagctatgtttccattggcaccatgagggtagaatccgccgggacgagactcattaccggttccataaactgtcctcaatatctccggcggtgttcgcgcataagatagtgaataagcatcggctgatagaatgttgctggtagtcctattctccgcgccaagcttcttaggtacccttagtccttcgtcttttatgccacacatggctagctcgttcctaagagttgatatatagtttgtaaacttttccactgttataccatatggatacacctcttctttgcctctctcatacaacaatgttcttatcactgcatcctgcccagattccactcccaaaagtgaagctgccaactacaatgaaataaccatactcgagatgagtacgaggcatcattagtgtctaacaccacgaattttaaaagtaaatactatttta

SEQ ID NO: 68238 - DNA, 1524 bp, Cannabis sativa
  modified_base (73)..(74): a, c, t, g, unknown or other
  modified_base (1298)..(1305): a, c, t, g, unknown or other
ttgtttgttaagaagaaggatgggtctttgcggatgtgcattgactaccgggaattgaataagctaacaatcnngaataaatatcctttacctaggatagacgatctttttaatcgacttcaggggaagactgtcttttcaaagattgatctccgatcgggctaacatcagttgagaatccgagaggaggacattccaaagacagctttccgcgctaggtatggacattatgaatttttggttatgtcttttggactgaccaatgctcttgcagcttttatggatttgatgaatagggtattcaaagatttcctcgatacttttgttattgtatttatcgacgatatccttgtgtactctcaatcagaagaggagcataagcaatgacttcgagaacataagttatatgccaagttcaagaaatgtgaattttggctatctcaggtgtcccttctttgacacattgttagcaaagatgggatcaacgtggattcgggaaagatagaatctgtcagggattggccgagaccgaaaacagtgatggaagttagaagtttcttaggtctggctggttattatcgtcggttcgcagaagtgttctctaaaatttcaatacccttaaccgagctcgccaaaaacaatcagcgttttgtatggtcggataagtgtgaatgaatcttttaggagctgaaacagaggttaatcacaactccagtgttaactctgccttctgataaagagaagttcgtggtttattgtgatgcatccagacagggtttagggtgtgtactaatgtaggcagattgggtttttgcctatgcctcccgacagttgaaagattatgaatagcgatacccgactcatgacctaaaacttgccagtgtagtgtttgctttgaagatttggcggcattatctctatggagagagatgtgagatttatactgactataaaagtctcaaatatttctttaatcaaaaagatttgaatatgagacagagacgttggttagagttgttggttaatgataatgatgagattgtgagaagatcttttaccatcctgggaaagccaatgtagtggttgatgccctgagtaggaagggtcccgggcaggtaactagtacggttcagattttacctcaattagcacaggacgtggtaagatcaagcatcgagtttgttgtaggcaaacttcatatcttgacgctgcaatctgatctgttaaagcaaattaaagttgctcagctaactgatcaagagttagtgaagataagagaagaggtttcagctggtcannnnnnnnactttacagtgtcagataatgggatgatgttattcaagaccagggtttgtgttccaagtagcatggaacttagaaataaagttcttgaagaggctcataccactccatattccctgcatcccggtatcacaaagatgtatcaggatctgaaaccctacttctagtgaagctagaatgattgcctcacagagcagacagaagagttatgcagatccgaaa

SEQ ID NO: 68239 - DNA, 594 bp, Cannabis sativa
gcactaggctagagctgaattatggtcataccaataaaagtgaacggattaccttggtggtctcctattcctctattttcttaacagcttctaaatcttaacagcttctattttctggcacaattagttcttcaacatattattttcctttaaaattaaagttactggtgtgttctgtactaactgttttcttaaaatgtaaccgtgtgcagcaaaagagtggacccgattgtatgctagtggcgaatgaatatgagaggcttctcaaaacttatgatggttcttgatgttaaatttcagtcttttagtcttaaaacatgtttttttagacttaaatagacatatggtgtgacaggttaaaattcgtagtgtttattctcaaatgggtagtgtaagaggtgattttattgtatgatgttatggtaatgtaggagttggttctcaaatttgtattctctgtttgagttcatatttcattttatttctcaattgtggatcatatgataattttctttggggtcgctctacggttcgaggatcaaaataaaaaataaaataataataaaaaattatgtctaagaaatagactaatgg

SEQ ID NO: 68240 - DNA, 690 bp, Cannabis sativa
  modified_base (213)..(224): a, c, t, g, unknown or other
aatgagtagattatttgtaattttgtgtgtactatattgtacaaatatcataaaaattaaaactaattaaaattcgtgcatatgaatacgttggaagtatctttaacgcaaattgtactttcactttgcatataatatataaagcattattattaggcatcagtagtacttagtactttcttcacctgtcgcgttgcgattgactagcgatannnnnnnnnnnntattatattaaattatatgagacacgatacttagttgaaccaatagcgagaaaggtactaggcaccattggtaccctttagcatttctcttaaagatcaagcattcaaaatatataatattaagagaaaaatagaagtattaagagaccaatcagtaaagatcaagcattcaaaataaacagtttatttgatgctagcatgcaaaaatatataatatgtattaattcttatcatatgggagagggcaatttttatatgtgataatatacactttgtgcacgagtaacgtacagagtttgtctgcacgtagggaggcaaaacacaataagactaatttgttgaactcttatcaacgtagaagatgggtgagatgagttggtgaactgtagatgaggagacaatatcgaaataaatataactcatgataatgagttgatccaataacccaactacttgtgtggacttt

SEQ ID NO: 68241 - DNA, 723 bp, Cannabis sativa
tgtaatactgtgaacagtaattgtaaacatttaagttcatctcttttatcacaacaagagcatgaacacatagtagttcgtcttgttggaatctattgcaactatatattttatctttcagattcatcatccatgaccttatttaatgtactacttcaaacatattgtcacatagtcgtttataagtttcacctgcacatttgatcacaataatcaatatattaaatattgacaaacccaaatgctaatgacaaggcaactctattgcaactaaaagtttaatgaatttttacattctctgttaatgattcctgacaatttgaaaattcaatcatagtaagtcaactatgaaaaatctgaatggacactgtaatgcaacaatcatatgtgttgttaaccttaaaacgatttataaccctcgcaattatgtaatagaaataaacttgccacaatagagtttgccatatatgagttatgtaatataaaaaatatattatttaattaaaaaaattaaacatacatgtattgcacttaatatcacctaattaaacctaattaaaataaaaactaattattcgtacattgcacgtaacatcaacctagtatataaaaatatatataaatattcttgcaagcattttattaaaaaaaaataaaaaaaaaaaaacccaatttttttagagataattacataaagcatcatttttttaaaaaaaattatat

SEQ ID NO: 68242 - DNA, 1977 bp, Cannabis sativa
  modified_base (990)..(990): a, c, t, g, unknown or other
acctggttccaatttgtagccgaaaaggtaaagaattgcttgaaatagccaaccatgacatcttaaagaccattatcccaccaaaccattgaacctgaatcatcacgaaggttgttgatctgattattgtgttttcttgttttggcagcagcatggaaatatttggaattatgatctccttcctttagccacaactgttttgatctctgtctccagaatatctccttttgagttaacatcttagcaagtctttcattctcctcttgatatctctttgctgaatctgcatcacgcctgcctttaagaagctttattcttttttcacacttagaaattctggtcttgaagctaccagtaatctcttttccccattcagccaatacttcagagcacttttcaatctttactgctaaaggtgaatcgtggtgcagcaaccatatgtcttcaactagcttcctacacattggctctcggagccaagcattttcaaacttaaagctacgggaagttgcttgttgagtttgtacaacaggggtaagaagaattggacaatgatctgaggttgaaacctcaagattggtgagcttcgcattgggaaatttgtctagccaacttggagtgacaagggctcggtcaagcttgatctcgacccaattttcagtaccttttcctcttttctatgtgaacttgtaaccttccatctccatatcaatgagattacatctactcaatacattttgaaacccatcaatgagccaattcggatacggtcgtccccctttcttgtcactttggcaagttacattgttcatatctccaataagacaccaaggaagattaataatattggcaagatcagtgataagcttccaagtgagcttccttttagacctgtttggttctccatagatgcctgtgagatgaaattgaggccactcaggagtagtaataatcatatcaatatagttagtactgtaagacttgatctcnacctcctccttgtttctccaaagaacaacaatccctccactatgtccctgacttcccacagtaaaagaaacctcaaaaccaatagcaaatttcagcctttccaccttttctttttgacaaaatgtttcacaaagaaaaacaaagttgggtttcttttggataataatatccttaaggaattgaatggtccacgagatcccaagcccacgacaattccagcttaaaacactcataatccttggcgggtccgtgattcggagcccgtcccattcgagtttttttgcccgctgttaaccattgggtctgagttacccacatcttcatcatctgatacaaggcccacttcattttcaatacacatggcaacactctggcccaattctgagtcagaccttctttttttagactcaacaataagctttcctttttttgtaagtggctgattgttagccaattcatcaatcacgtgttgtagtgagttattaagttgactaatcccaccatcaatatgagtattattcatgtgatttttcccacgatccatggccatttttgaattattctggtaattctgctcaataactgctccataactcccacaattttgggtaggatgatctggtttctggttaccgttgcagctggcatccatgctttcgaatctcgtacgtaaccactgagctccgatgagctttgttcgtcgacggagcggagctttcatccattctccgtaaggttttgtaatctcattggctggtatatcgaatagcttcacacagaatctctccgagcgccccaacatcccacagataaagcaaaaagtgggaacattttcatatttgaaagtaatccaaaaccactcttcgccaagcttacggagtctcattctttgttttagaggtttagacagatcgatggtgactctaattctcatataatccctccatatacccataaaattattaggacacgattcaacaaatgccc

SEQ ID NO: 68243 - DNA, 2307 bp, Cannabis sativa
gaaaaatcgattgagacaaagtaagtaacaaaataataataaccttaaaaaacaacaatttctgttgaaaaatttaactaatatgagatttataataattttttttataaaatataacttattaatcctgaaaaatgtaacaaacataacaataataacaaaaacataaaattaagattaaaaggataatattattagtgctgaaaaatatatcttatacccaaatattttgacaaagtagttatagattttatcactctcctttataaatactctcacatctaaaaccatttctaatcattttcataattatggggttattaaggattttatcatttttaatattattttgttactgttttgataatggtgtggaaggttctcataagataattccagaatatcaatctctggatattgatgaagtcaatcccattcatagaactggatttcatttccaaccccagaagcattggatcaatggtatttctatacttatatatatatataaaacatttattcttttattttaaatcataatcgtagtgatcacaatgaaacaataattaataattctatccttagaagattattattttattattagtgtgtaagtctctttgaaattgttattaattagttttaatagtttttctctgaagagttgttatattcatgtggaaatgtagtttcgtattttttttttaaataaaaataaagggcaaggtttattagtattatatatattttgatattgattaataaaaaattcaagcatttttttttgggtaaaattaacagattatctatttgtttgagtggaaatttgatcaaaagatcgatctaccattcagatttagatgtgaagagctatcttttttatttaccttaatattaataacaatttttcattttataaaattcatttaaactaatatctgtttgtgaatatttttatttttcagtaagataatattatcattattattgtataattgatcaaatttaaatttctttttaatttattaacagattcttcgaatttttttaattatatattttatgtaatattcttatttttcttcataaattagattatttaattatgagttctaactttgttttattttgtttttccattgttatgtaattggacaaaattaacaagacccaaatggtaagtattctctctaatcaacaataattttatttatttatttatttatgaattttcctattgaatttagttttaatttttttaaaggacctatgtacttcaaaggaatttaccatttattttatcaatacaatccatggggagctgtatggggaaatattgtatgggcacattcagtctcagaagacatggttaactgggaatctcttgaaccagccatattcccttccgaagattacgacataaacggttgttggtcgggatctgctactgttcttcctggtaacaagcctgtgattatgtacacaggtattaattcatcatggccataacaccctaattttttaatgttgatatgatcatggactagtaagcatgaaaaaagaataaaaaagtttacacatagtgtagtcctttaaaatatttacattgatccctctaaaatcttagaaaaatttataattttatatatcaattagtatctttatttgtataatgccttcaaaaaaaaaaaaatactatgaaattagcgagtagtgctctcccattcccattccattaaagtttttaatcattatcccatttattcgctatcggaaatggatcccctaataacaaaataaattttataataaaaatttaaaatataaaaatagtaaactacataagaattataatgttacacaataattattattcaataaactaattattatctaaaatacaacttattagggacagatccccatcttgcatccctacttacctatattccatattattagaataaatgaataatttcaaaaaaatacaaaaacaataaaaaaaagaattacaaaaataaggtttgtacgaaatttttaatctttttacaattttatttacataaaatatggtgtttttgtgtatttttatgttgtattcttattattacgttatttgtatattattttttatgttgctttgttgttgttttgatgttatttttttattattttcatgtggtttcttatttgttcttatatattttatagaataccgtaaaaatgtaaaaaaagaaaattaaaagtaaaaatataatttttttttacgaaaattagtgtttcatgtaattattcttagaataaatt

SEQ ID NO: 68244 - DNA, 1472 bp, Cannabis sativa
cccctgccgtactgtctttggtgtttagcaatactcttcttaggaccatatctcccacaaagaactttcgagcatttacttatttgttgaaataccgagctacttttgttgatgggctatcaactttaagtttgctgtgattcgcttctcttcgatttcatcaagtgattcgactaggagtacgtgatttgcttctttgttgtacgccaatcttctgtgggatgaaggtttgagttctacaggcagcattgcttcatatccacatgccatggcaaatggagtctgtccggttgccattttctcaattgttcggtacgaccacaaaacatcagcaagttcttccggccagtttccttttgcatcctcgagtcttttctttagtgtatcctttagggtcttgttgactgcttcaacttgactattttcttggggatgcaccactgcggagaaacttttgaagataccatggttcgcacaaaaatcagtgaaggactggttgtcaaactatttgccattgtccgaaactattttgtacggaaatctgaactggctgagtatattcttcacaacaaagtcttgaacttttttggatgtaatggttgccagtggttcgtgtttcgtccacttagtgaagtaattgaccgcaaccactgcatactgcactccacctttgcccctgggtaattgttcgatcaagtcaattccccaaatggcaaaaagccacggacttggcatctgagttaaattgttgggcggagctcgaggtatctttgaaaatctctagaatttgtcacactttttaacataggcctttgaatcttcaatcattgtcggccagaaataaccttgccttagaattttcttaaataaactttgcccgacggcatgatttcaaaaaaatccatggtgcacttcagataaaaatcgtgcagcttcttcttgagtaacacatctgagcaacaacatggagaaacctcgtctgtacataattccctgtacaatgatataccgtccagccttccttctcatcttttgagcttcatttcgattatctgggagttccccagtgttgaggtaggctgctgttatcgtcatctagtttgaggaagtagcaatcatttcgatctcttccatgccagtaatgctaggctcttcgaagaactgaataggaaccaagtttgccttatcacttacattactgcttgccagtctagctaacgcgtctgcagtcgtgttttcttcccttggaatttttctgagaccgtggctttcaaattgtgcaagcaagtcatgtatttatctcaaatatgctatcatcttttctccctgagccttgtattctccagatttgtgatttaccaccagctatgaatcactcaagattttgatgtgttcgactttcatctcccaggcccgttttaggccagcgatcaaagcttctgtaacgccctaatgctaaggcacgctacagt

SEQ ID NO: 68245 - DNA, 2040 bp, Cannabis sativa
atttatttttgcaaaagaatttttatattaaaatatctaaaataactttatttaaaaattaataaaatctatatacacatagggtgatgatttagtggtttatgttaaatgccccttgtgtctcactacagctgaaactatttttcatgcgttagttgggtgtgttcatgctcgtgcttgctgtaacaaatcaagtgtggatgttggcagcaatatggaggatgatttcagcaattggctgctggagctgcaatgtcgaggaagagaaggcgagttgggggagacggttatggtcagctgagccatttggcgggccataaataactttgtttggtagcaaaaaagttggactactgcaaatgtagttacatcagcaagagtgctacttgatcaattcaaatatgctcaaaaaagaaagggtctttctttgtcttcgttgttcgacagaggtcgtttggttgagcattagagtgcaccttcttcaagaaagatcaaggttaatgttgatggcgccttatttgagcatgaaggcaggtttgagtggggttgtgtggctcgcgactccattgcaatgctgtggaggctttcaatcggagtcatttggggagggttaaagctgaagttgctgagatggttggcatcgaagaaactttaagttggattgatcgacacaattggggacaagtgattttggaatcagacagcttggtatgcatacaagctattcaaagtaaaatctctatgtcatcttcttttggtcttttagtccatgatgttcgtgcgttgcttttatctttagacaatgttgaatcgtgttctgtcaaacgatttgcaaacaagctcgcttactgcttagccagagacttttgttttctctccaggtcgtgtgcttcagttggaggattgttcttctgaaacatgttctattgttattaacgatttgattagttaataaaaatactaattttattaaaaaaaagatttatgttaaatattttatttttaataaattaaacaatattaaagttgtgataactatcaagactattttataataaactattacgattaattatttattacgaagatataacacataaacattgaaagtatattatgaaaaataaaaaattagacaccacacaatacaacatgtattttgggaaaacttaaaatatgggatttttaaagtttatatacaaaataaaataaaaaaatccataatcccatggtattatttatttatgccataaaaaggtaaactcttaaaaccggttatatttcatacataaccagtttaagttattttgtgttatttgtttttattcattatgttatagaaccgattctttttttatttataactgaaacatctaattctggtgactttttcagcgacaatgattttttcggcgacaatgatttttttggtgatttttccaacaataataacttttctgatgaatttcccaacgctaacggcttttcccacgaaacttattatttcaagttttatcaaatttatttaatgttttatatgagatttttactttttttttttataaaaaatatctttatacataaaaaatgtctatctaacggcaattgttggtttaacgattttgtttaacgattccttttttcatttatccttgcacgattaacttaacagtctgttaacgttaaacattaacaaatatataaacccaataattaaacccaaaaaattaaataatctttttttaaataaaaaaaaaatcatcttacccacatatctctctaacaaattgtatattccaaaaaataaacccaataattaaacccaaaaaattaaataatctttacgattaacaaataaataaacccaataattaaaccaaaaaattaaacaatatttttttaaattaaaaaaaaaaaagaaatcatcttaccctcgtatctctctaacaatatttgaagaggaagaaactgataactatgcaacgatttcttaatttgaatttgaactaaattaatctcctttaatcttaattttaattt

SEQ ID NO: 68246 - DNA, 1127 bp, Cannabis sativa
acaatattgaagatgtttacgaaaatgccactacatacaaactaagcatcagcatgccacccgcatgcaccacaacatgtgccaccacttgaccaccacttggccaacttgaggaaatcacttagcttgtaatgtgccctcttggaccgaacgtaacattttcccccacttcaacatgtcgatgacctcatcgacggccagcaggcaactcttcctgatctcaactcgtaagcttaccccaagcttctcccgaatcctaagtctgcacttgtccctctacctctgtagaaccaccctcttggtgacgatctcgctcgcccactcttggacttgatcaaagaccctatgccactgtcactactcagaacaacccatggagtagtgcctccgcactagaatacttctcccaacacgaactcctccgagtgcatcacaacgtccctccagccaaccaagttacccttgcaacactaaccctgaagctaccacatcctctgattgtagctcactcgccaatcgtccaatgcatactcctttcgataaggactaagtatggtgcacccctcgagatgaggttcggaaaccaatttttcccaacggcacctacagaacacgcttccactgaagccaagtccctctggacaagtccctccagaaacttcacacgccaactctatggcacaccatcctcctgatggcaatcgagcaagacactctcatcgcaggaaaaagtttggtgcctcccacctggacgaggcttgcaaggcaactgcacccaatgcagtaccaagtgcactcttgcacaagatttcttcgtgaagttcacaacattggccctccggccttaccgcacacccacgacttcatgcaaaaggcgtcactaacccactgcatacttgctcctctgagctcctgcttatgtcggctcacaaaactgtgtcacaagtctatctctccaaaatcaaccctgcatcctctaatgactcgctaatttttgacaaacttgataacacccagttttacacttaagacttgaagtcgtcccaatccgctatctcccatcggcatatgctttctgaaccattcggcttacagtgtcccatacaacaccagtgtccccataaaca

SEQ ID NO: 68247 - DNA, 756 bp, Cannabis sativa
  modified_base (729)..(731): a, c, t, g, unknown or other
tcgctggatcttcgttcgtctcacccagggggatgacattcggaggttgctgacctacagtttggtaggcttttcgtatcagcacggtagcttgtcaactacgattttctatctctatatgatgagctcttaacgcctccaactctctgtctctccacttggtaaatatacgccttcgtttttcgaacgcgagatttaccacagcgcggaaatcttcttgatcatgatgtagggtataggtgtgaccgtgcacgagcccaagagcagcacagagattttgtaactcagtatcatctccaatagtcgtttgagtgttggtaccgagcgaaacggctgtgttatgaatgctctggttgggtgcggaactgttattcccagtctcttgcacactaggcatgatttcatctatagcaatcgttacagtgtgacccacgtttgctggctttccaggtttaacagctaggggaacccttgtgtttcctgggttgtgcaatgcaggatccaccgtctgtgaattggctggatcaacctgacccctacgagtctgcaccaccatcgtatttgtggttagattttgtatgaagagtgattcttgattcttctctcaatgaaagcaccaaaatgttgacctccctttcatccaacgacaacaagtcttatttagtaagcgataagttatttatagcaatcgatatatagtaaagcaatataaagacacaagaattttannnaggttcagccccgagcagtttggta

SEQ ID NO: 68248 - DNA, 843 bp, Cannabis sativa
ttaaaagggtgtgttataaaagcacctaatattattaattttacttcaaattttaatctaaggaaggatattcttttttttttctctttattcatcaatattattgataaatatttatgttactaaatatatttaattaattatcattaatttaaaacatgcagtattataactgttgtcgttgtttttttttcaagaaaagaataaataaatatgcttctagtttatatttgtaatggcagtaagtgttgttattttttatgttgtctttttaattatttttaattttaaatttgataattctacttgtattttacttttaacagaaattttactgttgttgtattttatatttgtaatagtagtaactgctgttgttatttttcttatgttgtctatttaattatttttaattttaaatttgataattctattggtattttatttttcgcagtaatttttggcctaaatttttgtttatttaaattattgaaaattaaaatgtgaaatttaaattataattataaaaataatataataatattttattggaaaatataagtataattgagtaaaataattagaaatatttttggaataaaattttttcttcatatgaacagtgctgccttcgatattgaaggtgcaaagtttatcttttttttttttaatgaagttaaagatagagcgtgattagagttgaaattttttgactttatagcttttaaataaaaaggggattttgaagtattttattggaattttatactttttattttatctcatatattttttatattttttcaatttcatttaaataatactattgattctttaaagtga

SEQ ID NO: 68249 - DNA, 668 bp, Cannabis sativa
atttatcttgtaattgtatttcatatattttataatatactgtccattaattacttgcttttagggcataaatcccaatagaaataccattgatgggtagtatctaacagagtaaatggaaaaattcagcatcagacatttcccttgatgccttggaggttggtctgtatctcaaaatacttgatttgagatagtaaatcatctttctaggtgtacatcttccaagtcagcattttgaacttgaggggaaggtcaaggaaattgatctgcgtagtaaacgacaaaccccttgtccaatcatgctccaagttagtgagttttgggtcgatcaagctttgtactaggctcttaagctgatctaattgggcttgtatcccttgatcaacttggtctgcttgttgatcggcctgtgcaacctgttgaccccctggagccttaaagggcacgaggttatctctatttagaaaaacatagttttccacattgatcgactgattattatgcggagggatgaaatgtccatgcagatcacttctccttgaatttgagtcattcggaaggtcgcttctaggtctgagtcagaaggacgctttcaagtccgggtcagaagttggtctggtcattcctcccgaggtaatgaccaggaaaaacttgcttattcgctaggc

SEQ ID NO: 68250 - DNA, 563 bp, Cannabis sativa
  modified_base (43)..(58): a, c, t, g, unknown or other
aatgttatttctgatctttatgaataagtaaatctgattatannnnnnnnnnnnnnnnttagggcacaaaatccaacagaacattcgttggagtgctctcaataatacaaataaatttctttaccttttacttcttcaaatttacttgttataacttagtactacttttcgaacttatacatatatattttatataaaaatcacttataaaataaaagacatagatttgaataagtaaattgggaaaaaaaaaaagaagtcgggtcaaacccgacccagttgtgtcgggtcagacccaattaaaattttgaggtaatcggggcggggccggccgggtcagggtagacccgccccatttgccattcctataggttgatcaaccaagcccacgcgcgcggaaccgagtgttcctcggtcagctgcgtgttcggacagggctttgtcagagcgacacgcccagggatgtctaaaaccccttatctgcgtaaggaaattatgcaaggggagccttgcaccgagatttctcggcagatcacctactgggcgcgcgcggatggtatgca

SEQ ID NO: 68251 - DNA, 1728 bp, Cannabis sativa
ctgctaaactacctctcttacttcacttccatggcggcggcttttgcataagcgaagccgattggttcatgtactacgcaatctacacccgcttcgctcgccaagctcgagcaatcgtcgtctctgtctacctccgaaaagctccggagcaccgtcttccggcggcggccgacgacgctttctccgcgctcctctggctcagctcccaggcaaaatcttgcacggagccgtggctcgagggagccgatttcaacagggtttttctaattggagacagctccggtgggaatttagttcacgagacagctgtccgggcaggaaaggaggatctgagcccgcttcgggttgctggagcgatcccggtccacccgggatttgtccggcccgagcggagccgttcggagatggagcaacctgagtctcctttccttacgttagacatggtggacaagttcatagcattggctttgccggtgggatcgacgaaggaacacccgatgacgtgtccgatggggcctgcagcgccacctttggaggagctgaagcttccaccgatgcttctgtgccttgcggataaggatctgattcttgacactgagagagagtactacgaggctatgaagaaggcgaataaggagattgagattctgatgagctttggaatgagtcacagcttctatctcaacaagattgcagtcgataatgaccccaccacggcggctcagaccgacgccttcttcgctggggtcgtagagttcatcaagaagcattagtgaaagtgaaagtgaaattctgttataacatcatataaatataattaatacttattatttttcttagtcaataaattaaagaagtgaaagtgataagtgaatagctttcatcagaaagaaataaaagaaaaagagaaaaggaattgagtgaataacgtagcgggccctgttagtatagtagtacttcctttttatctttctattggaattgtacgtgttacacaaacttaatatatgcaccaatggcacgtgttatttttggatatttatatattatagttttttttttttcggttattagctcacaattattattttatttatatttaaattttttagctaaaattttagtagtaacaactttcaaactactgccatctatttttacagttaattgttaaaatagattatttatgtgtacattgttgatatgtcacttttaaaattattttaaaatttataaatttttttatttttatattattctatttttatttttataataataatagcaaaacttaaatttattaatagtttaatagtttgaaaagttttaattacagtcaaaatttaaatttaaaatgtttaaaatatctatattatatttaaagcattactcttaaatacaacacatatgtagtacttgatcataatgaacttgcactagcacttttggtccttacattaatttgtcataaatttatatgatacacacaatgacttgaatagagttagaaaaagaaaaaacaatgacttgaatatgtgaggtcgtactattgttgaaaggtataaggacctctcataattgttcaaacccaaaactttaattgctatgatgtattaatacagtagaacctctattcaagaatacacttaggaccaagtaaattatattctaattgggaggttataactaaatagagttacactggaaaaaaaaattcaaaaactagaa

SEQ ID NO: 68252 - DNA, 1489 bp, Cannabis sativa
tataagagtcattcattcgtgggtgtaaggacccaatggaagcttgaagcgaggacgttacaactatcctatacatatatacacatagtttttagtttataaatacatatagaaatttctatatagtacaccccttcaatgggtgttctggtacacttagagaaatcgtttttagtccatacttttttatgtttgtgtatgttataactatttaggaccacacgtaaattttaaaaaaaaaattgaataatttatattaatgagaatatataaagtttaaacagttgcttaccatgcgtataaaagaaaacaatcatgcatgcaacaaaatatttgaaccttattttcgacactataaattatttaaaattttaattaaaaatttacaattgatcctacgtagttgcgtacgccaccatgaaaagaaaaattagacttaaaccctcttctaaataaaacagataaaaaatctactaaaacagtcatttaaaagtgtactatatatagacttactctacatttatatatacatatatatttatatattgggagttgttaaattctcctataagaaatccttacaactctatcagttagttatcacagaaatgttatcaaaaattttagcaacaattaattaaagttgtttgtagtaatagaagttaaagaatagaatttttacgtagttggaacattaatgagccttagtccgcgagttactcttattaatgagtgtttctcttacaaggaaattccccaaagtcatttttttatttcatccatcattgaggtatttataggctcataatggtggtgaaaaagtcattattatcgtgtttgtatgagtcacgtcttgcgtaatttctcagatttgaacatagggcatgatattgcccattctctgtgatgtgcttaggctttgcaatatatgttcagtgagcatagacttgtctctttgttaatgatttgatagctcctaatataaccgacaaatgattgatgaggcattgtgaaatcaagaaattataggcttaaactctcaaaaatgtgtaagaagttctcccatgccgcattaaatgcatgcacagtaatttaacctcgagcagcacgccatgctctgcctatccttccatgtcttcttcgagtcgaattcatttgtggagaaaaagagacaaaaccgtttaccctcttggtggatgctttcggaggtgactaatctctcaaaacccttgcaaattaccatgctttggggattttttaatatggtatgtcctatagcgtgggttccattgccacatggcttattcttgaactaccacgtattttgagagaaattttaggcaacagttacaaatagaatcgaaaaggctacaacaaaaaacttaaaacagtcataacaaactatacaattcagcttatcgatttactactctcacataaatagaacactataaaagctagaggcccaagttcagaaactacctgatca

SEQ ID NO: 68253 - DNA, 830 bp, Cannabis sativa
tagagctataaaaggagtttttctgggatatcctgaaagggtaaaagggtgtaggatctggttaaggaaaagggggggttttaaataattattagcagagatgttatattcaaggaagatgaatttccatgtttgcttaaaactaaccctgcagatacatcggatactaatcatgtaggaataatacagtttgacccaatcctatggagattagaggatcaagaagaacctgatatcaatcaggtcgaaccaagaggaggagaaccaaaactagatcaaattcaggtggaacacacagaaaatactaacagagaggaggctcaaatagaagtacaacaagacgatgaaacagaagacatacaacaaacaagagctctatatgattgccaattgaccagagatagagagaaaagaacacaaaaaacctaatcccaaatacaacttcaatatccagaatgaagatatagcctatgcatttatgatagctatggagtcaatcaactcagatccttaaacatattaggaagcaatggaaggacctaatgctaagaaatggttcaaggctatagatgaagatatggtgtcactcaagaagaacaatacctggataatggttttaagacctaagggaaagagaataatagcctgcaaataggtctacaagcataaagaaggcatatttaagggaaaacctacaaggtttaaggctaggctggtagtaaaggttttacacagaaagaatggatagattacacagaaatattctcaccagttgctaagtacaagactattaaaatcatgttatacatagcaaaccaatttgatatgaa

SEQ ID NO: 68254 - DNA, 940 bp, Cannabis sativa
tatcaatggcaggtattatttaacacgagtacaaagcaaatgacactgatagtttatatatttttctcagccaagtataaccagattaatggactataaagattatataggaaatgatatatgctttatttatgaatgaattcagtacagaatacatggcaatataaaggaaataggggaagctggtctgccataggaaagaacaaaaaataaataaatgaccttttcgtagactatggtatgcacaacaaaccacctactctaccagatttaattgagaacttaattctttgtcaaaataactaaatacctaagaaacaataagctgaaaccagaatttcgacagtaatatgagttgggatcaagaggagaacccacaaaacacatttagtcaaccccttataatgtgttaataactggtttatttgtaagtttgtgtatctttaagtggtctgttatttctgatttatattcttacagccatttcttattttcttgttctttatgcatcccttgctgtcctttctctgtttttgaatgtctatttaagtttagttttggcattgatggttccactttgctctaaatggtttcatacggtttttggccttaaatgctcacttttcgccctgatgatgaatttgatatggttgggttccatatttagaatgcagtcaatgtatcttacttctaccataagtagtctagagcatgatatgaacttattcttgattgttcaggttgactgccttcaggtggatggtgtattgcagaaaagaaatcttgtatattgtgcatccacaaggtatttacttatattatatgaagtatctaacctctcacagatttgttcttctggatatccttgagattttttttttctttctgtgaggcatctctttattgataattttccttttcaacagtgcaggtaaaagtt

SEQ ID NO: 68255 - DNA, 639 bp, Cannabis sativa
attagcagataattagggcttaatgatgaaaattatttattagcattgaattatttatttatgatgatttatttgaattcagaatccatttttatgtcatatatagatttcataattttgcatgttttgtgcccaacaacattggaacgcagtgcttggctattagaatcacatcttagtatttttggtatagcaggacaatatattagatattgggaatgtcgggaatagtcgggattttaaaatttcccaaaatacccctaagtgccttttatgcccttttagtgtgggaagcgcaaaatagtcttttagcttaggttaattccttgtcttttagtgagttaaatggggattatattctgaatatttaattgatataagtttaatgaaaccaatttttactttcattttattcaaaataagaaaattcaagaaaagtttcttctctctctttccttcctctctttcttcgaaacccacctagaaccagctagggttggggtgttttttctgcatttcaagcttgatccagcaggtgttaggagatcctaagctctaggtaatttgttgtatctttctcttaagtttcttgaatttaaagatagatttttgcacgaaatggtgattttagctactgtt

SEQ ID NO: 68256 - DNA, 541 bp, Cannabis sativa
gtgataaagatcacagaaagtctaattctgcttatttctttcttattggtgggaactgtatcagctggagcgtttaacttcaacctgttgttgctttatccataacagaggcaaagtatgttgttatcatggatgaaataacataagctctttcgctaaaacgccaaatgaaagaaatgcatctactcaaggaaattcccactgtttatgttgatagccaaagttgtatccacttgtgcaagaaccctttgtctcataattgaactaaacatatgggaatcaagtatcatttcattagggacaaagtgacacaagaagaggtccaatttaagaaagttcctacagaagagaaattttgttgacgtaggggataaaattctaaatttagccaaattcaaacattgtttgaatcttctaggtttaggtaatggaggcgaaccattacaagtttgagccatgaccctcggtaaggaaaagataaagaagactactatagcaagctgcttatgatggagtccaaggcggaaatttttagttttga

SEQ ID NO: 68257 - DNA, 959 bp, Cannabis sativa
ttaaaaacaatgagaaatacaaaagaacacctatgtgtttagtatttgtgtgaggtataatattaatattaatataatttaatatcgtgtcacatttattttactttgataaatattataaaatccactaactaaatataaaataatattttatcgtagtactaggcactataagtgcctcacagtaatactttaaaaaaatgttttgagttgaaactagtgctattagcctattagaaagaacatttgcacctttttaagctttggcttttaatgatatgcttattcctagttgattcgtatatatgtttaatgaagatctccctttttaaaaaaattatatactaagatatgaatatgtgatattgcataacacttggtgtccggtaacgttgctctttttttttttgttttttgaaacggaagttgctcttttttctaatccattatatattatacaaactcccaaaaaaatgtaaagcaaaatatatcacaaaaagagacactaccagtataagattattagatttacataaagaaaaatatatatgtacaattattgtaaaatgatttacaacacatatttaagtaaccgtataaatagtagtgatgagcattccatctccattggtgccatttgtcaactagaacttcctcaacttaatttcctttttgtacttgatgatttcctttcattttaaaaacatttaaaatacctcaaattcaatgccatccaccaactaagtgccaatcacttaattgtgatgtaacaataatttacaagtctttttctctggtccactccttttggctacattcaattaagattgatggtgctaaattttaaatcaaatttgtagccacacctactttatgcactaaataatcagaaatgaaaagttcaatagaaagaaaaaaaaaaaaaaaacaaagtgacccatcagcatatgttctatacg

SEQ ID NO: 68258 - DNA, 558 bp, Cannabis sativa
ttattgttttaataagcaagagattggacgagaaagtgaatagagaagtaattttgttaacaaaatgttattttaatttataaaaaagtaatcatataacttaagcatgagttaatagctatatttaaaaaaagtaaaaataaaaaaaaaatattaaatcaaatttttttattaaataactacttttaatatatataaaaaaaaaatactcctacacacatactctttttctaatgacacttgagtcatcttattataaagagtaactctaaaatcatcacggtaatttaaatcacatagttgatgacttactggtaactcatccatggccggccagagggtggggcagccggggcctaggccccaggccccacaattttagaggccccgaaaaattaaaattaatatgatatatataaaaatgaaaatataatatatgtgtatatataaattttggttttataattttcataaaagggctaccatcacaattggtgagagagggattatatgttggttggtgggtgatgggtccgattcttgactttctcaatttat

SEQ ID NO: 68259 - DNA, 5478 bp, Cannabis sativa
ttataaatcaatttccaattttcaccctgtggagacgatactcgatttatcactttattacttattacgattgcgtatacttgcgtatacaattttaacaacacccgtcccaatctggacaatattgaagatatttcgaaaatgccactgtcgtacaaactaagcatcaacatgccaccagcatacacctcaacacgtgctaccacttgaccaccacttgaccaacttgtaggcatcacctaacttgtaatgtgccatcttggcacgcacgttacacggtgcgctgggggcagtttgagtggttttacacccctcaccatacatgacaaaccattgtttattagtcttatttttttgggaaaacgacaatatcataataaaacgacaaagaagacacaaaatgaaaaaattacctcggaaatgtgtgcagattgcaattactcttgtcttgtccttatcaaagtcccctaactaaactaacaatcaaacaacactattccattttcattcattcccacaaaacaaacacattttcatttttctttctctttctttcttcaacctcccgctctcctctcgatcaactcaaatctcttctcccgatctggcttttcccaccctacgtcgcagtatcttcgtttccaggtttcctctataccctttattctcttaatttattttttatgagtttatcgagtctgtgatgataaatggtgagccctccgattcatttctcctattgcgggatcagatatcggacgacggtgatgcgtgctcttctcgatactcttcctgtggtgagtccgagttcgaccgctactgtagcgctaattcggtaatgggtacgcccagtatgtgtagtactgtcaccgtttttaacgattttggggaatctgaatttgggtcttcgaggaatttggggtttggggaagaagagagtggcggtttggagaattttagcttggggggcaaagtggagaacgggcgcgaggagattaagagtttagtaggtgatagaaaaatcgagttttgtaatgtgaattctatgaattatagctctagtgggttacaattgtatggtggtgatgagtttgatcttggtgctcccgctgtgaatgaattaatgtcttggaaggttgaggagggcgagtcttcttcagctttggaagggttagcagaattcgaagatgatttggttaaaggtgattgtggagaaacttcgataccaaagagtagctttgaggaaattggagttgctggagatgatagtgctgaacaaatatgtacccaagaaacaaattattcagtttcgggtggaagtggttctcgaatttcaggggaggttgagaaatgttgtttagatcccattgctagtggaaaaaatgagagtggctttgatgggttaaaaccagagactctttgctctgatgatataaaggagagggagatacaagacgatagtgcttcttcaagaaatgagtattctgagggtgaggattccatgtacaactatggtacagatgatgaggataaatctggatacaattaccagaggaacgagctttataggcaggaagcaaaaatgaagaatgaaaatccattgcaaattaactcatctgtagcctttggttctgatgattgggatgattttgtgcaagaaagtgggggaactcagaagacttcagatcttttcaccatgagtgcttcacaaaacctggcagaaaacaataatgaaaccaaaagggaacttttggattatagtcctgcgacctctgttgggttttcaattgatcgtcaaacagagaaaggaaaaaatctaacagagatgcccgtccccagcaatcaagctaaaggtgactatacattggatgatattgtaaataattctgagggcccagctcattctctaaattttagtgaactagaagatgtgaaggatatttctgtagccagttgtcaagttcaaggtagccatgatttgtttgaagtttccaaaagttcgtttaccacaccaccttctctctcaaagagtcatgaaacagagcaagaaaaagcaagtcttgtttcttgcaccatcgatcaagttcgaggtgttgatgaaatgccaaacgaacctaagaattctgggcttgatcctctagaggaaaatcttgctgtgaaaacttgttttagcaatatgaatgatgatatgtcacagaagaaccaaaatgctagtattgtggagagcataaacattaatgatagccgaattttagaaaatcaagctctcgggaactcaaaaataaaattggaccatcttgatgacaattcagctaaactaagttctctttcaaccgtgccatcgagaaatatgaagtcagattttttcaaagattataagccaaagacagacctatcaagtttcggtaacgatgcaaggaaaagttttcctgttttgaaatctgttggaactcatcctgcagtggtaaaggtcagtcattcctttagtgctactttattctcacgagtaaattgcaaaattggactttggtttcatctaggccttaattttgacaaagctttttgtataacttcaatttgttaaccctccgaatctgaaataattcttttgctgtaattttttgtaattttttcttacacttataattattgcagacaaatgatatagagctcaaggattcttatgatgatgttgtccttgaaatggaggaaattttactggactctagcgagtctccaggggcttggtttcctcatagtaacaggggattccaatcacatctatctctgcccttaagagacggtggatcctctgcttccacttctggcaaggaggatgctcacccattcattcagcagccactgagaattgatgagattgaagtggtaggtgcaaggcaaaagaaaggggatgtttcatttagtgaaagactagttggagtgaaagaatacactgtatataaaataagagtattgagtggcaaggatcaatgggaggtcgaacggagatatcgagatttctttaccctgtatcgccggctgaaaacattatgcgctagccagggttggattctaccttctatctgggcctctgttgagaaggaatcaagaaagatttttggaaatgcatctcccgatgtagtttcagagaggagtattctcattcaggaatgtttgcattctattattcatccgaagttttttaatacatctccaagcgcgttgatttggtttttgtgtcctcaagattcagttcccagttcccctggatcacatattcagtctaactctacaggaaatagagaaaacatctccacattagggaagacgatagcacttattgttgaaatccaaccatacaaatctatgaagcagatgctagaagcacagcattatacttgtgctgggtgctacaaacattttgatgatggaaagacacttatccgagactttgcacagacatttggatgggggaaacctagactctgtgaatacaccagtcaattattttgctcattttgccatacaaatgaaactgcggttttaccagcaagagtactgcataattgggattttacggaatatccagtctctcagttggctaaatcatatttggattctatacatgatcaggtaactgattagataatattgttttagtaattattaaattgagtccaagcctttgctgaggacatttcttgttttgtaatgactttgctttcttgcagcccatgctttgtgtcagtgcagtcaatccattcctattctcaaaggtcccagctctgcatcacgttatgggtattagaagaaaaataggaactatactttcatatgtccgctgctcattcaaagggtctatcaataaaggacttggatctcgaagatatcttcttgaaagcaatgatttttttgctctcagagaccttattgatctttcaaaaggggcgtttgctggttaggctctttataccgagcttatctaacttgccttgatatagcttcgaaagttgatttcagaatctatctaggagtctcgaatacattctttcatttgaaattgaaattagatactcttttttacctctaagagcctgagctaatacagatgattcatttgtactcattttgcagtgctacctgtgatggtggaaactgtcttgaagaaaattctagcgcacataacagagcagtgcctcgtatgctgtgatgcgggagtcccatgtagtgctcggcaagcttgcagtgacccgtcttctctgattttccctttccaggtaaatatgtatacactgcttatgtatcctttgcatgcctctaaatattagcagcttttaaaatcaagctcatggaaaagatatttgaaaccatacttgtaagttgtgtaatgaaaccaactagatagattctaatcctactccgagtcaaagattccttttctactttatagtacctaacagagtttaacctcctccatacaactgattggtcggatagaatatcaatcatctgactagaaacgcttttagcaggaaggtgatgtcgaaaaatgtccctcatgtgaatcagtattccacaaacattgcttcaaaaagctcacagattgcccttgtggagcacatctcaggattgatgacacaaggccactgactaagagagtaagccgtagtagggccagtggtgaaagcagtggagctttagaccttctcggtaagggactaagctctggtttgaatgttggatttctctctggtttgtttacaaaaacaaagccagacaacttgggagtgcataaaaatagtgacaatgtcatattgatgggttctatgccaagcacttcattgtgatagctttcattgccattgtatcatatttttgtttttttgttttggcctgaaatgaaacatgaacattcgtttcttgtaatattttctgaataattaggcactagcctagccaaggcaaactctgtacagcccagtatccttagagatttaggaggtttttttagtaccctttagtggtcattctttggaacatacaaagatataaagtttgccttcttgtaattcattctctcgattgtacctgtataaattctttggccattataaaagttatcaaaaccatcaatatgtaggaagagccagcactcttgcttcttttttttttctccaaatatttcaatcttttactcttaagctctcttttcatgtttaaattcttattgctatgacaaagaattagtaaaagaaactcgaatttcctctttgaaactaggctcccctaatctaggactaagacactacaacaattgctatacaagtactctggagaaattcgaatcaaacctcgaaggagtctaggattttgtgggagcaaagcaaatcacatgaccatttgagttttttctggggtgatcttagattcttgattttcagattttcgatgcgcgctctctctttttttttttttttt

SEQ ID NO: 68260 - DNA, 626 bp, Cannabis sativa
  modified_base (92)..(94): a, c, t, g, unknown or other
gtgagcaaataaaagtaaggaaatctaccgaaagactgtgaaacaaactccttgtaagaacttcccccagatccccatgattgattaaatcnnnttcatgggggaggaaagacttgaagtgacgccaacatattgcactaaaccctgtagtgtactctgggccagtttttccaacctcgacaggtaaagttttaagggcttggctcgaggaggcagaggcttggggcgcattgggaataggctccccggtacttgcgtgggccaaaggagggattggatcccgattctcaatctcaggaacctcaaggttagcaggttgggaggctcgcttcttgttagtcgtagtcttcttggacctctttgggggctctacttttgtgtctgatgggacctctaagatggtcagcctcttctttcccttcttgtggacgagaccctcaaattaatctctgcaagacaaaacaaagtgttaagcattaattgaaagacaaattaaaggggagattgggacataatttcctacctaaggaatttaccataatcactagaagacgaggtagagcagctataatatccactaaaatccctacaacccgtgatcctgaatactgttggaaattatttta

SEQ ID NO: 68261 - DNA, 815 bp, Cannabis sativa
tggtcttgtctctcggattcgattgctcttctctaacttccctggagcttctttgcagtttctccctcgacaatttaatatggacgcccatgtccttgcaaaagaagccctcaggcctagagaagttagctaaagggattggttttgatccctctttgctgcttgcggtgtttgtttttcttcttcttcagcagcttctttagtttcaaaaaaaaataatgaataatttaaaaagaaaaaaagaatttaaataaaaaaataaatatgtgttgtcagaatgtgatagtttatgacaaatttagatatttatgaataaaaaaaatacatacattattaaattttgttgatagagtgatccaaaaatatatttgttgtttggtgagaagaatatataattatactaagaatgtgtacaattttactagtttatgcatgatttatatagatagtgtaattgaagtaaataattaattctatatctgaaaaattttaatacattaaacattataatcctgaaaaataaaattaatttataagtagacgtagcttcattactgtcacgatacagggagtgaagtactataaatttgttgtgtctctcttataattacttaactatttttttttattcttgccaatctagcgagagcatgtgacttagaagtatagtccaaatttttgagtcaacaagccacaacttctctgattaaataaaattatgtattattcatcttgtgttacttttatctataaggtttgtaaattcaaaccaacatctataaaatgatttaaaatgagaataaattaagaacatt

SEQ ID NO: 68262 - DNA, 806 bp, Cannabis sativa
  modified_base (284)..(284): a, c, t, g, unknown or other
agcccctcctcgtgcctatctcaccgagattgaagttgataatgatcatcaagtatctcacactactatcttacctgattttggagatgacaatctatggtttgttgatacaggggaaaatgtacatgtcacaaatggttctgagtctcttgattctcctgccccttatgttggcactgagacactttctgtaggtgatggtaagagtcttcttataactcagataggctccacatctctgtcctttcccaattctcatgctttacacttaaattctgtcttanatgttcctgccatgaaaaagaatttaattagtgtgtctaagctaactcatgacaatgatgtgtatcttgaatttcacaaaagttgttgttttgtcaaggaaaaactcacgggagctgtgcttctcaaaggaccagttaaagatggcctctatgttcttggtgactctagtcataactcacacactctacaatgtaatctcactgctttgtctcagtccaatacagtttcatattttccaaattgttcacattgttgtaataaactcactgaagcttcagtgattacttgtaatatgtcccatatcagtaaagaaaatctttctgagtattcttctacatattctccatctgtttcattaacaacccttaatcatgatatcaatacttggcatcaaaattggggcacccttcacctgctactcttagcagaattttaaaaactgttccacattcgggcactttaaaagatcttcatttctgtgttgcatgccaaaaaggcaagagtcacaaacaaccatatcc

SEQ ID NO: 68263 - DNA, 1868 bp, Cannabis sativa
atttttccttaaaaaatacagccatttaaaaaaaaaaaccaattaaaagagtatcagaatatatgcacatactacagtcgctatggaatatgtaaattttgaccagaattttcttcaatttgacccagcacctcagaaaattgagccagacaacgcttgcaagactccagactattttttgtaatttttacaaaccttatccaccaactgtttgtaatccttgttttctggtgtattactactgtagatgcgtctttaaaagaggagttaccgatgtttaagttgaaggttttaccatcaacaccattctttgtttggagtttttgtccccactgctgccttgttgatgatttgctcaaaaaactcttagaagaattcaaagtagccaccaaatagcctgttttttgtatatttttttgggacaggaaccggcaacaacatggtttatcttgctctgtaattttgcaattccaacgtagaaagcaaattcgtgaaaaaggttaagtttctatttaactcgctgaaaaatgttatgaaatgaatttaattaaatttttatcataataattaattaaggatagtaaactaaaaaaaataattcaacaaggcatgatgaccaattacaaacactagctataaactaaaataagtggcaaattgattgttaccaaaattattattatgatttgcataattacaacatttatttctcttaagccaaaccacttttctaaatatgtgaactttcatctcagcatgatttcccttactcagctcaaagatgcacacatcacttggctgaagagaattctctattgcaaatgcatgccatccagtagagaaattacatactccatactattataataatctataatactaatctcatatggaccctattattcccctactccatactctgttatgctttgtactattctccctacacatatatgatcatgtagcctatgatacacagtatacacaaaaaaaggtctagttgaatgctgcataatgaaagaatcaacttttttcctaaatacaaacaaaagcagaggaatggacctactaataaccacataaatctcatctcatttgttgaaaattaaaccatcaatagtactactgttactactaaaagatacattaaaaaatactctataccctttcatgctacaacaccagaattccaccagttcctatatcatattaatgcatgaacaaagtatgtacctactggcttttttctactataataatattgaagatcctatataaattcacatgcataatgaattagaataataagctctagagtaaatttgcgtaataaaaataaagtaagaaattaacctcaatcatcgaaggtgcaatttctagaatggaatgcacatttgttggttaaaaagcttgaaactcctgtataataaatagacatgtatataatatatcatctctataataaatagacatgtataataaatagacatgtatataataaatagacatgtatataatatatcatctctattagagtcagaaaaaaaaaataccaagaacattataacagcaactactataaaatgtatatgtatttatatgcattagggagttgggtacctaccagattaacaaaactctaatgtgcaaactcaaaaagggaaaaaatgcacaatagaggaaaatcattgatttaaactttaaactgaagatcatacctaaaactaacgttgtatagttctgctcgtacattggaatacgatcgaactttcttgatatcaattgaaattttgacaaaatgattgaaataaaattgattattagcaaagaaaaatatgtacagagagattgaaaaagcaaagaggaat

SEQ ID NO: 68264 - DNA, 1345 bp, Cannabis sativa
aaaataatattttttagtagtaatattttttagtagctaatatattttttagtagctaatgttaaatatgaaaagtttttagtaattacacaatgtaatttcattcaattctcatgggcctatgagaattggaaagtgtaattggaacccctcaattactttcaattacattgtcattacatggtcagatgccaaattgtgtaattacctctaattacacacaaattcaattgactttccaaacacaccataaaatgttgacattgacaattataaaaaaattaaactaaaaattctaataccaaaacggtgtaaaatttttcataaataaataagtattcttaaaattaatttattataatttgttaagtgttaaagtattattttcccttttaaaaaaaaacacacaaatctgataaaagaaaaacgtgaggacatgtctagtgacggcagattagaaagaggctaatcggcaagacctctattctctcctcctcagtcgtggacgtcaccgtcaccgttacctattttttattttactaatttcaacaaaacccacgtcataataaacgcacttggattagctccactccaccacagcctttgcataatcaacgctcagattaatcactacgtcttcccttttattccatccaacgctccacgttttttcacatttagataacagaaattaaaataataattatcaaatttcaccctttccaagaaaattgaaaaaaaaagctcaaattagggttttgaaacccatatatattagggaaaagggcaaaacccaaaatctggttgtccgagctaataccatttcttcttcccttgccatttttattctctgcaaattccatcttcatttcttttctttcggcaaatatgggcaagggtcctggtctctacaccgatatcggcaaaaaagctagaggttcgtttctctctctacaaatgtattattatgtgtttttacttttaactttttcatatatgttctctgaaactagggttctcaatctaaaatttgagattcgtttattaatttttgtttctgttgtgctagatcttctctacaaggattaccagactgaccaaaagttcactctcactacctactccccaactggagtggtgagttcctttaatttgaccataagatctatataactctgtattgaatcacgaagctagggtttttcggatttgcatgtctttctgctttaatatataggttttgtcaattggttttggtttgagaactggggaaatgcatcggtcttacctatttatgatataattttggttattgtattgttgtaattgctttcttcatacatat

SEQ ID NO: 68265 - DNA, 621 bp, Cannabis sativa
caagaaaaaactaaaaaaaaatcaaaaaacaaaagaagaaaacttacatcctttacaaattctgaagatttggttctctttgccttacgagattcaagcttagctggaagaggtctttttttagaaccagaaggctctgcagcatcacccattcccttcttcgcaatgtctttcaaacccattttaggatcaactttagaggacttcgaaggaggtttcttagtattttttgaattttttttagcaggtgaaggggacttggaactcgacctagtggtggccatttatagaagaagaaaacaaactgaaagaggaaaaaagaaatgcaattatgcatgagaggggcggtcgtggcataaatagaaggttgaaattcgtgggttagggcttaagaggtgatgatcgtgggttatgcacaaagaaaaaaaaaactaacagaacagagtggaaaaattcaaaaaaagaaggaaagagaagaagatggcagggatggcgtgtaatatgggagaaaacccatgacatcaccatgtgttgacctcgtttttagccaacgacagtgagtcttatttagtaagcgataagtaatttatagcaattgatatatagtaaagcaatgtaaag

SEQ ID NO: 68266 - DNA, 5014 bp, Cannabis sativa
tgaaatagtttactttatgcctatatattttggaaaatttcaatagtaaatcctcttaaaaagttgttctagtagattccatatttgttttgacattttaaattatctttttagtttaattttttttttcatgattgcatacgtagtagctatttagatccatttataaatttttaaaaaatttcaaacattttcttaaacagttatttagcatgtccatatgatgcattataaactgcttaaattttttattgtttttagctaaaatagcttgccactattgtccgttattctaaaagtagtagcaacatttatttactcatctaaactccatctatcaacaaaatataccttcaagctcaacaacaattatgggtagtaataatcgaaatcgattactggatatgcttttagatgatgatagcgatgatgaggattttttcgggtttttgttagtggcaatgatcgcagaagaagtaatggctaatgagaaaagagcaaaacgacgtcgtcttcgtcacggttctaggggtaaagttcaaggtgattattatagacctgtttttgagtttaattttattaatattttgatgaaaacgaacatttggtcctctgtttgaagcttatatatgatgatccagctgtgtttgcttaatagttttgggcattagttcatagaaagcgggaaagggtaggctaaggccacatagtttgaaattttgggaatataaattgacatgacaaccctaacccttcttcaatgttagctttactacccaaaacctttttccattgttactccgttggactaagccataccagaatctcttattccttgtctctacaaatgtcttgggcttgcaaaagatgcacctttctcaacccctcatctcagaaatccacctgccaaatctgcttttcatctgaatcgtcgtcattgccatcatcatcttcctcttctcttgcttctacccccaaatggtcatgcaaagcttgtactttcctcaatccgtataaaaattccaactgcgaagtttgcgacactagggcacatgtctcgtctttttcgagctttgaggatttgaacgatacgggtccggattctgaactggactcttcagtgggctctgttttcttgcccttgcagccttgtaagaggatgaagatttctgaaccagtcggggtcgaacctgattctgccaaattgggtgggtttcaatccgttaaggcttccgacaagggagcgactgtatctggttcgttagaatgttcctatttagctttctgggttttgttgggtatcattcatattgtattgcaactaagaagaagtcgatcactttgtttttaatctcatgtatatttgttactaaaatgggcattgattgttcacttcttgtgttaggattattattttggagatgtctaggtgaatacataatttatcttagtcttctgtttggggtcattgttttcttttgtgaaggagctttgggaaacagtaagtgctagagttataagattaggagaaataatgctatcaatctttttttaggttctttctataatcgtcacctttctggtggattctaagttgtagtgcagaaattgactttggtgcacgttgttttacctgttagtttgcataagggctcttagttttctatgttttacttgcattgctttatctttttctctgttaagttgtaagtaatattagcaatgcttggttttgactataatttaccgtgtccagaggaagctggttctggtacagcccagactacattgaagattttaagctacaacgtttggtttcgagaagaccttgaaccggagaaaagaatgaaagctatcggggaccttatagaactgcattcccctgaaattatatgctttcaggttttcctcattcattagccactccagaaagaaatgaaccatttttatttacctcttttgcaaaaatgcatctgatgttcattaattcttctcacctgataattcatatgatggtcttttctttaccatgcaggaggtaacccccaatatatacaatatctttaagcaatctaattggtggagaatgtataattgttccggtacaaatcaaatggctttcccagggtcgtacttctgcattcaggtacatgaaacactcatatatgacatagaaataattggattgaaattgttgaatatgaaatggagtattataataatgatttttgaatcagatgaaatagtttttagtacagtaagcatcttcggtggaatgagtccatttctgggaattgatttatatatgattaatgccagaagaattatttattgctccttctatcctatacaaaatattttctgttgccaatccattattctcttactgcaaatccggtaaggccatgtctgcatcccatttaccggttctgttaaacctgattttcactagtctagtggttggttatatatgttttctgcttgggatacagtttttgttgttttgtattttattctgcttcaaatacgttatcacttgtattgatttttatggttaatttggataacctggtatagatttgtttactctatgtagctaagcaaacttccagtgaaaatatttagctgtaaacccttctccaattctgctatgggtagagaactttgtgttgctgaaattgaaattcagaaggataaatctttggtcatcgccactagccatcttgaaagtccgtgcccaggtcctcctacgtgggaccagatgtttagcaaggaacgtgtagaacaggcaaatgaggccattaacttcctcaagacaaaccaaaatgtggtatttgctggtgacatgaactgggatgacaagttggatggccagtttcctttacctgatggatggttggatgcttgggcaaagttaaagccagaggaaaatggatatacatatgataccaagtccaaccagatgttgtctggaaaccgcacactgcagaagcgtttggatagattcgtttgcaagctatgtgacttcaagatacatcgaattgaaatgattgggaaggatgcaataccaggagtatcatatattaaggaaaagaaagtgaaaaaagaaatcaagaagttggagctacctgttttgcctagtgatcattatggcctgcttttgaccatctgtagcaagtgaagtttcttttgtggatgagttcatatgaaactataaagggaaacaagaagtacgtggtcaagtttgtgcttgggtttgttttgtatagctcaccgtgcatgctaggcatgcaattttgtgtatatcggtggggcgatgtaaagcttgttcattttgaactgtagatattccagtgaaagggatacattttcatctgtcatttacaatttactctctaatagtttgtgtcaccgtgcgtgctaggcatgcaattttgtgtatatcggtgggacgatgtaaagctggttcattttgaacttagatttccagtgaaatggatatgaaatactttttgttttacccctattatcttctttttagtatttcgctcagggaataaaaaataccctcaagtctcgagaaatattatttttttgtcgtcttgacaagttagttatataaattatatattattttttagctatatattaaatgtaaaaaaaattcacgttctttgtttgttttgtaaggaaaaatttcacgttgttatttcttatcactcttgggttaaattacatcatcactctgtctattgtgtgccctacctacctactgattatcaattgtctggacctccattcttgctgtatattgacttgatagccattattggtgttaattaatgtgccactgtgtattgtcgcacttgatcattgccaatttgcctctgagtattgttgattatatagacttaattattgctttgctttcttataagacatttcaatagcaaaggcaaagcaagacaatagttgagtaatcaaaagtcagaactcaaaagtcaaatgatattacataccaaaactaataaaattgtcttaattcaaatgatacaacaagtcctttattagtcatgtctctgaagatgcagggccttcaagccttaaataatcgtagaggattccacaaagtgaatctccacccttggcctgtgctagatataaagagttgtctcccctcatcaacaatgtagatagtatatcaatgctaaacaaccgatatagtccatgtatgccatgtctacaaactgtgttatctgcacctaactgcagcacttgaaacacctcatgggcttcatctatcttattgacataaacctacaacatatgtaacggttaaggaaataacccaagacaagtctatgtatgtttttctgggacacaatacatgtctatatatgctttaccatccaaaccttaccttgagatttgaacgagttgctgatgcaatggccagcctaagcttgtgagttccaatgttgactgatttgaggttaaacttgattgtccatgttgaaggtatgtacttattatccgcgtctctcctgtaaacaaaatccagcattattgttctagtcacaaatttcaaccctgccattcaactatgctaaggttaatgagttaaggggggttggtgaaacctgtcaacatgagcaaagaaccagtctttctttggatcattgatgcctatagtaaaagtttggtcaaattcaggatgaatatcagagtatctatcccacaacccatattgcctaaacctgtgaattttgatatagtgaagcttgagacagcaacatagaaagttaacaacagttatcataatctgtgattgcagagagttttgcttacttttcaggggagttgagaaatagcttgttgacatacattgggttgacatcaggaacatagtaaccgatggctgtacggtcagggaagccaatatcccatatggttggaccttctcttagaggaacataggtcagattgccaagttctgagtgtgaacctgagaagc

SEQ ID NO: 68267 - DNA, 1191 bp, Cannabis sativa
tgacctactatgcccataggatcgtgattctcctgtacttgaacttgcttcacgcatctcatctcgcattggtcttcttcttcgaaagagatttgacacatgtcccctacctaggtaagtctgcatattttctttgtctatgtgagaaggcctttgcggatgtcttagggatcgagcacttgacctaggttggtttctaagatttctttcatcattacgagggatttcctggtttcctagtcgtagttgtctcacctctgcattcatgcgagatgactttggtatatcagtacgttcattcccttatctcacaaatccatgggaagttcctagaacatcacgttaattttcttgatgtcttgtattaattaggttgggttgattttctctatccattgggacatccctcgcattcccaagttgttcttcccaagtatttaggggattcccttggctattttcctgtctcctggtcctggagcctcgaggtcttccttgtggtctccttacaattagatcgggttggttttgaagaactgctccctgtgcagccctggctaccacggcttctcgctccaactcagtatttcatcggtttgatttagccaagcattgtcgaagttacctattttctaattctactagttgtaggtatctggtaagatcataggcatcctcactcattctttttgagatttgatcaccagcaacattgaaattaccatcattcctccctgaacgtggtgttttagatgtgttggttctctgagattccatatgttctttgctaggacgatgggttttttcctctggatgattaccgtcatgggtaatgttattagtcgctaatatggatttgtaattgtgtttatgaggagagatttttctgagttttatcaccaaggctctcaataaaagtaccaaactgttaacaccgagttttgttaacctaatatatagccttttacgtaattaatttactacacaatttaataataataataataataatgaacataagatatttatgtggttttgtacttaaaatctacatactccacgagtccatattattgagcatatttatttgaatatagagtataaatctcagtaataacaaataatagaattctctctctatgttgacgtccctttttccatggattttgcccctatttataggtatatagg

SEQ ID NO: 68268 - DNA, 1377 bp, Cannabis sativa
gaagcctaatgtatgcctaagtctgtataggatttggtattgcatttgttttaggaatgttaagaaatatcaaactaactaaagtttagaccacctttaagttgcattatatgtgatgatgtgtctttaagatattatagattagattcatatatatttgagatgaactaatattctggaaatattgttagccacttaaatttcgacctcagtggttatattgattcacgaacatcaatatttgattacgtcattaaaattacaagttgtattgtgaagaactttaatttttccattatagaaatcagaatttttttgagagaacattatagaaaccagattactttctcgttttgaggatacatcgtattgtgtattatagagtttcatgctagacttaaagtttataattacattttcaagccattaagaaaatttcgcgataaatttagctacaatatttatggatgaagaactataataattctggttgaagttaacatatcgacattaagtattttagtcattaagaagcattagtggtcattaagcaagcaacattgaattgaatgatcgcaatatccttgactaattacatgttgcaacataaattcaaggatcataaagtaaacatgagatttagttttcccttttacagtttttgttgtacaactaaaattattcaataaaactctttttttttttttttgatattttctcatattcatgtacaccttaatttcatctagaaaaattatcttcataggccgaaaataaacataagatttattcagttaagtacatgttatgtaatgaatatattgtaatacatggaggataatactcgtcatataatgaaattctatcactataattcatatgtttattaagtaataatgatcaatgtatttaagtggtaaatttaaatgctaacaaagtgaaaaaatattagaatattttgtatagggtaagtcaaatatatgatttgatttaatttataaaatatacaattaaaatttgataactaattataaatattttaattatgatcagattttgattgcaaaatattccaattgtccgatttaattttttgaattaattgtcaaaatattctgacaattattgtggcacaaatactgattattgatgaagtatcctacttataaagatatagtaccattcccaagctcactactcattttgtgtacattgtaaatgccatctaaaagagttagtgagagcttggaagattgagtacctggtcttaaggttattttcaattttcttttgtaaatctaaatttcgtgggattgatgctcaaaaaattaaaagatgtgagtatttttgttttttcactgcatatatatcgatatg

SEQ ID NO: 68269 - DNA, 713 bp, Cannabis sativa
tcaccattactatttgcactttttcttttacattaatttatacatgacttaggagcaggaggagcttcttcttctgattcttccagaaagcaagacgctctagccattgttgtctaccatggatgatggctctcaccacaaaaagtaggacatgggcatggcttttgttcttctttacctgtaatgtttgtgtatgaattaactttgaataagaagatcataggctctttattgatatgtttggcagcaacaattctcaattctcaattctcataacaacaccagtagtatgtaccacaaacacaaagatccaggttcaggttcattcttttttcgcaaagagaattgagaattgagattaggccaccatgtccaccttaagcttgcttagttccacatagattgtgaatgaattttgaccattattaaatgagataaaaaggcctcattatctttttctaaaaggtacaccaaataaaaaaaacttaaagataacatgaccagtttgaatacactattattttaattattatagataaataataaatacatattaaaatagagtagaaaagaaaaaaaaaaaaattatcacatggttcattgcttcgcatgcttcactgaaatgaatcaagcaccgacaaattctatcaaagtaaaagaaattgtataaaaaaatttatacgaaaaccaaataataaactcacaaaaatgaa

SEQ ID NO: 68270 - DNA, 782 bp, Cannabis sativa
cactcaccaaatgtaaaatataatctaatggaaaatcacaaatactactataaattctcaagaattaatttaagaatgctctgataccatatgataaaatactgtaaatacgaatttagttttaattaattcatgagaaccaaacagtaaataacatagattagcagaagtgtattagagtctattgaattgattgtagaaaggtatgatcttccaaattttgagtcaaaacttttagaactttagtctcttgatgatgggaattcaagagtaaaaagatattgtaaattaaggaccattaccttttatattaccaactgccaaaatagttgttgatatttattgactatttataatttaacctcttattaaattagaaattattcttgtggtatccacatattaaaattatgacaatcatgcccttaagccatatattttattcaaaataaatcacataaatttgactgatttacatgatgacccaatacacattttatatatacaattgtaatcttaaataaataaattccgtcaaatgtttaactttgtatcttatttcaagcaataaaattattaaattcatataaaaatgtatgatatttatttactgcaactttgaaaatctttctctatgaatcttattttaaaaagtcaataatatctatacaagtaatatatggatcaatgaatacaaagaactcaaaagtttgtaaagttacaaaacttaagagtgaaggcctttatttatattacagtgagaattgaattaagaaaacaga

SEQ ID NO: 68271 - DNA, 841 bp, Cannabis sativa
gccttcctctggtttcatgtcatcggcatttggtttggatgagaccacgggagagggagagccctccatgcccatctctgtctttaagtcattgatactctgctccaaatcgtttattcggctccccatatcatcaagttcattgcaggttaaggaagatgaaacctccagattttaaataagtttcagagaaagcaaaaaagtagcaaagtagcgcaataacaacaaagcataccgcaatttcagacacatttgaaacaatcaccgacatccccacaagcaaaatcaagaacagatacaaatattattttccctacttcattataattcaaatatatcaaaactagaccgtagaaattgatatgtcatagctctccatgccccttcgaccactttctacaataattaaaaattaagtatagagccgttcaaaggaaaaaaaaatattgagcagacattctccactagaggtaatataagtttcaaataacagcatagaaaatggttgggaaaggttggctttttcttttggttggaaacaaaatcaagatatcatccaaatcacgtaagcaaaaggatattctttgtgacaatggagtcagacattgattggaacctgcattgctataaacagaatcctctaatcagtaacgctcactttaattgctgaccatgtacttagaaattataatttaaagtctaaactcaccatctgttgaagaagatcttgcacctgcaaaaaaaaaaatgcaaccatgttatgccgagactttgacaagtaagcccccagaaacagttaaatatcagaaattcagaacaaattcagttggtggatatatat

SEQ ID NO: 68272 - DNA, 895 bp, Cannabis sativa
tattattttactagcttatttactatatatattgacattaaatgttaatcaatgtatactattatttttaaaaaaaaaaaatgaaaaagtaatactaatatgatatatacatttactttttttaaaaaaaaaattatattttattttctatttaaaattaaatatgtatatataattttactaagatatttttactgaaatgaaaagtaaaatacaaggagttgaatgtgcaatatagaaactagtttagatatataaatatagaaactaattctgtaattaattattatttaactttaatttagttttgcaacaattaaagaattaaaattattatcttgtcgtatgacatgttggtaaaagttctctcaagtgtttaaggttgttttgttgtcttttgatttctcatggcttctagtagtcaacacacttttgatttgaatgaggaatatgctcagataagtttggatgatgaggaggaaggagtcttgattgggggggatgatgaggccgaagaagttttatttgatgatcggtggtgtttggttgggaagtttcttacgagaaggtcggtggattttgatgcgatgaggcacttgatggcctcgctttggcaaccgggtaagggtgttttcatcaaagagttgggtccgaatagatacctcttccaattctttcatgagttggatgtccaaactgttatagatggcagcccttggacatttaatcgatgtcctcttgtgtttcatagactgaagaaaggagaagaccctaaggtagtgccactacacaagatcgacttatgggttcagattcatgatctgaaatctggtttcatattggagagggtagttcggagtgctggcggctgtattggtacgtttattaaatctga

SEQ ID NO: 68273 - DNA, 651 bp, Cannabis sativa
tcaacttgattattggacttgattttatatgtgttgaataatattagacatattccaatttttatgatttgtaaattgtttgaagaatagaaaacttaatttgcatattaatctagactattctgacacactgagtgccaaatatatttttgtacaaatatttatgcaagttatgatttttgggtttattcaaaatacaaccattatgttgctggattttttagaaataaaagggaatatgttcttttgttattcttattatttgcctacttttgattatagccatgttgatcatgatttgtgcatattgttatttcacgacctaatctatgtgtcatcataggtagatcaggtgtgcacttaggtgaaagacctagaatctgtacagtgagtgaattgaatttgagcccttgtattatggtggttatcaggtgcgactatccagtttttggatgttgttttctatgattggtattgagagctaggggtctagtggacggtgtgatatgcatttgatgcttgattttatgattatttgtagtctctctactttgcttacacattttgataatggtaatgagatattttattttaaaagctatttatttaccgtgatttttagaaactgaataaaataataagaactgaaaa

SEQ ID NO: 68274 - DNA, 592 bp, Cannabis sativa
acaagaccacccaataaacaccactcagttcagaattttacgtaagtatccgtcatgcccaaaatcttaattttgagttttagaattttataatggatatttttactaattctttgttcttccatatctcatttcagctattttagggagaccaatctcaacaccagtggttatttcatggtgaatctaccctatggcttgcgagcagttgatttactgcttcataatgatgatttgaaatcttgtggccttcttgcgaaagaccaatgcataatggactttaagatccccaagcatcctacttgacagcaaataaattatcttagttttgagttttacaatttttataattggatatttttactaattctttgttcttccatctctcattttcagctactttaacgggaccaatcccaacactagtggttcaaaggcagcatgaaatcatggtgaatctgccttatggcttgcgagtgactgacttactgcttcatgatgataatttgaaatcttgtggccttctctcgaaagaccagtgcacaatgaactttaagaaccccaagcatcctacttgacaacaaataaatta

SEQ ID NO: 68275 - DNA, 689 bp, Cannabis sativa
tggaagacgaaggttgggaagtcaatggtgatggagattcagaagtggcatcactctgcgcgatgggccgatggtgctcaactcgaccacttagtcgttcactcttgaagactatcttgggtcgagtctgggggatctctgaaagaaattggagcgttgaaatcaaacatacaacgaaatctgcgagtttcttggttttttcattcaaatcatctcaagatttgaatcgaattttgatcaagaatccatggtttcttaacaatggtattttaatcttggagaaatttgaaggaatccctaacgattgggaaaaagtgctcactgaattcccacttagcggacgcattctaaatctgcctatccgatcaatcactcaaggaaacatggatcgattggcgggctttgcgggtcaaattattcatgttcaaaaggcagatgctcccaagattgcagccaaaggctactttacatttaaagtgcggcatgatattgcaaaaccaatcttcccaggattcctttttccatgtgaaggtcgaaaagtctggctcccttataggtacgatcgtttaccctttatgtgttttaattgtggttttgtgggacatgatactcggatttgtgcagaaacaattaaaatatttgaggatgcaacggggatgcaacagcagggttatggttcttggctcaaa

SEQ ID NO: 68276 - DNA, 532 bp, Cannabis sativa
aaatacaagttttaaaaggatatagataaaaatatgtaaagacataaataaaaaaaaatctatttttatgaggtcaaattgtacaatacctaaaaatttatatataaaatttatatgaacaaaaagttgagggaaataaatgatcgcacatatgaccctctgccactggggaattggactaaattgaatttgaatttttgtgcagattgaattagatctaaaatatgaaatatgcacttagtgcagattgaattgaatgaacatccttaattattagtactaatgtactattagagaaatgctaaaatacattagtgatgtttaacactttctaaagcgtcacattactattggtacaattaaatatcaaattctatataattacatataataatttttataaatatcactaattaattgtaaaacattcaagattaagtatctaataatattaggtagacataattaatgaggtaagaattgagagctatgtatattactatatttaataagccatgacgtatttgatgag

SEQ ID NO: 68277 - DNA, 1654 bp, Cannabis sativa
aatataatgtttgcctggtttaaattgtattgctcagcttggaatttaggttgtttcttgcaactcatatacggttcaatttagaaaatgaaattctactgattttctttaatgatatttactcaaattagagcttgagtttgtaagcaacattttatcttagttagccataagtagcaagtatgtgatggaatcttgcgttaatcgaaatagaagtttggaaaaatagcaatatttcattttgttattactattattatatctctatgtatgttaatgaagtttttatcatgctcctctagaatttctttgaaatgtttagtgagattttgctgattcatttcaagactattgaaaaaagtttcttctgaactatcatttttatctagttttccgacctttttttctttttcaattataaaaacaatcttttatcatactttgcaaagaaaagttctattgtgttttatttatttttcttttctcgatttattaatgtaatttattatactttgactcattctctgttacttattttatagctaatgacaaagttaataataataagatattgcagaggattggtgaaaaatatcttccatgagagtgactcaacatgaggcacatcagtgatctataatgtatcaaaaatatatatgaaaaaaatgaggcacatcagtgatacgagaataaccattttcacaaaaaaatacagtagttttagagggaacaaagctagacaagtataataattaagaagaaaattttctcatttgtcattagagttaaattggattagtagattccaatgtcatgacttttccttttgtgaacttttcacaaaataattgtgcaccttaataatgtaatattattagctatgttcgttctcataaatatatttgtgtttgatctaagtgttttattttttgctgattcttgttattttttcttaagaaattagactcccaacccaaaaatatttgtgaccatttgagcttgtttgtttcttctttttatctatttgtcaaactagtacaagggtaattggtgcatctgatctcttgattaactaagttatgatgatttggtccttattatttcagtttttgcactattatgagaggtaaaagctaattttgcaattgtaagttggaaatggagggaaggaactagagaatgaatcagttttgtttggttaagtatgactgaatctgaatcaaaatctttatttattagatgaatttgtatagatttcttcatttatggattttcttactaatgtgtgaatgttagtataatcatatatcaaaagatatatcatgttactaatagactagatcttgtgtttagtgtttgttttgctctgtcaaatttctacatgtactgattttgtgaggaaaaaccagaaccattattatgtatttttttcagttttaactttgctttgattagttttttttttttttgctgaattattagtttattgttgatattgacttttacttgcttgtagcccaaaagtgtagacctttctttatacagattctatattatttcataaggctaattagcaatttttttccccgaactttgacatatatcaaattatgttccttgaactttttttgccgttaaaaatttcccttgaact

SEQ ID NO: 68278 - DNA, 910 bp, Cannabis sativa
catacaagcttcataacaaacatgagattatgttgttacaaggttataccttttggtttaaaaaatggaagagccacatatcaacgtctcgtaaacgacatgtttgagcatcaaataggttaaaacatggaggtatatgtggacaatatgtttgtaaaatcgatcaaaagtatggatcacatgattgaccttgcataatgtttttcaatcttaaggaagtataacatgaaattaaacctgaataaatgctcctttatggtttcttctggaaagtttcttggtttcatagtaaatgcaaagggaatcaaagccaatctagaaaaaataagggctttactcgatatgcattctcctaagaagcgaaaggaagttcagttcttaattgggaaaatggcagcattgaacagattatctcgaagtcaactgataaatgtttaccattcttcaatatattctgaggaaataaacgatttgagtacacgaaagaatgtaagagagtatttcaaaggacaaaggaacatttgtccacactactaatacttttaaaaccagtaagtggagaggttctatatttgtatttataatcttagagcatgtcttaaatgtagaactagtgcgagaagagggaaaggcccaattactaatataagatatccacctcttgaaaaactcgcattaagtcccattcatgtctcaagaaaattaagatcatattttcaagtattcatgtgttgcctaatcatcccttaaggaaagtcttgtcaaaacctgatgcctcaggatgactcattaagtggtcaatcaaattagggcagtttgatataacttaccacctgcgagcaaccatcaaaggatagttattagattttttaattgaaggtatagataccgatgaagacatgagtaaacc

SEQ ID NO: 68279 - DNA, 603 bp, Cannabis sativa
tcatttatggggttttttgaagtcagtccgatgggggccgatgcctgtccgatgtgtgtccgatggtacacacattcagctcaacttttgggattttgaaggtcgggcccgatggggtctgatgccagtccgatgtgtgcccgatggtacacgattttatctcatttctgggctcctcaaggtcagaccgatgtgatgtaattcgggggtaaaattgagtttcactaaaaattatcccattttacaaatttcttaaagttttaaattagtggaccaattttagtcgttattatgcataaaaattcaaatttccgataatatatagggatttttacgtgtagcactttattttatatccaaatttcaaaaataacatttaacatttaatttaaattttcctttaagtattattaacatttttaataggtagacatgtttcaatacctgaccaaatatttattggaaaaaaaatactacctgtcatttttttctttctttttaagccttaattctttatttcttcattatattctcctttttctatttctcaatcttttttttactttgaaaaataatttttggccacattattaaaattactat

SEQ ID NO: 68280 - DNA, 520 bp, Cannabis sativa
taaacaaaaataagaaagaaaaaacagtatgaagtaatgaatattgccctaaggaggaacttgttactctctcctaccctaaaattacattgtatacctaatttattttacctattttaatttttatttttatttctatatattttttaagatatacctatttttatagataaaatctctattataccctttagatttatgtaaattatgtgttagacttaggtggaaagtgaaagtatattgggcaacccactcaaaaaaaaaataaatatattttaatgaaatataatataagtgtatttttaattaatggatacaagaaaaagatacttctcaatttattccttcctcgtattttatttttacaaaaaaaaaaaaaaggttatggaagttttgacatttaaaataacttttgaaagggttagacacttgtttattatattggttaaccattaaaaacgttttcttaagataccagaattgtctcttttttttcttttttgcaaaaaaaaaaaaaaaa

SEQ ID NO: 68281 - DNA, 1391 bp, Cannabis sativa
tactttatagttcctatttttttagggatattaggttatgatcttcatgtaagctctcctatataaagagcattagcctaaccctaatttctctaagtcttaaactttaagctctctaagctctcaagttctaagtctgaaaacctaactctctcttcccttctctcttacacacccaaggctctctctctctctctctcacttgagattttcctacttgattcatatattgtaatcttaagagagcaactttagattccacaacccttgtgatctgagtggtattatctctagtattaatacaactaaaagaggagtaggttattacccactaagggggccaaacctctataaaaaaaatctatttttatttcttattcttattatttacacgtggtaaacatccgtaatacgacttcgctatcggttggccaaatttgaggtcaacagtttggtgctttcattgagagtcttgtcattgtcaatttatttgtatttgatctgatcaatcaaacaccatggttaacacaaggagaactctggctacaacttctgtttcaatgggtcttcctcatgaccctatgactactgatcatgatgttcatgttctagccacaactggaatatcaacaaatccaacagatgtagccaacactgccaactaggcaggtacaacaaacttgaccaccacaacttgttaggttgacactaccaatccggttggtctcaaagaccaacctttgctgcccaggaaggaccctccactggcgccttgtactaaaggtatggccaacatgaagcagcccccgggcacaacaattggatttggtccccaatattatgctagagagacagaactagcccttggcgagcctcatgtaacttgggagaagatctcgagttggctagacttagagaggatgtctaccaagtcagccaaactgaagaaccacatgctgttggctgcaatgcattcgaaggtttgttcgttttcttttctttctgtaatttttatatataacatatatatataaacgttaataataatataatatattaatatattaataataataataataataataataataacagtataataatattattattataatatatattaataataatttttattaatggttatcctatcgtttctgagccactaagaatttccacttctaaggcattaaaccaaattctgcacactcttaattgttacaatatctacattatcaacttatcacaatattcccattaattctatcaattaaatctgttgtgacaatctagcccccgatcgagtctctaaggtcgccgaacatgaaaatactttttttttccacatataactcatattgcattcacacattctatataaatct

SEQ ID NO: 68282 - DNA, 549 bp, Cannabis sativa
atttccgtacagtttgcttggttcacgccattattcaatgcctggacgaaactttgtttatgatgcctagcgacagtcacaacaaaagttgcaataagtttacctacaacagtagggtttggacggcccttgggcaaagtgtcaatgatgtctggacggactattatgtccagtcggacataagatagcgtcttgaccccttcttaagtgcctaagtgaagtgatcgtacccttgaccttggatctggccacgataaaaatggtgttgcacctcgggttctagggaagtcgtgagttcactaattactttccagtcttcaaagctagagttagaaaggttatcactggatgaggacggactggcacggaggcaaggataatcctcgtacaacagttgaagcaatcctggttgataaggtgtttaccttcctaaaactccttagatttcatctacaaaagataggagacaagaagatgagaattggtcagggcaatgaataaaaaataggttgattatacagaccaggtttgattgaggaatgaaaaata

SEQ ID NO: 68283 - DNA, 784 bp, Cannabis sativa
taatagccaaacgccgcgttccaatattgcggggcacaaaacatgcaaaaatataaaattccatatatgacatataaaatgcattctgaattcaaataaattttcgtcaactgataattcataactaatatacaagtttcataattaatccctaattatctgctattttccaaattaaagttaagcggtccttacacaaaccctcgagaacccttctccctctcacgattgccccactcggcatcaatattctcccgcgctctctctcttactctttatctcgcctaggcggagattcatcgccgttgatagcagcaagcggagatccatcatcgctctagtgtaagttttttttgccctcgatttgagatttgatttgattgtgatattgagtttaggttttgtttgtggtttgtggttttagtttttaattttgtttgtgataaacgatttagggtgatagtgattttaattttgggtagtggtttaggtttttctaatttttgggtagtggctgtagtgatttttggtttatttttatttctgagaaggagaagaaaaagatgatgatgaagaaagaaggaggaggaatggtggtcgagatgcttcgagagaagaagagaaaaagaaaagaataaataaaaaaagaaaaaaaggaattttgcttttaattttgttttgtaaattattttattttttataattattttttaaaattagtattacgtggatcactaaaaatttgccacgtgtacaagtgtgtacacgtggacagtctaccgtg

SEQ ID NO: 68284 - DNA, 1119 bp, Cannabis sativa
actgtccatgattgcttttatcgtcttgacaaatcgttcacaggtcagaacttaggacaaaacagcaacacacaaacacaacagcaggttcaacagcaggctaatctcaccactacaggagttgctagtgatgcaaactggtatccagactcaggagccacaaatcattgcactccacaagctcagaaccttgctacttgcttcgattacactggtcaggatcaaatgtatgtaagcaatggctcaggtttgtcaattaaacatattggtcaatctttcatttcacctaaacactcatctcagtctcttgttttaaacaatctccttcatgttcctgcaatcactaagaatttaattagtgtgtctaagtttgccaaggataataatgtctatttccaatttcatgctgatttttgttttgttaaggaggagatgactcatactactttgttgatggggacacacaagaacggcctatatacttttgattcaactcaaattggacctgtctcttcgagtccaaatcagtgtctcaagtctgaacagtctgtagagtctcaagccaaaagcatggtctgtaccctggaaaccaagagcacctacattgtcactttaaataacacaacagctactgtgtcaagctgtcttagatgtaattcgaatgtgcagaatgaatttaccttgtggcacaatagattagggcatccttctgagaaagttgttcatactgtactcaaatcgtgtaatatgcctttaagcaataaaatttctcccttttctgtgtgcactgcttgttgtcttggtaagatccataaattcccctttccaaaggcttccaacactgtcataagtgaacctttacagttagttgtgtctgatctttggggaccttcccacaacacttcctataatggttacaaatattatattcattttgttgatgtgtattccagatttacttggctctatttgctaaaacacaaatcagatgcattcaaaactttcttgcattttaaagccgaggctgaattgcaaattggcaagtcaatcaaagttctacaaactgactggggtggggaatttagatcattttccaagttcttaactgaacaaggaatt

SEQ ID NO: 68285 - DNA, 782 bp, Cannabis sativa
accgtcgatgaggtgctaggtcgaagatggagggagggtcggaggtgagagcttggagtcgcggctatgtctgaaatagttatgagtttattttttagggaaggaaaaatcctattttctccaaatgcgagtatagtttcataaaaaaataaataaattaggaatgactttgttaatcatttaattatttttaaaataaaaaaattattctttttcgagcgcatgaactgcgttggtaaaaatgacttttgccactgtagtctgctaccgcgctggcaaaactcacttttacgagcatacttttgcgctggtaaaaagtatgaaagggaggatgtttacatgattgctatactagcgcaaatatgagttgcgctggtaaaaataggtttttctaacataaatgtgtgatggtaaaactttgacctttttatcagcgcagttcacgaaatatgctggtaaaagtgacttttgctagcgtagttggttactgcactgacaaaagttatatttcttgtagtgtttctcatcggtcctcaaatcgagttttttagaactgttgctaataaaagtgagtgttcaaagttgacgcctatagttgagaataactattgattttaaattgtcgttgagaatacccgttggtttaaataatcgtcggctatactttagcctacggttaaaaacagtcggctattctcccttatattaaaacctctctctctcagctcttcgacgaccacacatagcaacctcctcccttacccctctctctctctctctct

SEQ ID NO: 68286 - DNA, 810 bp, Cannabis sativa
gcaacaaacttgcggtaatagcctgtcaatcccaaaaatccctagagctctctaatgtttttcggtacagcccaattcttcattgctgctatctttgttgggtgagctgctaccccttgtcttgagatgatgtggcctaaataacccaattgtcgctgcccaaactcacatttctttcggttggcaaagagctggtgtttttgaagcaattctaagacaatgccatgatgttcttgatgctcctcttcattagcactataaaccaatatatcatcgaagaagaccagtacattctttcctagatgagggcggaaaatatcattcattaacgactgaaatgtggcaggggcattagttaaaccaaacgacataactaaaaattcatagtgcccattatgcgtcctaaaagctttctttggcacgtcttcagccttgacccttatttggtgataccctgatttgagatcaagtttagaaaacacttgtgcaccatgaagttcatcaagaaactcatcgatgatcggaataggaaacttatctggaatggtagcttgattgagtgccctataatccacacatagccgccaagtctcatcttttttcttaagtaagagcactggacttgagattgggctttggctgtcctgaatgattccatcttgtaacatcccagtaatttgctcttctattttggttttctgaaactgaggataacgataaggcctcacactaatttgttgggtgccttccttaagatttatggcatattcccttcctcgagaaggcggtagacctttgggagttcgaaaa

SEQ ID NO: 68287 - DNA, 757 bp, Cannabis sativa
tgattaaaaatcacatttagtcacaaaaaaattatattgtgactaaaaatttgttaccaaatataacaacattttgtagtgtataataaataaaaattggactaacattcactcttttttttttattattatttaatcagatcaaaataacatttatccgattatcaagttatggcttaatagctacttggtgtaatataagttccacaaattatttacacatgaataatgtagaataaacacacatacgattttttttttttaaaataaagaattaatcatactgaaataatatttattcaattaccaaaaccctcatagaaatatggtaaactaacattcaattattggagagaaatgttgaagaaattcttttatgtttttttttttcaaaggacttataatgttttgataagtataaatatatattgtcgccatctgtgctaggcaaatccttggggtctcggtcgagaggatgaagttgacatgacttgactaaagtgtgtgtaattaaggtcgtctcaaggtgttaagtggcttaagacaaaatttaaaataagacctttttcttttacaaaaatttaaaataaatattgtttaaattttgacacaatatcaatttaactcttttattcccatataacaaatagttttctcaccacataagctaattcaaagtaatatttgattataataacatctctattgaagtgttatatattttaacacttttgtaaaaatagaaagaaaaaaaaat

SEQ ID NO: 68288 - DNA, 936 bp, Cannabis sativa
aagctaaatggctgataaagaatataattacttgtgtaatgcctatatgtatagatcaaaaagaattagaatggtttcaagaattataagagatttgttttttttacagaaagttgtatagttgattgcttcttgaagagccataggttgtaacataaaaagtttattgtgtaatcgaatgattcatcaaaaaaaaatatatatatatattatataacagctccaactaataaataaaaatgttacaaggcaccactcaaaatataataatatatattgcaattagttaaattaattaaatatttgagtccacgtgatttaattaaatataatgaaatattcattgctagctatttgcaatgtggtcctcactcagttgaaatgagttataggtaaacaaaatttttttgagcccttactctaaagataaatgatattttttaaaaattattaaaaaaatataaatattttttaaaaatatttttttatttggatccctaaaataagtgggtcctaagcacaggcctagcccgcctatgcctatagggccggcctgcgtgacaccattattgatgcataataacaagggaaaattacatttacaaacgatatttttatgtaatttacaaaattaccgttgctcatttcactttacaaaaataacgtgcaagaatttcaaatttataatacggtataaaatgggagttaataccttctcttaatcttctttgtatgtgtattgtgtaagccatttgctttattttaattaattttctttttttatctttatctctttttacatttttctttttaaaactctaactatattaataattgttttagattaaaagttaaaccgtggtgtctaacttttcaaaataataatttttatatgtaaaaaacatatatttttcaaagaaaatgacaaaattaaat

SEQ ID NO: 68289 - DNA, 1173 bp, Cannabis sativa
ggatgagattagatcaatttcttctttctataatatcttccatctctgaaattatgctgggtcatgttatcaattgcacctctgctcatgagctatggtacgctcttgaacaactgtttggaacaacatcatgagttcgtcttatacatctgatgagtcaactacagaacaccaagaaaggttcactgcaagttgatgaatacctcctgaagatgaaaaatctggttgatggcttaagagcagctagaagccccatcactgatgaccaactcattctatatgttcttgctggtttgcgacctaaatatgaatttatagttattaatcttaccttctgagatcactttactatccaaaaagttcaattcttactgtaaaatcatgaaactcgaattgaatccaatgttgtctcccttaactttgatcttactagtgcatctgtcaactacacttgtaatttttttaaaaaaaaaaaaaaatcttaatagtttacaatgttaaaaataaattttaaatattatatggtttttctttaacatattgtaaataactgtttaaatcttatttttttagcattataaactatttagaatttttaaaaaatttatagatagttttatgttgaccaaaaaaaattctttgccacccaaataaatagagaatataccaaaatgatccttttaaaagtgtactatagattttttttttaatatatatattatttatataaacctttattttgtggggtatagcacttttctcactaaatgggctttatatcctttctatggagagaagttgaagaatatcaattttttatacattaattaaattttacttccaaataaaatttaattcaaacatacctttttttatgagtattgtacctaagctatcctcacacactcacataattataaaacataatttcaaacataatattctttgtagtagatgtgtaggtttgtaagaaaattcgggtaaaattttgattagagaagaataaaaattatcgtgaagtgataagtataaaattggtagaataattgaaaaaaaaaaaaaaaaagtaaacataatagaatttacaaaaaagagtaaaaattaaaaacatcaaattaaaagaaatatatagtgtaatttcctctatctatttggtaaactcagttctcaatt

SEQ ID NO: 68290 - DNA, 1204 bp, Cannabis sativa
cttccaattatcatttgaatctttcaatctcagaatttggttgcttcgctttcttgaacttgccgaggcgtgaaagtatttgctatttttgtcacccaaatgaagccaatgttgttttgatctttgcttccaataaatctcttgttgagcaaggatttcaaaataattgtttttttcttcatcaaaatcggcagtggagtattgatcatcagagcctctcatggtagataatattttcttgcttttattcaacctcttcttaaaattcccagtaagtttataatcccaagaagacaagcttgcactgcatttgttaattttatctgacaaggaaagatggctatactcctcccaacagttctttatgatttgcttgcaaaatggctcacgagcccaggcattttcgtagcggaatagatggaggtggttgttgccattaccagtttcaggttgaacgaatattggtgtgtgatcactagaggaaaaatcacaatttgatagtgtagcattaggaaaaatattcagccaaagttgggtaataagggccttatctaaccttatctcaacatggtgactcgtacctcttccgtgttcccaggtgaaggcatggccatgaagctttaaatcgtgctgggagcaatcacgaataacactctggaaaccattaataagatgtggaggatagggccaaccgcctcttttttcttcttgcgtagcaatgttgttgaagtcgcctataatgcatcaatgaagaggcgaatgaggagcaatagttcgaagaagatgccatgtgcgatctcgaagtgttatgtttggctcgccataaaatcctgtgagtctccatcgtgcataacaaggtaggtgaacttcaatatcaatgtggttatccgaataaccaaaaagatgtgcttcatcattagttttctaaagaaaagctaaaccaccttttttgccttgggcctcaacagtaaaataactatcaaagcccagtcaactcttgatacgatccaaaacatctttcttacacatagtctcacaaaggaaaatgaaattgaatttcttttgaacacaaatgtgttaggaattgatcaatggcctgtggattttcaagcccatgacaatttcaactaagagtatttatgataattggtgggcttgaaaaccagaactcaccacatacattgttttttgagaagtcatcaac

SEQ ID NO: 68291 - DNA, 3439 bp, Cannabis sativa
aaatggggttgaaaaaactgcctctaaaggctaatattgtagtagtgtaccaaaacatatcgataaaaactaccaacatacacaatttatttcaaaaattgcaaaatatgatccccaataaaaaaaattgattgtacaagtcaagatatataatatgaatctatataacattacattaaatttttagacaagtaaacaacttttatcgactcaacaatcattaagttaaaagtatattttaaaatgttaaataatatgaatcaactggagaaaaaaaatgtggctcaaatcatcaatggcaattacagaaagtgcatactttgttgagattacaagagagaggatgatatatagataaaattataactatcatagttgttactcttatcaagatttagctagaaaaattataataaactaacatttgatgcctttagcagttaacttgaaaatttactaaaaaaattaatattacacagatcatcactgattatttctctgcaatattctcatcacaaggtttggatcaagttgctattgatactgtgatttccaccattcctaccaccatctcagctgaagaccaagtaattctgtctcaaccattcactccgaatgatgtttatcaagccttaaaatcaatgtctgaggatcgaagccctggtttagatggcatgtctgttatgttctatacaaattactggtctgtggttggatctcttgttacctcagctgtcttagatgttcttaacaatggttgtgatcccaccttactcaataaaaccttaattaccctcatacctaaggttaagaagccttccaagatcacccaataccgacctataagtctttgtaacgttctatacaaactggtatccaagactatagtgcttcggctgcaacctttccttcctttggttatctcagaattccaaagtgcttttctctcccaacgcctcattactgataatgtgcttgtagcttttgaagttttacattcgctcaaaaatcgcaaacgaggtaacaaaggctatgctgctatgaaattagatatgagcaaggcatttgatagggtggagtggcactttattcagcaagtgatgttaaaaatggggtttggttctacaatagttcagctgatttatagatgccttcaatctgtttcatactctttccttgtgaatggaacggttcaaggtaacatcactcctcatcgaggtattaggcaaggagatcccctctctccttacttattccttatttgttctgaaggcttctctcgtttgctgcaacatgaagaacataatcgtaacttagaaggcttgaaagtctcaagatcagctccatcagtttcccatcttctatttgcagatgatagtgtcttgttttgtcgggcctctagatcctctgctactgccatacatcgttgtcttgatttgtatagtcgtgcatcaggtcaagttatcaatcatgacaaatgtgttctctctttctcacccaatacacgaccttcagagcagacttttttccagcaactccttggtatgccaatccaaccatgtcatgagcgctatcttggacttccatcattctcgggtcatgataagaatcaactctttagcggcattactgatcgagtatggaagcttctcaattcttggaaggaacaactattttcgatagggggaaaagaagtacttcttaaggctgtggtgcaagcaatccccacatatgcaatgagttgtttccaacttcctgctaagctttgtaatcaaatagaacaacaaatggcaaggttttggtggggttcttcagcatctggacattctattcactggaaaaattggcattttctttgtaaagccaaagttcatggaggtatggggtttaagaactttatccattttaaccaagctttgcttgcaaaacaggcttggagactcatggaatcacctaactcactacttagtcgagttttgaaaagcagatactacatgaatggtgacttgttacatgctggtgttggcaataccccttcctacacttggagatctattgtttggggcaaggacctactcataaaaggcctaagatggagagttggtacaggcactgatattctttgccacacaatgccatggatacctaaccactcttcttttttgcctctggtttctaatggagatccttctatgcgagttgccagtctcataactgatacaagacaatggaatttggaggctttgcacggacacttctcccctcctgatattgataatatcctctctattcctttaagtctcttcccaactgatgatgttttaatttggcactattcttctactgggtgttatactgtcaagactggttatcaatttgcaactgaatctcaagatactacagctccaagcagctctgcctcggctgatggttggtggcaaacgttttggagtttaaaattaccttctaaggttcgtatctttgcttggagagcttttcatgatgcattacctacagcagctgtgctacattataggcatattgcctctgattctatatgtccactttgtaagcatcatgctgagactattccccatgctttactctgctgcaaaagagctaaaacaatatggtctaactgggatcatttgccaagttcaaatctgtctaggatctcttcactctcagattatatgatccatatttcctccatcctctctcaagatctgtttgagctttttatcaccattatgtggtgtatttggagtgagaggaatgcagaataccatggcaagaagaccaaaccagtgccattgcttcttgattatgctgtcaaatacctaaaagattatcatcatgcccagtcccgatctgcagcaacatctcaacagcatttatcttcaaatcgtccagtgtcttctactgctgcctcttctagcacaaccccaactcagcctatatggatcgctcctcctcctggtcagctaaaattgaacactgatgctgctataaacatgtcttccagcatcattggattaggagcagttctcagagactcgaatggaatcattgttgctgctatggctacttctattaagggacgatttaaaccagaagagatggaagcccttgcactatcatggagtttaaaaacactgctacagcttcaactgccagtgcatctcatagaaacagactctttgctggttgttcagaatttaaaaaaggctaccacttctctctcggcttttcatgccattcttaaggatattcactttcttgtgtccaatttcccacgagcacagatctcacatgtttttagatctgctaataacaaagcacatttgttggctaagtttgctcttacggtggatacagaatgtatttggttggaagaaattccacctcctcttatgactgttatgtaatttgtttccaa

SEQ ID NO: 68292 - DNA, 2644 bp, Cannabis sativa
ttagtgaataaatttttaataattcttttatttaaattcttattaaatttaaaatatattaacaaaatcaacattaaaaaaaataaaaaaaataaaaactcacctatatggaaaataaggaaaatttataattttatgtactttgtagtatttaattacactatatgtgcataaaaatttatttacaatttattatacattttatcaactatgaaaaatatatttttaattttatatacaaactatgtatgataaaaataaataataaatatatataaaaaaataaatattgaatttttttggaacaatctaaaatagcggtatgaaaggattaagaaatccataaaaaaaattcaaaaaatgtgtaaaaatgtacactctttattatttttgagtatttctgaattaattattaaaataattttagaaaaagaaaactactttactcatacgctactggaattggtttgtaagtgtttttttttttttatataaagaaaaaggaagattaattaaatgttgatcccctttaatcttggcttccaaattttgattatttatttatttatttatttgtggctttgacttttcgtaataatttgtggaaattaaattgtcaataaatgagagaattatgtatttaagggaataaataaagaaataatgaagaatatgctataaaacatataaaattaatttgagtgcagtgaaggtcatggaagactgcacaaatatttgttccaatatgcttttttggcataagtgaaaatttcattaaaataaacttcatatataatatactaaccaagaaatattaataatgcaaacagattaattaataataattaattgtaatataaaatgatattatatataattgtattgcatgtgatggtatataatgtgaagctctagccttggcccctacgacaactagaaaataatacattattaatgtgacacaatattataattaatcaaattataatactgtaatataagccaaactacttattatctatatatatatatatatattttaaaaaataaaactatatatcaatggtgatatatcatgacgtattgtatcatggttctatagtatatgtgttatagcttatataataatatatagtaccatgtaggttatcaccatttgattgtatctcttaattatattttagacctaattaaaatttttacatctaaattttattatgtattaaattatactctaaattttctttaactattgaaattattagatttaagttcaatttatcaataaaaatctaatatgtatgaaagtttaggaatacgacttgctagatattaaagtttagaagtataatgttgtacatcataatcatcatattaataaaattgaatgaaattggacaaaaatctttgaattcaacaatctcaataatttgagtgaaatttttaactatcttaaaaatttagggacatgatttagtacaaataaaaatttaaaaggtaaaaactttaatttttttttttttgccaattagtgtctaagattctgaaagaattaattatgttacataattcacaaaataatcgtcttgattgagcatcaaatgttttaatgataaaacaatacaagtttgggaatttcatgaactacacttaactattttctcttctcattttaaaatcatattctatgagttactatatgatttttttcatatgattaatttgataattatatttgtaattgagaaaaagaccaaccaataattcattttaagctaattaggattttttttttcgaactttaacatgtaccaaattatgttcctgaacttttttgaccgttaaaaatttctcctgaagatggtcaaatttaaagacttttgtccaatttaatacatgtcaaagtttaggaaaaaaattctaattagccttcattttataaacgtttatttttcaaaaaaatatgttcattgtatataataataaggtggacggctctaaatgatttgtaatcatattaataataaaaaatatattaagtaattcgtcatgtttttttttaatattaattatagtttagttagttgaaaacttgattgtcttatattgatcaatctatatatacaaatcttaggatgattgtataatgcactctttattttaatatttgagagaaatttttagtttaatttttttatgggtatctacgttgtagttagggccggtcttaagttaaaatgggttataggtaaaaaaaatttagaccgatactataaagaaaagtgatatttttaaaaattattaaaaatatatatatgtattttaaaaggtattttttttattctgacctctaaatgagtgggccttagacgcgggcctagcttgccttaacctagggccgaccttggttgtaaattatttaagatattttataaaattttgagagattcgatttttttttaaaaaaaacagaactcaaacagtctattgtatgcgagactcttttattttatatgtatgtgaaatagactatttgaacttttttttttcagcgtgttaaattttcccaaaaatcgaaacaaataagaatacatcagtagactttttttaaaaagtgtattgtaaatttttctaaatattatta

SEQ ID NO: 68293 - DNA, 730 bp, Cannabis sativa
tcagagaagatgattcttataacttctattttgggagcttaataccatgagtggatgggaacatgttatacaatagtagaatctaagctttccgaacggatcaaatattagttcccttgtagtatttattctgggagtgctaacaattagatccaaatctataataagttatagattaattgttcacattgaattaatggtacataaggaatcaagagataattagaatagtgaaacagtaatttaaccaactctaattatgaacaaataattagaggacgaactccttatactgattatatcaatagactacaagtaagaattctgtaaatataattctatattatcaaagagtgcaattccatatttatagtggagtaataatagaataaatagactagattattctattgatgagatccataataatcaagtatatttattgaagctttgaaatataggtccacggtccccaagtcatctcaatacaacactgtacaagggaaggttttgttagatgaataaattttgagtgagaattaatttttatgggaaataaattcttaaaggcaaaatagtaatttgtaaaattattgttctgattaattatgattactatgaattgtataattaatagtatttaattaattaattttattagataaagttatattaattagttaaatataatattatttttaaatattattaaagagagaaatatattatt

SEQ ID NO: 68294 - DNA, 1080 bp, Cannabis sativa
tgtcgtttggtaatatttttatttttaattttttaattacaaaatgaaagtaaaatttttatttttaaaaaacaaaaatgcgttctataactacttatgtttggggtcagattcaggttcgagtcagatgtcaggtttagcgctagggccatggggagatttgggttcgggtctggtcggagtccaaaatattgattaagaaaaaaactgttgaaaaaaatattgaaagtgattttttttgtatttaaaattttgattccaaattaaaaaattaagaagtgaaaacagctttatagaacatgtttttgaaaaatatttttacttttctaatttcaaaaacataaaactaattaaaaaagtgttattaaacgccacctaagctaattcattttgaataaagtttcactacttgatactggggaaagcagttgcgtcaaccctcttacaactgattttataaccattttataaatttacatcatacaacttagggttacctaatcccacatatttttttcgtatttgggattaagttacattttaaatataaaaataataataaaataatcttttaaagaaataaatatctttacaatttattacttttttttttacgatatctctgaagtaacttcgatagcacgtgccctagcacgagattacatcttgcctggaatccaagtccatgaatgcatattgtcctaatgaaccttaaaggtcggctcacttgatgggaccttgagggtcggcccacttgagaggaccttgagtgtcgacccacttgagagaacctttagggttggccctcttgatgggactctcgggttagctctcatcaaagttttcggggacattggttatggagatcgaggaccttggtcatgagacccgcaggatggctttacgacgtccatgtcttgttagtgacctccttgatatcttgaacaaaaattcatgcacatttacattagatttttaagggataacatttttcccctaagtttatcataatcttatagtattatgatggactcatagaaaaaataattcttgcgcttttaaactccatgtctgcaaata

SEQ ID NO: 68295 - DNA, 1069 bp, Cannabis sativa
aaggggtttctgcgtcagtcaacgcgtctggtcaaacttgttgaccgacgcgaaagtcaaccctcatttttttgcttcagttgttaagcgacacaaataataattaatttgtgtcggttgttacttcgacactaaaacaaagatcgacgctaaagatgaaactttaaaaaaattacaaaaataagaggtcgaattttcgcttcggttgaacacggacgcaaattttgcgtctatggaaaactgacgctaaatgactattgttttcaaaacgcaagctaaataaataaagcggtaaagttaaaaaaataaaaatggcgggccttcaatttttttgggggaactgagaaatgtattatatcctaaaatctcaactttctactttatcacaaaataaagtaaaaattctcaattttttctagggcaacgatataccatttctctcactttcatctttcacttttagacattatttctctcccatcattgaaacgaaaaagcagcaacaacatcgagagcttgccacactcatttttctcaatcttcttctctggcgagcacaatgtacttctgcaagtacgacaacgggaaggcagcgacaacaacaatcctgcatttttctttcttctttgccattgtaatcctgttgcagttttaggaacgaccacaccactaagatattttttcttcctgcaacatcgaacaagtcttcatccactcaattgaccctcgacttctctcaactctcgtaatttctcgtactctttaatttttttcattccgtttaatttttaaaattttgaaaattaggtttgattcagataaaatttctataattataggagaaaggggaaacttttgaattatatttacatttgcttttagtaaattcaacttttctggaagaaaaaatctcgaacttgttttgagatttttcatttgggtcatatgataattggagcagggtgtttttttttttacaaatctattatttatttgatctaaattgctacgattaacttgttgacagatctaatgatctgattttaatcatagtacaattgtcaataga

SEQ ID NO: 68296 - DNA, 577 bp, Cannabis sativa
tttgtaatttgggttctttcttttttacaaaatcaatgaattttggcaagtgaaagaagtttggggtttgaactaacttcaaacaagctgaagcaatattaaggctaatggttatgtatgtaatatattaatgctaattaggtttttattttttaaactttgacattgtaaattttttagctcgttaaaaatttaccttgaacttttgagatttttgaatttaaggatttctatcaaattatgttcaattttattaatgtggaggttgtccatgtatcaaatcgcgctcccaaactttgatatgtgtcattttgtgccactgaactttgacatataccacatcgtactcattaaatttttatccactttaggcatccaataacaaaattagatgagagtttttaaatccaacattctcaatagttagagagaatttttaacaacttaaaaaatttggcgcatgatttagtgtatggagagccggtcctgggcataggcgggctaggctcgcggttaggacccactcattttaggcctaaattaaaaaattgccttataaaaaatatacatatttttt

SEQ ID NO: 68297 - DNA, 615 bp, Cannabis sativa
aatgaaaattgccactaagccatgggttatgactattcagacaaactagaatatggttaactccaaaataagacacttgcaaatcagacgacacctttttcaacttttaataataaagcataccagagaaatccaatcaaatcgaacggttactataataaacgatcagatgagcataaaatcagagccgttaaagagactggcatatgtacttttatactagaagtagaagaagtggttcaaattatttatcagtttaaaattgatatcatcccttaccgacatcctaacgtcaagagtgaagtataacctaaataataatctatctatgtatataaatgaaaatttatgtattttatattttttttaatatatttttacaattattttattaaaaatcttaagttttttgtaaaaaaaaaaaaaaattaccttatatattattttttaacttttttttaaaaaaatttaccgtttttgttgctctagtggtttggatttttacggtaatttccgttagttgttataggggtttctgtatagaattccgtaaaaaataaaaaaaaaaattaaaaataaaaaaaaaaacttttttgaagtataaaaaaaaaaaaa

SEQ ID NO: 68298 - DNA, 1174 bp, Cannabis sativa
taaagtatcaatctataatctataacatatataaagatgaatgagtgttttggttttggttcaactattttgtctttttgtggatcaatttttttttttttgtgcgactcttcaaaatattaatgttttaaatttaaataatttaatatttattttttaatcttataattttttttacttaatatatttataaactcttctatcttcaaaataaaaataatactttaaatttaattttttttttatttttagtgtgtatgactcttcaaagtattaatgttttaaatttaattatctatctataacatatatataaagatgaatgagtgttttggttttaattcaactattttgtctttttgtggttcattttttttcttttcttttttgtgtgtgactcttcaaagtattaatgttttaaatttaaataatttaatatttattttttaaccttatgatttttttgacttaatatatttataaattcttctatcttttgaactaaaaccaaaacactcattcatctttatatatatatatatgtatatatgttatatataggttatatatttgttttgtattatatttaatgctataaaagaacaagttttacttttccattaattttgatgaaaattttagcacattattttatttttaataaaaaaaaattatatgccgccctacctcaaattgaatcttcagtctaccattggtgctacgcacacacacttacaatatttagaactttacactaatataatattattgtgtgtgattactattgaagcctcactcacattaatacaataattttattaaaaaatattaaatcaattttataattttacgtgtatataacttataaaagaataaattataattataaaaataattactaatttttacttaataaatataataaaaaaataataatcatgatgttaacgttgatttaattaaaatacatgataagaaataaaaattaataagcttaattataaataatttaatataatctaatgtaatatgttatttgatttaaaataatatattgataatttgcttatatattgaattatgagattttataaactttcaatactaaaaaaaattaattcaaatattctctcatgatagagaaaagttggtcaaataaattccattatgattt

SEQ ID NO: 68299 - DNA, 1444 bp, Cannabis sativa
tatgtgtatgggtaaaagctaccaaggcagtgctttcaaaaaaaaagaaaaagtataaagctagcctacaattaatagcctgctaattagatattataaaatatacatttatatagttttttttttgttgacagtaagcttttatcaatatatgtatatttttatcttacattattatataaagtttttaaacaacccttaattattttcgaattagttacatatagtaaaattcgttgatgaagtttcaaaaacttaaatatttctttacactcgcatttggctacaattaattaattagtttgttttattacttggtttctatataatcctttcatgtataggccattttttgggtaaggtttgtttaattagacattttttaattgtatattagaactttctaaatatttttcatattgcatatagacattttcgctctttcatttttagccatatggattcttgatttcaatgatttgtgaatttgattcattgtgaagatcgcaggtatgatatatatcattgcagttagtgttccttatgtcgttaagatcaatatttaaaatgttttactatgctggagggtagggtaatcaaaagaattcagcaaatatgccgtttggaaacaatgatatatatgtatgccaaattattctatgtatatacatacatatggtattatctctatataccatttaattatatggttcatgtaatcagcagcacagcataaagattatgaaacaagttacaaaaaataattagttttggcctttgggtttggatcataagtatacagtcctagggtataataagatttgattataggagttgacctagcttataaatataaagtcttgatctagttttttttttctttttctgttaatttgttagtatgaggcatgatctttatgatcttgtaccgttgtccgtatatatatatatttatatatattataagcaatcagtcggaggcagttgcttagtacgtaaaaggtaattaaattctgtctctgaggataaaccaacggcaacgtgtatgtgggatcaagaaaagctgactgagtctgagtaaggtacttttatgctcgaccatataatgatataaataaatttaacacccaacccaagaagataaagtttaataaatatattgtcttgaagtatatggatctaaaattttaattgtgaataataaattacaattaaaaaatgactaattggtgatggttatcacataaaagataaatgataaaggacaataataatttctattaatttctattataaggtataatattattattgatataatttaatattaagtctcataacgtaaccatgttgatggcccatgacaatatttcacataaaaacgatcattgttaaggtgcaatggtgctaaactcatgtaatatttatattatttattaaatta

SEQ ID NO: 68300 - DNA, 975 bp, Cannabis sativa
tacatataaaaagaagtatgtttcaaataaatataaaattagagataaatttaattaattgattaataaaagtagaattttttaacttacaccaaatctaatggggtgtttaattagcaatattgttcaaatgtaacataataattctaacatccaattcatgttattaattcaataaacagaaaaaagaaaatttaaagtgggtttgagccaaattgtctgccccataagaccatctccaatcgagggtaaaaaatgtgatgtattattatgttttagctaatagtattccaaaattatatactaaatttaacgcatgctaaaaattaatataacaaatttgacacaaaatatatcattgtatcaaatttaactcacaatagatattattttttttatttactataataccactaattattatgatttattgattttattaaattatatatcctttatttaccgtattactattatttaaatatatcgagtgagaaaaaaaaaagttttcatttttacacttcaaagttttttttttttttgtatttttatacaaatcaacatagaaaaatagctacagaccgtttagcaaaagaaacaaaaatactcacattttcctttgttttactttatattaataaaatgacatagaaatgggacaccaaaatggaacaaaaaatttggctctgtttggaaagcttaaaattagatttgagttaaatggaaatgattacataattaattttttttttctcatgaattacatataaattgaaaaggtaaaacatgtacccatgagcaaatctcgtagtgaacgttatatattctagaaaaagttgtacttagtgagtgaattcttgacttaattagattgccatctaatttagacacaataatatataatattattattttttctttttttctaaaatataaaaatctaattacaaaacaccaattaaaataatatatgta

SEQ ID NO: 68301 - DNA, 1061 bp, Cannabis sativa
cgcccacccgcgtgcctatgttcacctgtgcgcccacgcctgccgccacatgtgtgcttgcccgtacccgctcttcgtgtctgacctcttgacacacacagcctaagcaaggaaaccacgcgatcaggtacatcagaccacttaggaaatcacgttattaggtgtgaaaatgacttagaattccatgattttaagatttggtgaagttgtaaaatgttaaaatagggcccttgaattcattgtatgaggactattttggtgaataaaacactaagatttttggtgagaaaaaatattgaaagatttttatttcatgcatttttcaatcaagatctctaaacaccaattttaatccacgttgtattgttgacgaattcttactgtcaacagcaacctttgattcttcctaaatggaaatgggaggatgtcaccatgtatttcgtggttggattacctagacccatgggtatgtttgattccatataggtaattgtggatcgatttatcaagtcagcacactttctactcatggaaatagcatacacagtaaatcagtatgcagaatagtatgtaaaggaaatagtaagattacatgggtctccaaagtccattgtatcaaatagggatctgaagtttactttcaagttttaggcaagtctcctctatgggtacaagctgaagttcagtacaactttccatccccagacagatggtcagtctaagaggataatccaaatattggaagatatataacgagcttgtgtgatggattttgaaggttcttggagtaagtatttgccattgatggagttttcatacaataatagctatcaaagtactatacagatggctccctatgagatgttgtatggcaggaagtgtagatctccaattcactacgataaaactggagaaaggaagtacttgggtttggaatcagttcagcggaccaacgaggcaatagaaaagatcaaggctaggatgctcgcctctcagagtaggcaaaagagttatgcagatccgaaatgtagaaatgtagaattttgttggaaattatttta

SEQ ID NO: 68302 - DNA, 578 bp, Cannabis sativa
ttataatagttcactccctatgtcgcaatggtaatggagttacgtctacttcgagtttttattgctcacaagaattacaagagaatcgactaagaaaagaactcatatttctagagagagaagctctgaccttatagggcttttacagaatgtgaaaaataagctagtggagctcttcttttatagacaagaaaatctattaaaatattaataaaataatacaaaaaatatgaaaaataattatagactaatcttgactattgatagtgatctaatgtttgaaatgacttcggatgataatcatcaatttttgaaactcgaatcgtgtccatcaaatcgtttttaagtcgtttacagactaaatcacacttcgacttagagacaatttttcgaattgaaatctgtgtgagctatgcgtaaaaagatctagaaaagaactttcaaattaacacacttcaaaattgcatgaataggagtacgtaatattggtgagttacggccattttactgaaagttgtttagcaaccgccgcccaggttgacatccagtgcttgggttgacatcttgacgtcaaggac

SEQ ID NO: 68303 - DNA, 894 bp, Cannabis sativa
tcaaatgttgggaaggtaataaattaaggacttttatgtaacaaattttaattaactaatgaactgaaatgctaatataatttttcaaacagtacaatcagatatagaggagacacacatgagtttcttggcccgtggcaaggaatttcactagcaaattgttcaagacaacctaaaaaccaagaatgtggtttttatattttgaaatacatgactgactttgtcgcacgtgcaaaccccaaccgttacatacaagatcaaaaagctgtaagttttaattattaattatagtatttattataataacatatatataatatacatatatataaactaatataaattattactttttgaaaaacagtttggggataagcggcaatacgatctaaaaactaaattgttgccaatacagcgacagtggatagaacggttgatggcagtgattcacgttgacgattgaggctgaaaggcccaagaatcttcgtcccccgaccttagaatgccaggtggcacgccaggtctctcacccctagtgatgttttttgaaattccctcaacggtttcgatcgtaccctccgtacgtacgacttccgtattagaggtagtgagcgcgttgcacgtctctataccttgcaactcaagggccacaatactattcgcctaaatgttcaccatagggaccctttggggtcggttgttatgaaaaaaccgatgccatagggtcttggtattttccagcttcacaatttcgtgttttagcataatttatagtatttctatatataatattttattagtaacataattaaattaagtataaattatatataataagcataaataaaaattaaattgaaaagttaaataaatacacatttacattaatctaag

SEQ ID NO: 68304 - DNA, 1036 bp, Cannabis sativa
  modified_base (298)..(298): a, c, t, g, unknown or other
tctcttgtaatagtgtcactaaagagtaaaacccaattttttttatttttattactttaaaaaatgttagcctatagtggcacgctaaaagtgaatggctagatgtatcccaacacacatggtgtgtcactatatcaaaattttattttttttaatgaatatacaattgtaattaataaaaaaataaaaagaattattaaatgaaaagtactttttcagcaaaaaaaaaaaatcattttttccttaaaaaaaagaaaaaatgcagtaaaataaaagggtctctctctctctctctctntctctctctctctctctcttctgtgcagatgggtggcgttcgagtttgatgatgttctgggtttgacgagctaggtgctcgactggttttgggttccacgggtttggtgtttgaattatcctgggttcgtggttgacaaagggtgggattcatggttcaacgagcttggtgttcgaacacagaggcattgggatttatggttgatagtggcttgatgttcaaatcctagaccagaccccaaaaatggcgaaagggcctctctcgcttctcaatctcggatactaatcaaatcccccaaatccctccttttccctatattgaatggagccctaatttgtttatgattcgtattgggagaaatttgtttgcaatctgatcattagtttatttttttttaattgtgtttgtagaatcatttgaacattacatgtattaacttgtaaattaatttggtagagtgggatcctggtctgtgatttagttattgtattatttgttttaggttgtttgttttctgttttgtttggagaactcttccttttgttttttcttttggtgtttagcgtttgtttccctattttggggtgcttttgcaccctccctgttataaaaaaaaaaacttgtaaattaatttagatttttattttaataaaatataactttgttgatgtaatttataaattttacatttagttaattaaaattattattgttatatttaattgtatttatatataa

SEQ ID NO: 68305 - DNA, 516 bp, Cannabis sativa
atgtcaatctcaaaatccaattaaaaaccgatccaatccaattacatttatgtatgttaaaaaattatttatattattaaaaatattaaaaattataatatatatttattagattttattcatttttttgtgtgttgaatttgtaacattttgttgttttgtgtatttattttcatgatgttttgttctattttattacttataaacattattattttaattatttaaaacttttagctacattatacttgtaacgcagtatgtttatgaagtattaaacttaaataaaaggcgatacctagtttttacgtatttttcttcataattttatgttaatattaaactttaggtgtgtaattagatatccaatttaaaaatcgatccaatccaattagtaataggattggattggattggattttgaggtctaattagattagatcggatgatgattttctaaatctaattactaattagattcgatccagatgagaaaaaaaaattggattggatcgg

SEQ ID NO: 68306 - DNA, 903 bp, Cannabis sativa
ctaaggatgacgccctgaaggcctgagatgaggccatggccaaggcaaggcgcgagcttagggaggctaaggaggcagttgaagatctgactgccaagctgaagtccctggaggagctgcaacaggctgacttgcagtcaacggccaacttaaccgttgaggtgaaggagctcagggatatcaaggatcaagccctaaagaaggcgaaaagagatgagctcctgatccccgttacctgccagcacggcaccaaaagcttcgatgatggcgtctttatggcctggcagactaatggccaaaatcttaagctcgacttctatccaaagcctgaagaggttctcgtccacttctcggagaagaagaagagactcgatgccttgctagaggagcgcagggggcctcgtcttccaccctgcattgattaagccattcgttgatcaccattgctattatcactatctctttctttttcttttatatatttagtccttcttcccccctctaagacaatttattatatattttcttaaggggagacacttaaggcccgtccccatgccattattattatttttttagagcttttctttaggtttgaacactttacatttatgcttgaatatatattctgcttttaaacttttgacctgttttacatttgtccgtgtggtatgccttactacccccctgagtgacgtgaaaattgtttttaggtcactcagttttacaaaatttagaggttgcatatacttttccgttacaaatttactttacagggcataaatttttattttttcgactattggtaatactttcagaggtgatcaacattccaggccctaggcagcatggttccgcccattcttttttagcttgtaggtcccggagctgatttcatcctca

SEQ ID NO: 68307 - DNA, 1061 bp, Cannabis sativa
  modified_base (32)..(36): a, c, t, g, unknown or other
acaatctcaatagttcgaggggaatttttaannnnnaaaaaagttcaggggcacgatttagtacgtgttaaagttcagggaaaaaatcactaattagccaaaaaaaaaaatgtgtattatgctattaaaaataaataaataaattaattaaataagggtctcttttttacattgttttgagttttttttttttttccaaagttgtattttcgaaaagagaaaaaaaaaatttaaaaattttaaaactaagacttgtttagttagttttttaaaaataatttttagattttttttaaagaaaatacttcaatactttgagatcccgatataaactgaaacttgatctgatccaaactagtaacttcgacccagttctgacattgaccccgaacccaaaactcgaccttaaccttggttctagacccagacacgaactcagactccatgcttggatcccaaaccctaaaaccgaacccagactcggaactagacctaagaccccacgcctagccccgaacctaaactcgaactcggccatggaccttgaccccaaatccaaacctagatccaaacctcgacctcagctccaacctgatcctagccctaacccgaacccgaatccgaacttggaccctaaccccaaacctcgaactctagtcccagactcgaccatggacccatgactcatacacggacttggacatagaccccaaaccttgactttaaaaactaatatgaaagacagtgtgcaaagagagaaaaaataatataaaaattaaataaagaaaaaaaaatattgttagataaagtggaaaaaaaatattaacaaaaaatcaattgttttataaaataaaaaaatatatatatattttgtcgttcccaaaatttttgttttttgtaactttatttttttgaaaagtgttatatgaaaagacacgtttcattgtactcaaaaattatttcattaactttgttctacatcatgtatgactaaaaaatggaggcaaatataattttataaccatgttccaatacatacacaaattaacaaatatatttaa

SEQ ID NO: 68308 - DNA, 658 bp, Cannabis sativa
  modified_base (513)..(513): a, c, t, g, unknown or other
gcatactactttgtcttgtttttgagcttcttgacttttatgccttatgtttctgatgtttgttttttctaaccatgttgttttttgttttgtacatacatgtctcggtagatgcttaatgctttgaagaagagaatgggcggaagctctagcgcatctcctccgaccaagaagtctaaaggcagtgtggggtcctcttctaaggaaaagaggcctgctggggaggtcattgatctttctgaggagctaactgctgcaaacccctctactccaaaagctactaagtccgaagagtctcggggaggaagcttggagaggtctggaccaccgaaggttgggtctgagccggtcaagagtgaaccgaaaccggtgcgagcacctactccacctttgtcggtgcttccagaggccaagaagggcaaggagatgctggcccattacatgaaccggctgattcctgaggtcagtgagcaagtggatggtgctgacaatgactcttctttggagttgctngtgggcggagtcttgaaggagttcaccagggtaagtctttctggacacttccctttaatcttctatacttagcttgaatgctaaagtttttttttttgtgcaggccagtctgaagttggcctacacttactcctgggataagtct

SEQ ID NO: 68309 - DNA, 726 bp, Cannabis sativa
tcattgtcgttggctaaaagcgaagtcaacagatacctgttttgaaaggaagatagatgatttgaacaacgctagcttttgtgtgattcctttagatgaagaaattcataatatagtatatcatcttcatcctttgaaagcctcaggctaaatggtttattaggttatttctttcaaaaaatttgggatatcgtggggtttttttatttgtttagcagtgcacgagttcttcactttgggagagataaaccataagtctaattatacttatatttgtcttattcccaaagtggagttccgtgagaaagtggaacagtttaaatccattagtctttgcaatttcacatacaaaactattgcaaagattctctacagtaggctctgccctctcatggacaagttggttacccctcttcaatctagtttcatcctgggaggtggatagcagaatcctctattctcactcaagagatagtgttaggctatttttagcctaagtttcaaatcagtttttgagttattttcctttttaatataactttttagaatatttttacgcttgattttcttgattttaggttctcaaggtgttaaagtacaaattctgtcaagtgacaaaagggcgagacgagctgaaagtgaagaaaaattcgatgcctaagttccttagctagttgtgaccagcaagaaccatagttgcgacgaattaactggtcgcgactaggc

SEQ ID NO: 68310 - DNA, 888 bp, Cannabis sativa
  modified_base (847)..(861): a, c, t, g, unknown or other
ggtggtggggagaaaaatagagagaagaaaaagaagaagcgagataaagaaaaaagaaaaaaaattaataataataataataatttttataatttttaagtactttttttaattttttaatttttttaattaaaattatgagttggacaaataaaatatcaacatatgacactattaggataaattaacagattaattagttaaaatgaggactaatagaattatcaaaattaagagcttgacttatctgtatatatcccacaaataataatgaatgaggttatttaactatgagtttatggcctatgtacattattatgctcttgaattttttagccctttaaaaatagtctcagaagtatttaaagtattataaattagtcttatgtgatcaagttttatgattatttagacaagtgttatatcagtaacacgtgtataattattttaaaaagaataatttaaaaatttttaatttaattttacatatttttttaattattaattaattttaagtttaattatttttttaattttaagttatacacgtgacactcacaatgaatagggtgaacactattttagcgagcacgtatatcattaattcaagccataaatatcctaaataacctataacaatttgagtggcgtttggttagaggtaatgaaatagaatgaaatagaaatgaaacaattttcattttattcttttgtttggttgtattttaaactattagaatattattccaataagatgacttttctaccactttaatggaatgactattcaattataatttgaaagcaaaaattattccaatacaagatttaaaaaaatttaataatnnnnnnnnnnnnnnntaaattttattctatttcattcctatt

SEQ ID NO: 68311 - DNA, 1376 bp, Cannabis sativa
ccagtactctctcgatcattacttggatgagttcaatcccctcctcgcatagaccgactatgatctcgagatcttgtatctttcgagctagaacttgcctcgtcacgtacgggccttctccatttagaacaggttgatacatgtcccttgctggggtttgtatacaccccttccctatcagtgcgagaaggacgttaacgacgtctcaagggcaacccccttgtcctaggttgagtaccaggatctctctcgttaccacgtgggatttcctattccctagttcggggtggccttctaatcgtaattctacgagaagactctggtaaatcacggtttccattcccctgggttgtaaatccctggggcctacgtggcacttcttgacgaagtgccttgtcatctagttgttcatcttcaagtgcatgcccagtttccccaggttgctcctcctgagtgttctgggggttttcctgagccgtttcctgcctcctgactcgtgagccgcgaggtctgcctcgtggcctcctcactccaagatcaggttgattttctgtgttgttttcctgtgccgctttggcttgcctcccgttcctactcaacattgcgttaatttgcctcctctaggcgtcgccggagttgacaattttctaacttgaccaacggtacgtatcttgtggggtcataggcaccctcactcacatgcgtagaaccgccaacatttgtgttgggttcctcattcccagtttatgggttttggtcactgtcacgttgccttcttcttgaatgtgttgattgtgttgaacgcattgttcgtgaattgggtggcctccgtgagcctattggctcgtttctaggacggtgagtagtctcttcaggatgagtgttatcgttttccccattatcagccatggagaagaaattccttctttggttaggaggatttttctgagcttttatcacgtaggctctcaatgaaagcacgaaattgttaacgcagattttcgttaacaataatgagcctatttttgtaataggtttagcacagaaattatcagaaatctaagaatgaataataaaaacagaattaacaccgggttcttacatggttttgtagttaactctgcatagtccacgagtcaatcatattcaaattttctaatacagaactagggttctttgcaattagtgtattctttttcctctcaaggatttttcgtccccttttttgtataatctgcccctatttataataacatacgtaggaatttaattacattcagattcgaatcccacaacaatatttccccaaaattgcgggccttaattacggtccacgtaaataaatgcagtttttatttgaaaatcacacagctgtg

SEQ ID NO: 68312 - DNA, 758 bp, Cannabis sativa
acacatatttatatatatttgaatgtaaaaaataataatttaaaaatctaatacatatgatacaaatattttaaaaattaatagatcaaatgtatatttaattcttatgtatatggaaaatataatcttaaacaacattaaacatttctttatacataaaacaataataattaaataaaatacattttttttcttctttctttgaatttgttatcttttattttattgttttaaattattgttttatagagacataaaataacaataatttgttttcttttgttgttagttatatgatttttttttaataaatattaaacaattcagtattaaaaagataactaatctaaaataaacgattaaatgtacttttacagattggattagatccaaaatatcgaatgcactatatgagtaaaataatgcggattagattagattaatactcctaatttaattaaaatatttttgaatagatcaaattgggattagttgagaactactcttttgtaatacacattaacaaaatataactgcaaaataattttaattaataaatactctcttttataatcaaagtatcaaaaaataacttcataacttatgaaaattagaatccctataatatatataatggagatataacctataaaattgactataaaatataaatcaaagagcaataaagtatttttgaaatttccaaaatataagttgtggttaaaatgaagtttttttgaaaaggggtatttggtaat

SEQ ID NO: 68313 - DNA, 521 bp, Cannabis sativa
tatagaggaaattatgtagaatataaactttttttaaaagttcgataaataaggagaaattatcattttacttaacttatggcttttttctaatttatgttagttgtgtggaattatatttccatatgtttgagtttttataaaataaagtcatattttatttgttaatttattttgtagagattttttttttttttgaccaattattttttagagatttgtattattttttagggaaatttgttatttatcttaattattaatattgaatatgtaatttaatatatatatttttgttttacaatatttttatgttagtttttttttttaattgggaaaaataaatatttgacttattagtcaaattgttttattctacattaactttttgatactaatcttacccaaaaaaaaaaaaaaattattgaaaatttattctagatacttatgaaagaaagatcttcatttgaattaattattataactaaaatcaaaactaaaagtacaaagttactctctaa

SEQ ID NO: 68314 - DNA, 504 bp, Cannabis sativa
ttttttttttttgacaatcattaaacatttatctacaacaaatatttatttgattacaatatccacattgattttttttttctctttttactatactaatttagtcaggaacttctagtaattatagcatcaaggagattacaagtgtgaattcgagtcactccagttcaataaaaaacataattcttaaatttttactagaatcaagatggaaaaaagaagttttccaatcaataatgactcaaatctattatctaaccccactcatcagaatataaaataaccaaatttttaatgtgaacataaatagtttaacctctaactaattacaaaataccaaatcaatttggattcaagcatgccaattcaagtgatgttgaacatcatatgggtgctctttagcaattttttattttatttatttattttttttttatatagtataacatattaacatagatttatattatggcttagagatatggaaaatttacatggtatact

SEQ ID NO: 68315 - DNA, 585 bp, Cannabis sativa
agaacttgtatttgagatattataaagtgtattcaaaaagagagatattagaaagtgtattaatcttttgggaagaatttataagattttctttttacaaaataatttataaagtactattattataaagatagtgtatatatttaaaaaaaaaatgctaaaggatactcaggttttatagtgtctagcattcttgtgaggtgtaatatcgttattcgtataatttaatattagatcctacttattttaatttaataaagattacagagaattattaaccacttataaaattccattgcatagtggtgctagattcttcagtatcccataacaatactctatttttgtagtatatactaaattttacatcataataaatattactttttttgtttactcttttgctactcattataatgtaatttttatattttattttatatattaataggatttttatacactttcaattaaaatttaataattttgttgactttcttacacctttctataaaaataaaattaattttacccttatacaatggtaaaattttgatcaaatataatgtttgactcatttcttga

SEQ ID NO: 68316 - DNA, 869 bp, Cannabis sativa
agggagtttttgtagtagtgtttagtttgtattattccacttgatgtataattataaataggacaatctcctttttctaattggtttactttacaaataaataatggcatatactactactactaaattgataacttggagaaaaaattactacaaaatagcataaatattgtttaaggttgtcattaatacttaaatataaaatatttaggtaatatttaggtgctcttattgaagccaaagctacctaccgtagtggctcttttgctcctgaagttattgacataatggacatcaaggaagctttaagcggggtcaaaattagaaatggttgggtgcaataagttgagttagaatctggcagtttgctctcaattcaagctattcacaatcattctcatttaagttctgttattggtattattgttcaggattgtcaatttgtattgctttctttgtctcgttcgtgttaaaatttattttgtaaaacagtcaaatcgactaacatatattgttgcaaggctagcttgagtctattgtgattgtagcatttatgagtttaacgctcccactactatgttggatatcttatattcggaatgctaattttaatgaaattgttgtttcttcaaaaaaaaaaaaaaattacttcttaataatattttcataaaattaatgtaaaaaactaaaagtttaaaataactttttaaagatttattttgatgagcttttacataatatatttttttttccaaatactacaaattaataatgtattcacttcacgtttaaatataatttaaacataaataaataaataatcacctacataactaaattcaaataaaactaaaggaataactcttaat

SEQ ID NO: 68317 - DNA, 704 bp, Cannabis sativa
tggatcccgctaagttgtttccaactgactatctttcaatattatataccatgaagacatgaagaatccaagtccaaggcttggaagctgaaaacacacgaaacaacacacaaaaagtcaattcaggcacctatggttttctcccaacgctgaagtttacactcaaactggggttttagttgtcggccccgtcttattgtaaatgggtcaaactttgtactgggacatgaattagacctgtcacgaatatatttgaggcaacaaaattagattcggagcaactttgaattcgagcacccggagcaccaggtgccctaggcacctagcgcccaagttgacttatagtcaacttggggcgcttccaaccaccatatgaagaactatccccaagaattttcttcgtcttcatccaaaatgaggaaaacagttcttttaggggagaaacatatcaacttagaggccagaacacggacccaacgcccattttggcctaggcaccaggcccatccatctagttggcattttgtcaacctaggccacttccatcaacaatatcaacaaagtcttctaggaatattctctgtttttgtcaaaaattaagatacaagtatatttgggaatcaaacggagtcatctgatggccaacaactgaacctaatgcctaggttgacacgagaattttttttttcattagaaataatgaa

SEQ ID NO: 68318 - DNA, 720 bp, Cannabis sativa
tgagactatatataaataagcattaatattagatattgtcaagagtggtttataataataattatttgagtaatttatagtataaatatttaaggttaacttttagttataaataaatatttaagtttaattttttgcgataattatacttaaaattatatttttagaaatttataggtacatggtcattaaatatcaaattattattcacgtcttattagtatatttaaataataaaaatttatgacctaaaccaatcaatgattgtcacatagcaatttacttaacatttaacaatcagtgacatacagagttttagaaatataacttagttattattactgccaaaaaataaatttaaatatttatttgcaaatgagagttaaattaagtatttatattacaaattactctaattaattaaagtaaaatatatgagacttgatatacttaattatatcactaataatatgatatatcttagtggtattggatatacttatggtaccttttactatttctcttaactagtgctaatgtattctaatcatagttatgttaatttaacacatagctttgaacattatttgatacatctttttaaccatgtaaacatatttccaagagtttgtactcttgacaagtatatgttggaagactttagaagataataataaataataatcatagtgatcattgtaaccaattaattaattaatt

SEQ ID NO: 68319 - DNA, 888 bp, Cannabis sativa
ttgtttcaaactcaccatctttcaatattctgtaccatgagacatgaagcatccaagtccaggctctaggagctgaaaacacacgaaacagtacctcaaaaatcaatcttggcgcttagggtttcacccaatgcccaagttgacaacccaattaggatttcagtttttggaaccgtcatagcgaaaatgggtcaaacattgctatgagacatgaactagacatactacgaacatatttgaggcatcagaatcatattcagagaaatttaatttttgagcactaggtgcctgagcacccactacccaggttgacaatttgccaacctaggccacttccaagcatcaaactaaaaatccaactcgtgtatcttttttgtcttcattaaaaatggggaaataagtattttcagggaagaaatagaccaacatggaggccaaaacaagggaccaacgcccaggctgaaacttggcacaagcctagcgcccaggttgacattttgtcaatctgggtcattttttaggattttttctgaaagtcttcctggtatattctccatttcatcaaagattaagatacaactatttctggggagcaaacagaacttccaagaggcctgaaactagaactagcacccaacgcccaggttgacacctagcactgggcccgaagcccaagttgacatattgtcaacttgggctatttccaatcaattttctaaaaaagtgttctgggcattttttcttccgtcataaaaaataatgaaaatacaactaaactcggggagaaaacaacaattacaggggtttcaaaactgagcccaacggacaggatgataatcaacttgttgtgcttgtttcaatcattcaaatgcaaattttgctccaaac

SEQ ID NO: 68320 - DNA, 1311 bp, Cannabis sativa
aaatatttaaattttatttttaacggtaataatacataaattataattttgtaatttctgtaagtacataattaagtaaattgctattttaaaatttaaatataccaataaaaaatggcacgtggataataacttgacatttaactattatatatttatgaaattttaaaatatataatatagatattattacagataaaaattaaatttaattatttatttttaactataaattaaatttagatatttatattgtaaattatcttaataaaaattaataatcaatttatatttttcaaaggcaaaaaaaaacaaaaacaaaagaacaagaaaaacctcatatgatgttgaaagagatagataaacatatgcatcacctcactcccactactgacaaagatttgggatgattatgattgtttttatttattttattcatttattaagtattattagagtaatgatacgtataattatacctaaatttaatatacagtgagtgacgtgacagttgctggtttagtctaattttttttatttcacaataatgatatgccaaaatattatagacttttaaaagagtagatcctaatctatacaaatataattagtttattaattctctaacagaaaaaaaaaatataattagtttaaaaaactgtgatgtatgtatgtttttttttttaaaaataaagtattaatttatattttttgtgtaataatttttatttatatatattttaaatatttttatttaaaatgaaactctattgaaaatagtgtccatgtaatgttcgaataagtgcaatatcattattctaatggatcatccacatttttatgtttgatgttaaaaaaaaaattatttttaaattttcatatttgatattttatattactgacaaaataaaattatcttataagaaaataattttaaattttcaactaacaattatttggcaagctcttttagaatcagaaaattgttactgctgcaattgttctctcaatgcggaaggtgtgctcttgatcagtatcaatttgctcaatcaacaaaagatgattctttattgtcatttcgtgataatgataaagttgttgagcattttaaactagaataaagtcaatatcgaatgtgtaattttaaccagtttagacgttatggtgttggttgtacagcccgtgatcatgatgggaaagtggttgctgctttcaacaaatcttttaagggtctggttcaacctgagatggcagaaatcattagcatcaaggaagctcttagttagatctatagtttctcttgggcttatg

SEQ ID NO: 68321 - DNA, 568 bp, Cannabis sativa
ttccacaccttgaacataaaccaagatgtcgacccatttaggtagaagcggagatcgcttgatctgctacccttagaggttgtgaaggtggaagtcaaaaagttaacctcaatagagttcctcagggaagctttatatccagtttggcttgtcaatttggttctagtccataacccaaatgggaccttgagaatgtgcatcgaattcacaaacctaaataggtcatgtatgaaggattgcttcccgtttcttcgaatagtctagatagtacattcgagtacaaacttttgagctttatggatgcgtactttggctacaatcagatcaaaatgcatgtagcatatcaagaatacactagcttctaaactaataaggtactactactactacctcgtaatgccttttgggcttaagaatgtcggaactgcctatcagcgcttggtgaacagaatgttcaaagatatctgtaatatcccgataagcctaatggtaaataattcgagtttatatttatactatgggttaattaggtaattagtgggattatgatcttactaatctatttcag

SEQ ID NO: 68322 - DNA, 663 bp, Cannabis sativa
atattaataatttgatttgggagcattataataagaaattatatttttttttgcatctagctaactagaaattagttttaagtttgtattacgaaaaaaataaataaataaaaatttaacgttaaaatttattttgtattattttaaaaaatataagattcaaaataataatattgttatattaatacaatttaataattaatctagtggctggttacgtacgttttttttttttcatatatattttgggtgaattatatatatagttgggcaggtagcatttatgatctgtaaattgtaaccccagcagattgcatatgagactttcaaccaaaaaaagaaaaaacaacttgagaattaatagaggataaaacaaaaacctcatcaacctcttctacatccaattaacttcaaatatattgaaattcataccaccacattcaaagaatcataggttattaattttaatttataatatatggtatacgtttttaatatatatatatatgtatatgcatgagatttctttaaaaggaaaatttggtcatagcaaatttaaacagaaaaagacatatcatctaacataaaatggcaacgaatagaaacataaagaacactcccaacaacaattctttaaaattttattttattttacatatattt

SEQ ID NO: 68323 - DNA, 2079 bp, Cannabis sativa
  modified_base (100)..(101): a, c, t, g, unknown or other
  modified_base (298)..(302): a, c, t, g, unknown or other
  modified_base (1386)..(1389): a, c, t, g, unknown or other
atgaatattatcaaagaaaccataggagttaaaattatataattatcaaacatgcaacttgatgtaaaatcactacaaaaaatcttatttttagtcacannaaaatttgtgactaaaaattaaaaaattgtaactaatcatcaacaatttttatgttgcgacattaaaaggtctatgacaaaaagtattagtcataaaaattacagtttattgtgactaaaatatttttagttacaatacttgttctgactaaaactaaattagtgacaacttctatctaaatactatattttagtcnnnnntaattttttgttgtgattaaaagtcacatttaatcacataaagtttatgttgtagctaaaaaattgtcactaaatgtagctgtttcatgggttgtaaatatcgattccaaatcattgaaaaataatatatttatattgaaagttaagtcaataaaattaataattgaattagggtttaggtatacctgaaagggagaggtaatttgggtaacaaatgagattttctcaagtgatttggttgagtgacaatatagaacatatctgcccaatcaagcttttgctcttcacacactacaaaagcttgccctaatccctccaactccccactttgttgcctaaacttatttttctcttctattggcatattgaaaaattctttaattcttgattttacattctccattagtaaagggctcactccatgatccaccaactgaaatatttataaaattaattaattaatattaattcataataatcaaagaataatgtgatctaataactcaaatcaaatttttaattatgacattcaaacaacactcataagttattttacaccaatattgatacaaagctcttggacaccctattgtgttttgtggtatttctcaaaaccatcataaggaagacatttatataaatatatatatggagggattctaataaaaatattaaattttaggggtttattgaaaaatacctcttttatttatcaattaatcaaatttacttttaattttatatttaattgaaacatacctctttttatatgtgttgtacctaaaataccttaacataagagagtcacatggagagtatattgaggtgataggggtaaaatcggtaaattgttcaaaaaaagaggtaaaaataatagactttaaaaaagagggtaaaaataaaataggacaatataaaaagagtatagaatctaatatttcctctaaattttactgttacacggaaaattttaataaaataatgttctttttataaaacaaccgtaaaataacaaaataaaacaattaaaactacagtggaataactaaaaaataactgtgtacacagtataaaacttacacannnnttttgaaaaaaattctaccccacaatttgaaagtaaacaaaaattaaaaattttagtatatagtgtaaaaaatcctatttatattaggtgttaatagataggtccgaccctgagtaataacgggcacaaaaaaaaaattcttttgagtgatatatatctaaggtggagtgtgagtattattggatgatttctaagcacggacctagcccgccttagctcaaaattagaccttttagtagatagaagtagcaattcgtattattatcgtgtcaagattagctgttacgaacaactctcaaactcaaacataactattaatgtattaatcgtgtcaaaaactaaaacttaaattcaacccctttataaataggttgatatgatctaactactttaccatgtttatataaaaaattatgcttgatgtttaatttattaacatgtatttataacaaatataagagcaatttaacgtatctatattctatttaactaacagaatacaatttgtatgtaataaatataaaagtatatatttttaacccaaactcatttaagaaaaaccaaacataacctaatcgataatcaaattaatttaatttcttactctacaattaataattactaaaagtgagactacataattaaatataatattatgttaattgtatgtgtatattattattattatta

SEQ ID NO: 68324 - DNA, 795 bp, Cannabis sativa
atcagatttaactatgattagcccaatgtgagaagtccagcccaagtccaagcccaagcccaaaccccaagcccaagcccagttacttagtcacattgttctttgctctctcccttactcaatctctctgtaaaccctagaaatataatcaacctcgttctgatcggagatcggaggagagtaggaattccgtttcagtcattggctggttaacacaattacttcagctatcatatttacttcactcacttcccaaacttgcataattttctgattttgctttgtgaatcaatctcatttccatgctatttgtactgttcttacttacatatatttttattttatatttataagtttgggatgattatatatatatagtatatatgtattggtgttgatggtgaagtgattctatagctaagctaggcaatttgaattggaattattttaactacaaatagtgacaattaagaacatttctaaggacaattctttattgttttttagctaaaatattaaaatagagagttattcttcatatgatttctttgaagaaatgggaaatttgatcttagttaggatccctataaagcaatatgctcaaagttactgtaattattgttgattgatgtatattttagaagcttcatttctaactagtttttgcttgatgctctcttattttgattcaatggagacttttttctttgcgaaagtatttcgattcatctttactctcaaaaattgttatcattttcggatgtagatgtatagttcttcttctctacactctca

SEQ ID NO: 68325 - DNA, 586 bp, Cannabis sativa
attgggttagcagacatgagcactgtgctaagattgtcgcaccagacagtgggagatcgtggaatctgagtttgcagttcaccaaggagagcttgaatccacgtaatctctgcagtgatacttgctaagcttcggtattctgcttcggtactggatcgggatactgtgtgttgttttttggaggaccagcagacagggttggacccgagatacacacagaagccagtagtcgaccgtctgtcatcaacatccgaggcccaatctgcatcgcagaagcctacaagatcaagtgagttagagcaagtcatatccaatccataatcgagtgtaccctttagatatcgaaggatacgtttgactgttttccaatgagactccagaggcgcatgcataaattgacacactttattcacggcgtatgcaatttctggtctagttaaggtagcgtattgaagggctccaactaggctgcgatagagttgagggtctttgacagggtcactgccaatgctagataatttttctccaccagtcatgggagtgggcaagctgttggaaaattgtaatttagctttgcaaactacat

SEQ ID NO: 68326 - DNA, 661 bp, Cannabis sativa
atcataaaatcattaaaaaaaatccatggcaaagcaaaaaaggccataataatccatacaaaaaaatccataatttcaaacaaaactaacttcaaagttggctccaaatgcaatataaatctgataacatccaaaagtagcaattaaagagtgagatacacaccaaaactgttgataaatctgtgtcgattcaacagttgataaatttggaatataagacaaaggcagagtggagtgttaacagtatttctattataccgagcttttggttttttcatgttgtcaatcattaagaaaaatgaaaattcttaacactaaagtagacaaagaaactaccataataaagaaatttgccaaactaacaacatgaaagcataaaatttgtaaaataattgcattgaatttaatcaattacactctgcaaccgtaaaaagacctaagctagttctgctatcctaaattcacactgcaaaaccataatccacaaagtataaattcaatgtaatttttgttatatttcaaaaacactccaaatacaattaacagcaatgtagatggttctgaactcgaatctctgctaatgatttcaaaaatattataaaaatcatatttctttttactttcaatcatatcatgaaccatcagagcaagaggcagagcc

SEQ ID NO: 68327 - DNA, 3475 bp, Cannabis sativa
tttacagagggaaccaacaagaattgtaacagaattagttacactgaaaacaaacagtaaaaactgaaagtaactaattgacagttggagttagttggttgacaaaaaacaacattttgatgtttattgttttctaattttttaaaatttatttttaaaaaactgtttttaaaaaattttgccaacgtctattagttcttaaaaactatttttagttttaaaaaaaaaaatactttttaagttatcaaaccaaacaacctcaatgtgtcgcagagagtcacaacaagtatttctgtacgacacatagttcttgagatccacaagctcaactcaaaagaggtgaatgtaagtaagaagttgtagcagctgaacaaggatttcaagaacaatccatagagccacaagttcagccaagaagagaggagtgagaacccaaccaggacccattttaggatggggccgttgggcccaagagcctcccaactggagtaaagaaaaagatcatatcgatttttgttcttgaaccagtataaacctctttcttttgtctttggatttatagattgatcaacataattctaccatattagtttatctgacattgttttagttttttgaattgtggtttgtttgagtttacttttcatgtttaaaatcctacataaatgatagtattttatttaaaagctgcgattgttgtaaaattagattaaacagacagggtaagaaaactatgtgatgagagaattttggacatttccagtgatctaattttccatttggccattagttttagagattaaaacaacaaattgaagacaagatttctccaactgctacaatgcactcaacaaaagagactattctctctctctctctctactattcctaggatctttcaaagatccaaacaaaaaactttttacatatttctaccaacctagttgtttctcattgcaatctgattcgatccagactctctgagacggtcttcatccgaggacgaatttctgggtcgagttctgtgcaattgagggcgatatggaatgctgcaacaacttgtttctttgcatgaacctcatgaagaagtgcagggtctataatctcggacaacggcttttcctctttaaatgccttcctaatcacactctccagtcccttctcatcattctcagggccctcatccggaaccttaccagtcagaatctctaaaagcacaatgccaaaagaatacacatcgcatttttgagtgaacttactgccgggtattcgagcctcaggggccatgtaaacagttgagggagccgtgattttcaagccagcagtcacaaaggaagagttagcattatgctttttcgatcccgatgaggtgaacttggaggaacccgacacaagacgtgtaagtccaaatccagaaatgcaaggttgcaaatcatcatccaggaggatttttgttgacttaatgttgccatgaacatacttccgaggactgtgctcgtgtatgtacattaaccctctggcacttccttgagcaatttttaaccttgctgaccatgataatggtggtaaagaactggcaggtccccctacttatcatgaaaacaattaatcatcccattcatagagagacaaataatcacaaggagcgattgtatgtttcaaaaatctttcttattacttagtttcaatactaccatttgcatgatgcacatgtttagaaatttgagtctttcatagataagagtaagcagtcacggatccacagaaccaactactcacaaaagattttgaaaacaaaccatgaaaaggcattcctttgaggagattaatggccagaaattattcatttaggacaggaacaaaccaaaaggaaatatggcccagctgaacattattcgaaatattaaataactagtatggacaaaacaatgaaagaatatgtcagaccaaatgaaaagaggccaaaattaaataaataattcttttctattatcaacacggaataacagaaaagaaatagaaatgaaactaaaatcttatatccctttctaaagagaaagatacaaggacattgactaaatcaaaatttgaagaaaagatactgaaaaatagtcaactagaaaaccaatgtagcatgacaagggattattatgttaactacttttggacccatcaaaatcatggattatagaactagatatttagtatagccactaatatttaatgatagccaaatagccaacttttgaaattagaccacttacataactctaaactataaaacaaatatagtttgtgacaaaaaatcaacaaaaaggagatggtggagtttattggttattattaattaacaagctataataaaatgatctaaaagtatcaatttcaaaagtaaacatgatatagcaattcattagatcccagtgatcagtgctttttaactattggggatatcattcaacatgtcttaatctacagtccttaaacattggatctttgtaataaggttaacaatctttttcaaataaaacatgctttatagacaaatctggctttaattatgagggtacaaaaactattaatgaaaacaacagtaataaattacattgtctgtaataaatacaatacacacaacaactaataagatctactgcctttctctttcacatgcatgctactgttttgaaaattgtagatatgtataaaaaatataaaaatatatatattattatcatttctctttcgttgtaatcttcaatcagtaaaatacaaaggaaaaacaaaagaagggttggtgatataattgttggtagttggtaaaacggtcggatacactatttttttaaatcttagcaagggatctttgaatattttgcagtgatttaattatttaaattccaataaatagcagacattctcataaaatggtgacagaaaattattaaaaatctataaaagaaaaagggtggaaatatatttttactttcaatttgaatctcaagttttttaattttattattatgattaaaataatgttagcctcattaatattattattataatgtttataacatatccatgtgcacattggaaccatactaaaacaagtcagattcatataaatgaaaaaactgaaatcatatgtagtagactagtagtagtattaattaaattaaaattgaaatgaatattttaatatttgaaaataaaacgaaagggaataggattgttaccgtggagcgcagtgtagagactcccgttgcggatgaaatcagtaaccaatagcttctcatcattagcgtaatagtaagcccggagcggtacgatattcgggtggtggacccgcccgatagcgtcgatctcggactcaaaatccttgaacctccacgtggcgtcttcggactcgctgagccttctaacggctacaactgttgcggccacacctgatccccccccccgagccaccactctgtac

SEQ ID NO: 68328 - DNA, 1025 bp, Cannabis sativa
gtattcactattttatacacttatttattactattaaatctattatcaatgatatgttctatataatttgagtaaatctaattcttccaataatatattgctacatatttctaaatcgacacttaatcgctaaaaagaatattaaaactacaacaaaatacttttgacgccattttttttttaattagagtcgtatgtttttatagtaaatatctaaaagaagtttttcttagtaattgctcagcataattactcgaaaattagagaattactttttttttttttaaagaaataacaattttattaaatttagcattcgaaatacaaaatatccaacataactagtgaagcattaaacacataaatactaagttcaaataaagactgagacatcctaacaacatgtactattgggtttgctgaaaatttaacaaaagggattgtaacaaaaggcaaagaaagcaataaaaattgacagtcctaaaccaagttcccaaaacagagcaaagagaagcatgactagcttgaatagagaccaaactatcagattccagttcaacattttgccattcttatcttttaacccaacttaatgcttctttaatgcccatgatcctacaacttcaggagcaaatgtaccagcttaattactcgaaaattagagaattacttaagtatctttaattacaccattattttgtaattatatacacaaacaaatgtattaactgtgtaattacctcgaattttccacaactcaaggaaaggtcatgccccgtcgtcgagctatttccaggaagctgcaattttcattattccgaatccgatcaccagagtcttcgcaaatcattttcagcacctccaacagattcagctccctacgaggaacctccttatccccatctttcaatcgctcaagaatcgaactcggaagcttccgaactggcactggcattggcggcagtggtgactgtgttggtggtgctttttcattatgaatcgccgcctccttggttttgctgccg

SEQ ID NO: 68329 - DNA, 1003 bp, Cannabis sativa
tatgttttaaggttttaaaataacccttcactaaaaaaaaaaactactccataatccgaactataatcatatgcataatcataattaaaaattaaagagattagagagaagaaaataactagaatgataaataattgatgatgtaatctcgctcttctccactttctatgagtttctctctgaaaaacgcagtctaaaagtgctacaagcgaaccctaaaagtcatatttatataaccctaaaagttcatttcagtatagcttaaaaattaatttttttgcaaactatacgaatgtatttacgcctctggctgctccagtggcaattcaagatgttcctaaaagctgagaatgagatctaaacctttcatgttgagctccaagtctattttagcttttaaagtcgtcaacattcacaattacgtttagattattagtcaaactgagcttcccaacttccactgctattttccaccgaaatgtgctaaaatcccatcaaattactcaaaatgcatgactagtctacaaaatagcctaacaaattgaaatcacactaatcaataatttgaagaatcaatttaacaatattcatatataaaattggcaatattaataagataaatatcgacttatcaaattatcccacacttgacttttgctcgttctcaagtaaattgataataaaatgaatgatgcttaaacaaattggtctttatgaaaaataattttagtttaaaaaattatacatccatctataattccaagaaaaatccaaactcttcaatcattagaatttcaattcaagataataacttttcaaactcatcatatttttaacatttaaatcaattcatacatgccaacaatcaatgttcatatcaaaacaaatgtgtatttgaatgaaaattcactccatattatcaaactattatccactaatataattacacacaatctaaaaattaataggactttataaacttacagtgtaaggttaggggaaa

SEQ ID NO: 68330 - DNA, 690 bp, Cannabis sativa
cccaaaaacacacctaaaaaaaatgagaaatgctaaggggtactctttgtgcctagtttttttataaaatataatattattattgttccaatttaatatcgggtatacttattttactttaataaatattataaaaaattgttaatcaattataaaatgacactttattgtagtgctagacactatgtatgcttcctagcaatactcaaaaagaatcttattctttggaaaattatataaatatacatacaaagaataaatgatgtggaatagagtattgtccatatttaagttataaaaactaaagcgaatttgataaaaatagttttatccaaagtctaataagatctcaacataatatatatagattaaatgtaaactaatgagtagagagttaatacctcttgtaggctatcatgagatcctcgtcttcttttagtattattacgattattcaatataagaatttcgccgaagagtagttcacatcataaaaataaataaatatatatagatattaatttattatttgtaacattattattttttattgttatttttaatattgccaatatgtgcaatgcaatgaaaggaacaataatctagtattattataaaattgatgaatatatagactttttctttatattgaaaagaatcataaaataattgatggtgacgtccttactt

SEQ ID NO: 68331 - DNA, 1129 bp, Cannabis sativa
  modified_base (337)..(347): a, c, t, g, unknown or other
ctcggcatgttgatccgaccaggtactctaagttgatgccacgtgtcaccattcttgtgatgccatgtcagagtgccaattatgggataacatacaacaattcaactaatctgaagaacatacacaaatttgcatccaaatctatgaaaattctaattttttatttaaaaaaaaacttactttttttattgagcttggtggtggcgacggtttgactccgagttctcttggtggttcgtggtcgtggtggtcgtgggtcgacgtggttctttgtgggtcgttctggttctcttcattgtcgtgggtcgcctgcgggaaatggagagagagagagagnnnnnnnnnnngagagagagagagagggagaaacatatgggtgattgagagagagtcgcctgcgtttggggtgggtttctatcacaccggtttggcttcttggtgtggtggagagagagaacaacgaagagagagagagggagagagcaggaagatggaaaattaaataaaagggtattttgagtagtttagaaaaataatggtattgttttgtacaaattagtagaaaatattaattttaatattggaggttttatcatgttttattaataaaattttctattataattagattataaattaattattaatttaaacttaagataattggcattgtaaaatactaattttaattagttctatttatgaattaataaattagaagatataattacttatattcattatatgggataaaggtggcaaaatcatttcaactatacgatttatcacatttaactcgataaattaattatttgaaagtaaaactactcaaacttcatttttatgttatttactattttgttaaaatgatattggtaaactaaagtgtatttttaatgtatacacaaatgtatgttagaatttaagttgttcacgtcattttaaaatataaaaataatttaaaaaaagaaaaataaataataaaattaggaaaaaaaaaattataactcaaaaaaccctaatctctctctctctctctcctcctctcccaatacctctctatctctctctggtttacctcatgcgacggcaaaaccaaggagtcatcatcttcgggccccctcacctc

SEQ ID NO: 68332 - DNA, 787 bp, Cannabis sativa
aaaaaaaaaaaaaaaacccatatacatagttatcaagatcctacttagcaaaaacataagtcgattgattcaaggttctaggcacccaaaaagtgctaacagaagaggaagctaacagatccaaaaacttttaaaaaataaaagacaaatttcattgatggttggaagaggatttgaaagtagaaactaggcattgacaatccgagaacaaatctacttcttctaggcctttgaaggcagccatcaactctccatgaataacaaagaggtaagaaatcttagcagcgaaaagagcctgaataccaccaaaaccatctctgagaaccacacctattgctccaatgccttccctattagcaaaatcaacataagcacgagttcgtccaggcctcggaagtgtccatctcactaactaaaaattccttccactcgaattagtctgtctcaaaccagcaaccattttctagtgactgttaaagtccaagtgaatcttcctcttcatctcttccagccatcattgtccattgttgtgaaagtttgagttcttgaaaaactagagatcatgaaaaagaacagctccaaagagagcaaattcctctctatccaactaaaaattattacctagagaagacaatgaattaaaaaatacactaaatcacctctgctccagagtgcagagagacctcatcgatacaaacacaccaattgctcgagaaccaaagagatttagtaacagggcaatgacagaagaaatgggcagcataatcaccctcagtggagccataaa

SEQ ID NO: 68333 - DNA, 4078 bp, Cannabis sativa
  modified_base (3675)..(3676): a, c, t, g, unknown or other
gtaagactcaagttcgggtcagaagtcagattagcgccatggccgtggggaatgggaggatttggatccaaatctggtcggagttcaaaatattgattaagaaaaaaaaaaactgtttaaaaaaatattgaacgtaatttttttttattttcaaaattttgatttttaattaaaaaattgaaaagtgaaaacaattttagagaacatgtttttaaaaaatatttttacttttctaattttaaaaataaaaaactaattaaaaaagtattatcaaatgccacaattttttttaaaaacataattttaaaagcacaaattttgtttttatatttttattttaaaaattcaaaaaacaaaaatgttaccaaagtctaagtcgaaaaactttttataataatatttgtttagattacttaactccattaaaattaactaattaattaaactaacaagaaagattagaatttccaagaaatgtctactattatattagtatacgatcgattcttgtagcgtaaataaatcctaaaactaataaaagattattcttttctagaaaaataaagtacgaaatttactactaaaaagttcatcaacacagcactctgctagctttgctgtctcccattctcatttatgccccgcgactttggagctgagaaactcaaaagagttggggagtcaagaatgttaggaaccttcccctcggatcgcgtcagtccacgtggcacaccataaacgactgttcttgctgacgtcatcgctttccgcacccacgaaaaccgaacttataaatgctgaaatgtcaatgtgggccccaactcacctagtgtcttcacccccacgacactttcacacaccattcttttctctctcttatctctctctgtatcatatttataagccttcttcttttcttatttctttccttaatttgctctctatgcccacgcccccacccaggcgtacgttagcctccaccaccacttcttcagccgccaaaaccccacaagtctacaacttctgctcacactatgacaaatccaagtttatggttctctaaacgagagattgatgctctcattttcctctgtcttctattgccggcggcgttaccctacgctggagctcagccgccgagtaataatgaaaacgatccgtatgcgtataaccggttcagcccgtcgatggcgatcatcatcgtcgtcctcatagcagcgctattctttatgggattcttctcgatctacattcgtcactgctctgatgcccaagcagcagctgatagcgccgccgccggagctggggccgggaggtcaagaagggctgctcgtggaatcgatgcggcggtacttgagactttcccgactctggagtattcggcggtgaaggggctgaagattggaaaaggcgcgctagagtgcgccgtgtgtttgtgtgagtttgaagacgatgaaacgctgcgtttaatccccaagtgcgatcatgttttccaccccgaatgtattgacgcgtggctagagtcacacaccacttgccccgtttgccgggccaatctcgtacccggacccgacgagtccttgcaccgacccgagttccccacgcaggctgcagacatcgaagctcaaaacgacgccgctgcagttgaaccagcagcggaagaaagaacccatgaggaacaacttccgtcatctgtgtcggctaccgaaccatatgttttggatatgaacaagactttgaatcggaaccgtacacgtggatcacgatcaagcaggataagcagattttttccgcgttctcactcgaccggacactcgttgatccaaccgggcgagaacactgagcggttcactctgaggttaccggccgaagtgagaaaggagataatccaccgtcaattggaacgggccactagcctattggtgttgcctagagaaaatagttcgaggcgtgggtaccgaggcggtggtgaagggagtagcagaggtggccggttcggtaagagggtggaccggttgactaagtcagaccgctggaatttctcgaggagttttttcaatagaatgtcttcgatgaaatctccaaaggtagctgcaaacgatggtgaaggaacctcgtcggaacgaattatcgggccggatgtgccacggagtaactcagtccggccgccggtttaattttaccggttgtttcatacattaaatcatttttcgaagaccaaccctcctttttttttgtgtacaatgtcaatagctttttttttaatttgtttctttgtttttttctcattttttaaatcaatgctaggcttcacaaggccagtgtatatgtaacatgactaatattcagtatttacagatacagttcgccaaaaaaaataaaaaaaaaattctaataatgcttgactatggctattttattttatataatatgatctttctctgatggctgagtgttgaaccaatcttcacccgttaacaaattaatattaggatattatatcgtattaattcaatgaaaaaatacaggctgtgggcgaagatatatactaagaaagaaattatatgttattatgtttgtattatctaatggccgtttttgaccaatggctttgtattataatggatttgcaaagtttaaacttttccttttcgccgtgttaactgagaatggacctattctctgattgcataggaagaatgaatattattttatttgagtgtccactttgaaacaaggaagcaatatcgacattaaaaacaatttgggtcaaaattcacgatttagtgtatttagtcctttcactccatcattattatagtcttctagaattattggtttgtcaaagtaaaatattaatacttttaaacacctatacaaaaattatagccgactctgacttataattgtgccatgtttttacctatattacttccccaacaacacttaattttttatgacttgagttttgcatgtggtcctcacctaactacagtttgatatagttctagactatagtatataatactggctcataaatatatgtgcatatagttattattgatgcttagtttgtagtggcgtaaaggtaaggactctttgtatagttaactctagttttttcatgcactaataaccttatgttccaccacgaatatatgcaagattatagtgcttctctacttttgaattggcataataaaagaaactttcactcaatatatgaaaaataatgtaatctgtcaagtcgccaatattgattccaacaaacgagttttttttttttttttgattgaatatatatggctaattaatgatggaatgttcgtctttatctcattcataatttttttctttttttcaagctgtgtgacctttttaaattcaaatacaaatttattgctttcagcaaaaaaaaaaaaaaaaaaaaacaaaatttattgtctgtatatcactttagaggatagcatattttgctgccacgcaaagttatggttccagctatagctttctttgtttgactaaatagaaataattatatttatacaaatctaataaaaataaaagcatacatgaatgtatatacaatttcaggggttggcaaattattatagtacactttctcccgttttccgctcaaaatccctttgttacaaaataaataaataaataaannaataaataaaataaaataaaatttttacggtgttaacaattttttgttttttaaaaaagtgaaaatattttttaaaatcatattttataaaactgtttactttttaattttttaattaaaaatctaaattttaaaaataagaaaaaatccattttaatttttttttaaatagcttttttaattaatattttggactctgaccttaacttaaaccttcgaaactaaacctagattcgatcctaatattgaacccgccccagtcccgacctcagaactggtctcggacctgacttgaataaaatcaacaaataaaaatgaaaataaatttacagaacacacttttgtttttttatttttaaaattaaaaaataaaaatagttataagacactcttttatttttt

SEQ ID NO: 68334 - DNA, 942 bp, Cannabis sativa
gatagcaaacttttacaaacagataacagttgaaacaaatctggaatatctaaattttaagaacagtttttcaattttagtgctcatttttaaattcctcattacttctaaaataattaatgaaacataaagcctaacaaaagaaaaaagaaaactaatagcacataaagactttatgtatataaaaggatctgaagatcataattgagcccttcacattttcaatttatgacaacattctatggtcatttaaatatttatagagaaataactttgaatgcaatgaaaatcatagggaataagatgtcctcctttcccagaaagaatgtctacgtcaaaataaaggtcgtagaaaggaatatttatgccgaccacaccttaactttacttcctgaatatattaggacagcagaaaaactaaaaaataaataaaaatgtaaatgcaaggaaatagaagatactcaaaaataccttaagtctctgtttactatctttatcccagaaattaaaggcaccatcagagcctgctgttgcaaatgtgtgatgcacctgaaaaataaaggcaaggaatgtgatcataagaaacatcaatgaactgaagacaccacaagaatttagcctgacaatctgatcacatatcctacatccaatttgattttatttatctcaagcagaatgtcaatacaaaatataactgaaaataatgaacactggtaaaaaaaaaatccaaaaataagaaagccgtccaattaagttgttctactaccaaccactaatggaacaaggactagtgatataatgcttcaaggtttagaagggtttagtattatgaagcaaaatcaaaaccaacataagactcaaagtaaatgttgattcaaagtagaattatgaaccaagattctaggatctcaaaggtacttcagtatccctagttccctaatc

SEQ ID NO: 68335 - DNA, 965 bp, Cannabis sativa
tctctctaggatttgttcaccagcaggattgaaatttccatcgttcctcccagatggtggttttttaatcgtgttggttctgtgcgatcctaaaggttctttccaaggtgatgggtagtttcctctggatggcttatgtcatgtgggaagttattcgccataggtacaaatttgtaattgaatttataatgagggtttttttttttttgagtttttatcactaagctctcaaggaaagcaccaaattattaacgtagatttttgttaatcaaatgtatagccttttacgtaataaatatactgcataatttaataataatgcaagatattttatgtagttttgtagttaaaatctacatactcaacgagtcctacttatttgggatatctatttggatacagagtaaaattctcaataaatgtaaataatagttttttctctcaatttttctgtcccttttttcctggattctgcccctatttataggtgtacagaatgacaattatttttattaggatctatttatttacaatcgctcatgaaatgtggacatatttcacatttcatttttatgcacatgggataatatctaataactacctaactaatatttgtctttatccttaaacggttatgctaactaagaggattatttctcgctaaatgtgagttgtccttcttatctgtctttataggaaaaaatgctaagtataaatatgcttcccctcacagtgttcttcatatcgtaaagatatttgcgaggtggttaccctatcacgtaaaaggcgagatggaggaatgtagttaattcctccgtacaccaatatgtgggtcaatgagttgcaagcttttatcccaaatatgtgggtcaataagctggaagctcccttgtgcgctcttattatatactctatttatctcgagatggacgtattgtcttgtcaattatatctgttaatagtta

SEQ ID NO: 68336 - DNA, 1977 bp, Cannabis sativa
aaattaaaatttatagatttgatattaaattgtaccatgtttttttttttctattttctaagggtgcgtttggttaaactacttttaataaattttttgtttttttaatcagaaaagtaaaaatattttctaaaaccatattttataaaattgtttttacttttaattttttaattgagaatcaaacttttaaacattttgaaaacaacaaaatgtcacactcaaaattttttaaacattttttttttcttaatcaatattttggactaccctaacatagatcttgagacccagacctgaatctggacctggaccccaccctagatccaaacccgaacccagacctagacctaacctgaactcaaaccccgactgcaaacctggaccccgaccacgaactcgaacctcgaaccctgtccttggccctagtcccatatatggttaccaagactatgacctaaatccgaacccagtcccaggcccagacctaaaccctggcctgcagccccaaacttgagttaaattaaattaacaaataaaatttaaagaatacatttttattttttatttttaaaatttaaaaacaaaagtaggtacagaatatttttttatttttaaaaataaaattttaaaaataaaaatttaatttctatttttttaaaaaaaaattaaaacaaactaattaccaaaaatcacctaaatttttattgtgttagacttttgatttaaatcctgtaagcctaactaccaaaatgtgacaaagaaatgtaatcacattacaaatatgtgcgttgaccaattagtctttactctcactttctgaattctgatctagtcaaggttgttgacttttattagtcctaagagtacaaaatttaagcattgatatttttcaaaaaaaaaaaataataaataaataaattaaggatggatagggatagaatttggatccaattttatgatttcaaaaactacaacccacaaagaatgtgattggttattaatttcaaatactcaacatgaatactaattctaacttcacactacaaattaaaaacatcaaatcatgtttttttttcctatccaattctctgatattttttctcttcttatttcttcatttttctttttaccatgcccagtcatacaccatttttttaacaatttatttttattatcatcatttccttcacattttttttttatttttcagcatttttgacataaatattcatagtgtttttaaattaaattaattattctttgaaactcatatataattattaatttttttaatttaattattgtagacaacttataattttcctttggagattttatgaaaccatgttatggttttgatgtctttaaaagttttggtgtcagtaactatgttttgcccctaataaatttgtttaccataattttatgatatagtttagccatggccaaaagtgttacatttataacttccaccttaataatttctgagtagataagtatttaaaattttttatgtttcattataatttaattattttactattatttatatattttattttattatttatttaaccattaaatgcatgataaaataattttttaatattattttgtagattagttttgtggaagacctatcaatactaagactttgtcaatatttaattttaattttaatatattagagagttgttttcttctaaatattgagaatatttttttttatcaatttattaatattattattagtttgctaatttatctctcattatcttatattattttgtagataatttatggatatgtctcttgcaattagtgtgctagttgattttcttataactacaattttgcagtgttacaaacgaagctctaattcttttggggcttgtttggaatgtcgtattaagtcgtattgtattgtattatattgaattgtattttatccaatatttttatgtaaaactatat

SEQ ID NO: 68337 - DNA, 848 bp, Cannabis sativa
aagttaagcggtcattacaattatcttcccgttactaggatttcgtccttgaaatctaacctaaactacttctgtccctccagggttccttgaccaatgctatggtcttattccgaagaactttgtccttcctatcaaggatctggaccgattactcctcataagataaatctggttggagctctagtgtttcatagtttaggacatgtgtaggatccaaaacgtattttcaaaacataaaaatatgaaatacgttatgcactgttgataatgttggaggcaaggctagatgatacgctaccaatctaatcttcttgagaatctcaaaaggcccattgaatctagggcacaacttgccctttttcccaaaacgttgaacccctttcattggggatacccataggaagacatgatctcctacctaaaattctatatttctgtgtttcaaatctgcataacttttctgcctactttgagaagcaaatattctggccttgatttttttatcgcctcattggtccgttgaactgattctggacctacgtattttctttctctagtttcattccaatgaattggtgatctacatttttttaccatacaacatcacataaagagctatccctattgtactctgatatcattattgtatgaaaactctatcaatcgcagatactttctcgaggagccttcaaaatccatcacaaaagcttgtgatatatcctccaatatctaaattgtcctctttgacagaccatctgtctgaggatggaaagttgtactgaacttcagctttgtacccatggctcgttgaagacttctccaaaacttgtaagtaaacttcaaat

SEQ ID NO: 68338 - DNA, 805 bp, Cannabis sativa
tgaggtaactgagaatcaaaatgacatttctcttatgtctctatttggttattgtgaacctctaagctaccaaaaagtagttagaagcaagaaatagagagatacaatggatgaaaaaatcaattcaattacaaaaaacaacacatgagaattgggagccaactactcttccacaaggatacaagccacttggagtaaagtgggtgcacaaggaaaagaagaatgcaaaaggtgagctggagagatatatagtaagattggtggtaaaaggatatagtcaaagggaaggcgtcaactatgatgaggtatttgctccagtttcttgtcctaaaactgttagactgataatttctttagtagcgtaaaatatatggaagatccaccaaatagatgtaaagtctgctttcttaaatggtttctctgaggaagaagtctacatcgagcaaccatcaggctataaagtaaaagggcatgaaggaaaagtttttaattgaagaaggcttaaatggcctaaagcaagcgccgagacttggaatgctcaaattgacatgcacttccaagaaaagaatttcaccaattgtccatatgagcatgcactctatatcaaaattaagaatgaagcactactacaatttagcattttagaaaagtacgggtcactaaagagttgggagtgatttttagtgacatgcacaattagactctaaaaattcgatgttagtcccatataatatgggtcactaaaaatatggggtgtcactaaagagtaaaatcaaaaaaattttaacttttattaatgtaaaaa

SEQ ID NO: 68339 - DNA, 764 bp, Cannabis sativa
attaataattgtgatttaattacacataattatgtaaaatacaaaaataattgtataatatttttaatactatatttttatatctatattaacagtgacatttttttaaaatgtcactagttcttttttaaaataaatagcattactattttaataatttaaaatagttttattgacacttgaaagtgtcaccaatgcaaaatatatatatagtgacatttgtactttactcacaatggtaacatttatagatgttacctatttaatattttggtgtagtgtttaacacatgagattaaagaaaaaaatcttaaatttaaaatattaatttttatctttctaaatgctaataaaattgtcaatgcgtattgaatatattttattttttagcgattttattatgagattataagaattaagttggattaaactaatgtttcttacgtatgttggattaaaattttaaagaatatggatcaattagttaattaattatgtataaacaaaacaaataaacctatttcagctagatctccctgtagagagtgatatgtccctccctgtagagtgattttgtgctttatttgctgagacgtttggtttttggtattctgagttttgtgatggcctcctctagtaaagaagaccattctttgacaaaaagatgggcagagatatgtttagaagatgaggaagaacatgaagtctccctggccgatgattgcgaagaggaagaagacttgaattttgatgacagatggtgc

SEQ ID NO: 68340 - DNA, 1092 bp, Cannabis sativa
  modified_base (881)..(884): a, c, t, g, unknown or other
tgtattccgtggtacattagatgggtctcagggtacattaaatgattgttagatcgatctcaaccgtcagatcaaataacttcatcatctgacggctgtcgtacatcacggattacaatccgtgaaagtacaataacaggataaaatcatatccctatatatataatatagaatttttttttttataatttaccttattaattcatgctttttatttattttggcatttaaaaaaataaaattttaacaaattttagaaaatttaatactaaaaataaagtttaaaaattttaactaaaataacagataattataaaaagaaattagaatgaaaataaaaaatgtatttataaacctcttttaagagatacttttgtacaaacatcttataatatgtacatagcttttttttttttttttttctgtgggacggctatcgatatatattgatacttgctaagaagctcaatatatttatacacatagcttttcatattctttttaattaaattatatatttacgtacaaaaagaatatatacataggtagttaaattaataattaaatgatttacatttttcttataatctataatgagtttttggtcacgcgtaaagcaaagttcaagaaaagtgaaatcatgagaatatatcactggctttcgaagaacttcataaataaatatatttaattatatatatgtaatgctataagtacataaattaatcattaataattatatatatatattattatttttttggaagtggaatatcttagtttgccaacttcacacattaaaaagcagaaagttaactcgatcatcgatcaatggcggtggctttttataccataaatattattattatatataataatannnntaataataataataattaaatagttaaatataacatattataggctttgggtttgaaattgtaaacaatatataatgcaataatattagggcatagaaaagtgtatagtcttattggaaaaagtataaatatatatatatatagtattatcgtcggtggagagcatatgttatatgttcaaacgatatttatttataatcattatata

SEQ ID NO: 68341 - DNA, 703 bp, Cannabis sativa
aacaaccttagttctttcatatatattttcaaaacactattcaaatagttttgtatattttcaaattttaatatatttattgtgctttggtggtatttaattattttaataattaaaaaagtaatttatttatttattttccaacgtttatttgtttattttttaattgtatatgattatgcttagaaatttctttgagattcggaatctattgagtaattcatctgtcaaagtatttgagaatacagatatgatgaatttataataaaataatttacttatttgtaagagttgagtagttaactaattgacttagtttttttatgtccagagcaaacttattagtaaggttagttgcaattaaaagtggacttggcgactataattgagatacgataatgacaacgaatttaaatattgtagtgaatatatacaattaaagtacggtgatgataacagttttgaaatcatgtcataagttttctctagatttatcaatagtatttttttcaggactttattttgtggatattaatttattttcttaaaaaatattgtaaaatcgttaattttattaataaaaagttatatcaaaaatattaaaatatcaaaatttaaaatttaatatacctttataacataattatcactaaacaaccgcatgcgaagcgcagtttgtttcctattggaatttattttacca

SEQ ID NO: 68342 - DNA, 1197 bp, Cannabis sativa
tttaatatattaaattaggcagatccaagcaaaataaaaagaaatatattaagttagcacctcacatacacaattgagcagtttcaaaaaaaaaatatatatacaattgagtgttatgtttttttttcctgagaaaaaacggtttcattaaataaatccaataaaagaaatttggagaagaaaaaaaaacgtcaaacaataacattaatcataaaagtctcctcgcaaagaagaaacaatataatcatggtaaaactaactttgccaaagtgtactattagtaatcctaagacagtacataaaataaatattactaaaatatttacaataaataagaatatctttaataatacaacttaaataagattggtttaataacagtgaaacaattagactccaaaatcaccctttgatagaagataacaaattattaggaccccaaagtagataccgaacacctcaacaacattgtactttgcaaattatatcaaattaataccataagctcaaaaatgtcaaatttctttttaataaattaatactaacttaatttttcaagaattactatgtaagtcaaacttaatattaagttataattaaaaaattatttgattaaaattaagtccaaaatattgattaaatttatttgcaaaatacaaatatacattatcatctaattcagagaataatcgcatattaatcacacaaaaaaaagtattatatgtactattaataaaatttcttcaatgctagtaaacaatctaaataagcggtatgatattaaaatctcgtgtgagttatacaattttattaattatatcactaatattagatatacatttacttgtattttcctgctatgtaacatttttttgtggcattcctactatgtaacattacaaccaaatggtccaaactccaaatcactgtgataaaaagcattttgagttttatattttcatttaaaattcgaacatttaaaattgatctcgatgacatgtcattcaatctaattgaggtcactttttcttttcttaactttaagtaaatagagggaactgtacggaatctcatgtgtacctttaatactaacacgtaaggtgcaaaactggtcagtcttctaaatatcactttattataacttattacgaacatagatatatttttttttttcataacattatacatttttctttt

SEQ ID NO: 68343 - DNA, 937 bp, Cannabis sativa
gctcaacatacctaaacataacctaatttcatccatgaatttgtcaacctaaaacccattcaagaacatcatgcaaactttaaaatttaagagatgaaatcaaaaattaacagtgataatgaacaatttcactacctcaaatgcttttaccaagccttaaacactagaacctcaaaaactagcttcaatccttcctcaaagatcaaagtttgcaaatattttaagggagaaagagaaggaggtcggtgggaacttcaagaagcaaaaaaatggatttttgattctaattttcaaaaatagcaaataaatctgaatttacgtattttagttaaaatgacaattttggccctagggccaaaaatcaacatatttaaccatcatgtccaatttagtcatttacaatcacacatattctcatataatcatatatattttatgttatttccataaaaacacaattcataaattgtggaccctgaactcggttcgtgccaaaataattgattgtgacttcctcaatatcttgtcaaaacttacctataaaataacaaagagaacatactatataataatgtagtccataagcatcctatataataaaaattaccattttaaccttattgagtcaaaattacaaaaattcccctatctcataaatggggtcttaaattcaaatattctcatataacacaacataattgattatataataacattatcccacaattattcttaattacggtagttagggttgctaatccatttctaaattttaggatattataattatcccttccttatagaaattttacctgaccaactcaggatatttctcatgtcagattctaactcccaggtcgcttcttcgaccttgcagtttctccatagcactttcactactattagtgtcttgcttctcaagactttctctcttcta

SEQ ID NO: 68344 - DNA, 1047 bp, Cannabis sativa
tttactatatatatataaaaaaaacttcctttttgctttgtgtagacgtaagatgaccataaaaatgtgggtgtatacttttacataatgaaggaggtttttctatttgttaaactcaaggttagaaaaaagtactaggtaagaatctctcatgaaaatttatctctattccaataaattttgaattacgtctaaatttttgtatatatatgtattagatataagcttcaatgaatcataagattcgactcaatcttgggagatataaatgtgttgaatgctatatataaatatatactcatatattttcaaaagtttatgaatcaatatacatacatataggttggagaaatctgtttagggtttattttttattatgagcatttagacattttttttctttattttgtttgagtgatatttttatgggcctgtttgtgggcctagttattttcttaaaaaaatatatttgatttcgataaatttgtagtctttttttttagttgagtgctagaaaaagttgactgtaggttatattttattgatgttatctttataaaattgaatgttagttgactgtagatgttacttgttgaaaattgactgtagatgttgctactttataggattgagaattgatcgtaagtattttttgcttgtgagaaagagaattgaccgtagatgtattttacttgtgcaagtgagaattaatcgtagatgttttctctatttttgctatgaaaattgactgtgggttttctcttacttgaacaaattgactaaggatttttttttactctcacttgtaaattgattgttggattccacttatgtttttgaattgattatatccatgcatgatagttatccatagaggttgattggtctttatcttttgttaatttatttaggttggctggagcaaaatatgcccaagtccaagtattgagttgtcgcttgtagtccatgtagagttttgagttgaagggtttagacttttatatgtagtagggttctcatgctatggaaaacatggatagttcagta

SEQ ID NO: 68345 - DNA, 1966 bp, Cannabis sativa
tgctcctaaacaaagcaacactaagaataaagggcacaacaagaacaaaaataaaaaaaaggaaaaaaaaaaggaaaagggtctagtcagcaaggtggtgctagtggtagtctgttcaaccagcatccacgccctcaaactcagccacagtggccacaatgacagccaaattggggtgggtggaccattcctccttgtcctttcccttcttattcttggcagccacgacccaattacatgaccaaaaaatcttctgctgggcctggtgtgcttgggccctaacctcaagccttcaatgttatgactccatctactcctagttacacaccaactgatattgaggccgctatgcattccctatctttctctcaagccgatggaaactactacatggatatcagtgccacatctcacatgacggcggatgcaggtattctctcgtcttatttcaattaaagcaataaaaatcataacattgttgttggtaatggtcatttaattccagttgtcggtcacggtaggactaatttaccccaaccttatcctccttttgttcttcaaagtgtgttacatgctcccaaactcattaaaaatctgatctctgttcgtaaatttaccactgacaatatggtttctatttcttttgacccttttagtttttcgatcaatgatttacagatggggaccagactaatgagatgtgacagtgttggggacttatatcctctcttctcaaattctcaagccacatcaccctcactttcaacttttactactacatctcatgatatttggcataatcgtttaggtcatcctggcaataatattattaattctcttcgtagtaataaatttattgaatgtaataaggcttgtaaaactttttgctcatcttgtcctcttggaatacatgctaaacttcatttttatgattctttatcatacacttttctcccatttgatattattcatagtgatctttggacttctcgagttgctagctcttctgggcaccgttattatgttctttttcttgatgactatagcaaatttctttgaaattttcatattgccaagaaatcaggtaaaataattatttatatttttccacgctttagtcaaaactcaatttaaacgtaatataaagtcttttcaatgtgacaatggcaaggaatatattaatagcactatggagcagttttttgatcgtcatggattagtctttcgtctttcttgtcgacacacaacgtcccaaaatggtaaaactgaaagacacataaaatctatcaataatttcggaccattctagctcatgcttcaatgccaccgttcttttggcatcatgctctatctatggcgacatatcttctaaatattcttccttcaaaggtcttagattatttttcacccacacaaatcctttatcaaagtgacccttactcggatttacatgttttgattatttatgttttccattgtttctctccactactattaacaaattacaggaacgatcttccccttgtgcctatcttggtccggctccaaactatcgtggctcaaaatgctatgaaatgtctagtggcaagataataatttgtcaacatgtgcattttgttgaaaccaaatttccttttttgacactacacaaaaccactcctacaaattatgatttttcgagtgataatattgatccatcgatcatgaatgttatttctcaaaatctagcaccactaaatccacaacctaacccaacccaacaacccaactctccacctattcttcataatgggccgcagtctcatacggccaaaccatacccaattctcatgctgctcagtctttgcccactcctcgtgtagcccagacgctgcagcagccccctccaaattcttctcctttcttggccccgcccacctctcttggcccatcacttggctcaaattcgtcactgcatccatgtcta

SEQ ID NO: 68346 - DNA, 2678 bp, Cannabis sativa
ataagtgatgaaaatacttctgtctctttattgataattgaatgataaagattacattgaaatagagttttaattagggcacaaagcccaacagataccgctgcgcatattccttcaattgcctagatgcataagaaataacttttccagactgcataagaacacaacctaacccatgtttggaagtgttacaataaatcacaaacttttcattactaactagaaaagttaacaccagtgcagtaattagcctctgctttattttctggaagctactctcgcacttgtcagtcgaaacaaacttacagttcttttgggtcaattccgttaagggcgtagaagtcttagcaaacccctcaacaaatcttctgtagtatcctgctaatcccaagaaacttctaacctcggtggcagacttgggtcgaggccaatcccaaactgcttcaatcttccacgggtccaccaagataccgtctttattcaccacatgccctaactttagggtaggtttggagtgtgaaatctcaatttttttaactttgctcagaaatggttaatcgtttacttagttatccagaatccccagttattcgattacctgtttggggatccagtttaaccatttggggttttttttgggcttaaattttcgtatttttttttttcgatatttagggtattgccacactatttatcgataaggaaacttttgattttgagtttaagtcttagaatagattttaacaagttatttaccggtttactgctgttgtgacataggatctcagatcatcgggtattttctactcaagttggctggtacacttgaatttagacttgaggtaagaaaagtacaatggtaccacatagcatgtcaaaatgtgatacgataattattgtttataagaaagagttattactctgattttaaatttttgttaggtttcttatatatcaattatcttattagacaacgatattggataaggttgtttgattggacaacaatactagtgtttgttgtctcattaggcaacaatattagagttggttgtcttattagacaacgaaagataatagttattttataaagtaacaattttagtttgtcttattagacaaataattaatattagtgactgattgcattgtgttatcatgagattttcctggaattaagcatgtaaatacttgattatgtttaaatgtgatatctgattatatttgtatattgttatgaataataatatttgtgttattacttttcttgttgagtttttgtgactcatgagtactttgtggtacaggtaaagggcaagctaggtcaaccatgaattagaaattttctccgataaatgtacatattgactcatccagcttgtagtgcagagttgtcgagattctattttatggactttttgacttatatgtatatttcgaggtaatattgtaatggcattcttttgtaaaactttaaaggggattcctaaccttaaaagtttataatgccaagaatttaatattttcaataattagtaaagtttttaattaactcgcatatttatttaagccgttagtttattatcacaaactagtttataaaaatacacacgtgatgtccttatggataggacgttacaacatgtgttctatgtgtcgccctttgtgggtttatataaacatttacggttcatattacattttagagaatacaatataatttcttctccttattatatctgacatatgtatatatactaagtaaaaacaatgtaaatgcacatattttttgaaatttatttagaaaatttttattttatctttattatatattttcaatcgagatgtatgaattctccatggtgattgagctcaacatctgcaaccagatattgtttcatgtacaagttattaatggctaattataataagctcctcagtactattcaaaatgcaaatctagagctagtccatgtgaatatatcaatttataattagttgaatactttgtgagaaggatcgaaaaataaaattttaatgtgtgtgaaaggtagctgtaaacagaatcaaataatattactagatatatctaggaacctgttcatgattaaaggtttaaataatttgcttgttgacttatattataaatttataatatatttatggacaaaaccaagaaatttttaaatgcaaattaaatgctgcagcagtcaaaactatatattctatatatttacactatgaatgaataaacgtgaaaaaaaaaatatataaaatggattataaagttctcattgaactagaattcctcttaattaatttggatattattttatatatcataaaaactagttacttaattactctgccctcttgttggttgataatacatacacatatatatatatatatattatatatataaatatgtcaaagatgtggctttgggaagaacacagttttggaaacatttaattaagtcaattaatatattttttaacagatcagattttgatggacattgaaaaaggacaagtgcttaattagatgcgagtaatccaagcaatctaacctagctagatgtgatgatgatgcaacgaaattaattccattaacaaaaactacattgattatattataccttaatttatttattagaccaatctaatatttttttt

SEQ ID NO: 68347 - DNA, 1074 bp, Cannabis sativa
  modified_base (80)..(81): a, c, t, g, unknown or other
ggttgacatatgatgtcaacctgaatgctggataagtgtaaaaacttccaaggggtgtactttaagatgcctaagtgatnntttgacatcacttagtttgtttctatgttctagcaaagttggtcatcaattctcagagatgttgctattctacagaaatgagagactcgaaacttttcatttccaagagagtttcccatgttggaaatgagaaatgagaagttgtgaatttgacttctctgacttcatggtcttagctattgtgaaaaactagatgggcagtcgaaatggaattagaattggataagcagaacccagcgcaacaggtcatttgtcaacctgtgtgatgggtaccctattcacgagctcccgggatctcatttttatacttctaagattgttgaacttgaggacgaggtctcctttcccatttttgaccattttggattcattggtcgaattagattttgcatttgagtaattgaaagcaccgcgcgccccagattgattgtcaacctgggtattgggcccagcactaggttaacctgggtgctagccctatttccaagagcttgggtttatgattttctccccaagttttcttgaatattcattatttctaattacaaaaaaaaatccagaacacattttcatgaacttgattggagacagcccaggttgacaatatgtcaacctacgcactgggcctagtgccaggtgtcaacctgggcgctaggtccaagttatggcccttcaaaaaaaattagtctctaaaaatagttgaatctcaatcttttctgaaagtagagaagattctcggaagagttctcagaaaacatcaatgaaatcagcccaggttgacaaaatgtcaacttgggtgttgggccagccccggctgggccttatttctaacacccaagaattgatgtttcttccccaaaaagacctatttccccatttttgatgaagatgaagaaaaagaaaaaagtcagattgtcaatctgatacctggaaggtgcccaaagtgacaaattgttaacctgggtgctagggtgcccaaggccctgggtgctc

SEQ ID NO: 68348 - DNA, 936 bp, Cannabis sativa
tattgtcaatgcctgaggtattgaggccaatctagagaaaattcaagccctcctggatatgaaatcgcctacaaaaaccaaagaaatccaaagcttaactggtcggataactgcactcagtagatttgctttaaggccaacagacaagtgtgatcctttcttcaacatatgcgaggaagaaatttgaatggacaaaggaatatgagaagaccttttaagagataacaatgaaggatgatatccgctgattgaaaaggttacttactgcctaatcttagcaacaaggaagctgaggccttactttcaagctcatcctgttcgggtatacactgactaaccattacgccaaatattacaaaaactcgacgcttctagatggttactcaaatgggcagtggaattgggtaagtatgaaataatctttcaaccccgaacaacaatcaaaggacaggttttagcggattttgtagtttagtgtaagggcaaagaagaaagcatttcagaaggcaacccgaggtcagtacaagaacctcagtcgatcaacaatgaagacaaacctacttagaaattacacgtagatgggtcggctacagatccactgtctggcatatggattgcccttgtcacactcgaggggcaacacctgcatgatgcggtcaaatttgggttcagagcctccaataatgaagcagagtacgaagccctcattgccagtctaaaacttgcttgggaactatatgctgaacacattgagatctgtagtgactcgtagttggtagtaaatcatgtgtttggagagtacgaggctcgggggaaaaatgatagcctatctaagcgaaatacatgactgataacttttgagtaaagagttatttgatatcactttaaacatgtttttttttatgtaattgtgtgtcattgtaattattttgtctt

SEQ ID NO: 68349 - DNA, 658 bp, Cannabis sativa
tttgtcatttaacaaaacagagtgtccaatcggtaacttttacaaaatacaaggtctaaaatagtatttaccagggtctaaaatagtatctaaaatagtatttaccctattttatattatgtgtttgtatttttatagtatattagtatcatttttataattttttaagttatattttgtataataattagtatattgaataataaataatgtgtaactttttataattttaacgttgggtattgaattgagatgagttcgagtatgtgctggggtgtagaaagggaggtgagtgaagagcacttagtaacttttgaatgtcataacaaaaaatatttcttaattaattttgtaatgtgatcacttatttttatataatataatttttcatgaccaataaaatgaaataataatttaaacacccaaataatggaaaaatcagagaaggctaaactttgtgtgaaattttttggaaactttgaacatttatttataacttttgattcggttgtccgtttgaggcgatttttttttaacttgggtttttttcgcgttttactcatcctaaacagcctacggcgttcggccaattattttgtccaaaaaatactattttgttcaaaaaatattattccgtatactaaaatcatgttatgta

SEQ ID NO: 68350 - DNA, 641 bp, Cannabis sativa
tttaatagagaaataaccaattgatatcttattcacattaaaagtaactaaaaggttactttttcaaaagtcccaaaaagcaaaaaattttggaaacgagatttttcaattttttttcatttttcgataatttattggaatttagtatacatgctgacttagcacaaccgtatttgtgcaaataattttcttaaaaatatttttgtaaataaaattatttttaagtataatatcaaaatttttaagtatacacatttctaaaatttgagggaggcaatttgccccacctgactctaaggtggcttcctctccatgcgttgacgtatcaaaatagattaaactaagtgcttcattaactgacaaaagaaattgtggttataacttatgatagctagctagctagcttgattaaattaaagaagaatagacattctcaaatagctaggctattaatgtttcaaagctatatagcctagctagtgatttatgaatctgatgattgaataattttaaactaattaaaattgaagtgctctcataacttcctaaatctgaccttagatctaatagtggtctgtcgtagtgaatcactataatataatatatgatttatataaaaacgtttaatgtaagtaacaaaa

SEQ ID NO: 68351 - DNA, 2434 bp, Cannabis sativa
  modified_base (701)..(703): a, c, t, g, unknown or other
aatttatattcttaagttatatgacactcgataattaattacaccaacaatagtaggacaccgaaaaaaatacttgacactaataatacctttaacaattctcgctgtataaataataagtttcttaatttaattcttgattaaatttaaatgcttgaaagttattttagtattttaaagaagcccttttgagattcaataaagtcgttcattccaaggatttcgaagagccgatccatgtggcagatgtatgttggtcgacaagtctgactatagacctgccgactaacctgcatttaccacgtggatcggagtagtcgggatcctcggaatgaatagcaaggttcttttggaattaggatctttgttccttatctgagtttgaacaaactgatcctctcaaattgtgtttactatcagtatcagtgtattctgcatagtatgccacataggtcactccaagtgagcctctctctgactgagatagttacacgtgtcctactccaaatatatggacaacagttcacatgaaaaaatctaaaagattatggttcactttgttaatttggtgtttaattcagatgaaatcacacataattatttcccaaataaatgttaaggtacaaagtgattttccaatttttcaagtaaaagtagttaaatagattagaatgtcaagtatttctcaaaaaaaaaaaaannnaagaaaaaaaaagagaaaaaaaaacaaacaaacaaaaaagaaaatgatgatgaagaagaagaatgtcaaagtatgcctaatacctcaaaaagctgtcttttgttcagaatttttaagaaatgttgtattgtatagtcatgatcaattatttacttaattatttaaatgaaaaaaaaaataaatccattttactaagcaaccacaacaaaacaaagtgcgtcctacttgtatttgtacttaaatgccacgtacggaataaaaatgataggattccgttgttacatcgtattatattatatattattatattgaattatattttatgtaatattatttttatgtaaaattatatgtgatattaatttttatgaacacctaaatatataatattttagtataaattaaaatttaacatagtcttatgtaaaaatataatgtataatttaattcaatataatacaatataatacgacttaatacgaatatgatgttccaaacgagttcatattattaattattgcaaacaaataaaataataattctgccaaattcagtatacattgttttgtggtcgatatatcaaaaagtgttggggtttttcttttttacactttaaattaatttttttttaaaattttatttttacaaaaattcacatagcaacttatatagcaattaacggagcaatttaaatcgcaattcaaatttatatagcaacctatataaaaattatcgaaacaagccaaaactgtaaaaatgaaaaaagaaaaaaaataaaaaatagtatatggaataatttctcaaaaaaattgtaggaattcttttatttttacacttcaaaacagtttttcttatatttttatgaaaattcacataacacctgtaattaatgaagggatgttcataaaaaccgaaaaaccgaaacagaccattaaaccaaccaaactgtaatcaaattttcggtttcacgtcatcaccgaatttagcgatcagtttcgattacggtttttttgatatggcaatcaatttcggttttcaaaattttaaaaaaaaaaaaagattaaaccaaaaaacaactaaaaccgctaaaaaccacccaaactgccccaaaccacttaaaattgccaaaaatcgtctaaaaccgccaaacgagaaaactgccaaaaatcatacggtcaattttatacgattaaaatttctaaacggtcggttacgatttttgtaaaataaaaatcgtaactgaccagtcgattataaatttataaaaaaccgaccataactgaccgatcttcactcttagaagcaacctaaatcgcaaccaattaaattgatatatgtagctagacgtggtgtgaccaaaaagattgcatgaaaacacattgacacctttgttaacttgtagtgccatttggcaccaaactttgctctttcaagtttttttaaccactatatatgtgtgtgtaaatcaataagccacattgagttaataattatttaatgaatatggatacaaaaggaagtggtgttacggcctctaacaacaattgtggctgccctacaccctgccctggtggctccgcctgtaggtattttatgtaatacattaatatatattagcgggaaaaattagggtttcttcctcttaaatttatagttattggaggttgtctttatttttcgactaggcatgttggcattcccttggcttaggtgcgatttggttggatttgt

SEQ ID NO: 68352 - DNA, 563 bp, Cannabis sativa
gcctcagcaacaacagggtcaatctcacctcggagcttgattgcagcagcagcaaagcacaacccagcatgatctctagcaatccatcccaagccatgactcctttctccagaaaaaatagcagcatcacaattaaccttcaactctcccaaaaacgatttaatccagtactcaacacttaattttcttttaataacaaataacaaaaataatgtcatacataactaataattcatacaaagaatagctattaaaaaaacccacataataatattattcgacaatattattccgaataaattaaatataaaaatattaagtcatttataaaagaaaaacgttaaaaagcacccataataccacgtaatattactattagtgtaatttaatatcaaatcccatttattttagtattataaaaaaattagtaactaattataaaataataatactttatcgtgctactaaacactatatatgtctcgtagcaattcacttttaaaaaatataaatcactccattcaaatacaaaagcaaagatgttagtgattatgagggaacca

SEQ ID NO: 68353 - DNA, 915 bp, Cannabis sativa
caaggaaccggctaaacctactggtgaggatagacaacctgatgtgagtgacaaagcagggactgatatggcagtagaagaaccacttgcttctgagcaggtgcaaaaagggaaaaaccaggggtcattgaaggtggttggtgctgaagtaaatgaatggattactccaaagaaaaaggggctgaaggttgctacagtagctgagacaagagtaacagggaaaaccaaaaatggctatgcagtcttacaagagactaatgatgagactttggctcctcctatttccattattttttatggaagtttgtaatatgctaggttggaatgtgaggggtatgaataagagagaaaagcaaaaagcaattctcgatgtttgtaggttgaataaagtggggttcggagcttcgtttgaaacaaaggtgaaacatgacaaagttaaggagatggttgaaattaactttcctaattgggagttttattctagccatcctatctcgggtagaattttaattctgtggcaatctaaatttgttcaagtggaaattattcatgaagatactcaactagtccattgcaaaatcaaagtttgtgggcacaaggaaactttcttgtcacggctgtgtatggaagtaattctaaagaggaaaggaagagtttgtgggcgaagctttgtagtattggtcacccgaacttaccttgggttattttaggtgactttaatgctatgttcacttatgaagatagaaatgggggaagacaaatccaagccgaggacattgaagatgctcaaaattagctctccatgggtcaagttgaggaagtcaggtgtactggatcctttttcacttggacaaataagcatgaggttggggaccttattttctctaagcttgatcgggtgtttgttaacaaatt

SEQ ID NO: 68354 - DNA, 696 bp, Cannabis sativa
caagtgcaagccagacagaatgagagcaggaaaaacttgcaatagatgcaagaactccttcggtcatcgatgatcacagccatgatagtaataattgatccttgcgtttccaacggctgtactcaggatttggttctccagtaagtaagtgttgcagaggaggactgccaacaagcaagatctcatccagttcgtgtccgatgatagtagggatcacctgagatttctaagacagaaaattagttctatcaagtttaacagttagaacagaggttaaagaattcgaaaaggggttccagttggaattcagctagtgttgtgtcgtattggcaacagccgatgaggttctgggagctagagcaagatcggaggatgtggactccatgaatgacgttagtcaatggtgagtgataccatgtagtacttcagagtatgaagatcaagaacaaaaaattgaaaagaaagaacagagagagaaatagagtatgtgagaaagagtgaaacccaaaactaatttctttattgaatgaaggtctatttatacaaaagtaagacaacagtaaagaagagtttgttacagaaagaataactaaaaagagttagaaagactaactgaaaaaccagacttaactaactatactaacacattcggaacgaaataaaagaaaaaaatcatcaagatctaagaaagctttt

SEQ ID NO: 68355 - DNA, 616 bp, Cannabis sativa
tcgcctcgccctgccttgcctcacacgcctgtaccttcgcctcgcccctgcccacgccatgccctgtgcccacaccgcgcgcacgccgcgccttgtcgcacttgcgcgtccccacgtgccctctaagccccgtgcactcacgcaccttgcgtgcaccctctgggccatgtgcctgcgccgcgtccctacgcgcctggcttcctgcaccccgtcgatcttctttgcactactgacaccaacaatgtacgtaaggagtatcagacaagataacgacagcacggtgagtaaagataatgggggcaaagttcatttcgtccagggtacaaaatgataagggtatttttagtataacgtagggtgtcaggtacatcagaccacctacaattcaatactatcaggtgtgaaagtgacttgacatcatatggattgggatctagtataattgtaaagtgttaagggttcactataaatagagccattgagttcattgtaaagagaggctttttcttctatgaatagaaatgctttttaggtttctactctagacattctttaattagatttttttttattaagagatagttccaaatcctcattatatcgttgacgagttcta

SEQ ID NO: 68356 - DNA, 752 bp, Cannabis sativa
gattgatcaagaactccatatctacaatttatgaatctaaaaattgatgctaggaggattagttttcttcgattttaattgtaatttagggttgaatttttgtttcgaatcagttttttggcccaattttgcataaatctgaaattttgtgtgtttggatttcttacggtcttcttctcaggtgaagtcgccagaatttatggtaattctccatctggcttgatttctttacggttggcctgctattttggttcctggaagctattgttgttgaagaaggtagttcgagcgactgaatagttagagcaagagatatgtttataaatttttattattgggctatatatatttataaggccaacccaatatatttgtgtaatatttttgttattttagtatatacatgaaaaaagctctaatgtaatagctctattctattttctgtttatgtgacaaaagcagagtcaaagagttgattaggttaagagcaataatattatatttataaagtaacactagggtaagatttaggattaaaatggattaaaaaaagataaaatgacttaataaaaccctcgtggccgaaatcttatatgaggccacatgagttttaattttgtcattttattaaaactcatatttttctcaaaaataccattcttttattctaattattcaaatgctaattttatttatttaataattataattaattatccaataaaatcaccatttaacttatttattaatta

SEQ ID NO: 68357 - DNA, 794 bp, Cannabis sativa
gaggttgactaagaggttataagaagatgttgtaattagcatttctcttcctaaaataggtgtactgatacccatatctgattcaaaatttaaaagagaattttttaactaatttttctctcatggttgtatatgttgtagttgtttaaaatattttataaaattttgagatatttagaaaaatttaacattccgaatatatatagagttcaaataatttatttagaaatgtaacttttgtataagtgtgtgaaatacattgttactttaatttatgttactacatgcaatatggtatattgatttatttttaataatttatagtattattgtgatcatttaattgattggtagtattatttagattattaattagatataataattgtgatgattttagtatattaatataataacaaaaataatattttattttatttaaaaaaatttaagattaaaaaaatactttttagtaaaatttttagtgttgtggttggagctaggggtgttcgcggtgcgggtaatgcgatttttgactatttttttcaatccaacctgcacatacggttttttaaattttccaaaccgcacccgcaccgcgaaattaaaaacccgcaaaaatcgcaccgcaaaaaatagtgcggtgcggtacggtttttgtgatttatgcagtttggactatcattaaataattaaactatcacaaatacaacaaactttgagcgcaaaacttgtcaaattaccataagacttgaaaataaatatgaaaaaaaaaattaagtgtcaacaataca

SEQ ID NO: 68358 - DNA, 615 bp, Cannabis sativa
gtccgtatttttgaaaaaaaaaacttttagatttcctatttttgtttaattttccttaccaagttaaaaatataaaatttgggcctaaaatgcatattaaagaaaaaacctcaataaattaagcgaaggaattaattaattatctaaatgctaacctataaaattctctgagagtagactccttaacattacaatattaaatttcatacaatctctattcgttttcagattcattttcaaatttcaggtaaactgtttctaaggccaagaaagtcatttatttcaacttcttaggcagccaactagcccaacaggaatgactatacatgacaacttccaaccttccaaaactaacaccatacacaaataaaaacaaaattctagattgcctagattaaaatattattaaaaaaaaagtaaaaagaaaataaacaaaacccaacagtcataatatatataataataataatcataatagtaattcatagaaagcttttttcattttatccaattaagggatgaagactactacactcaataaaatataattgattaatgtggaaatgtcgcatagctgtcgattaattagggtagtttattttcatgccactaaga

SEQ ID NO: 68359 - DNA, 1422 bp, Cannabis sativa
atgtaaatcatgataatggctctacgtatggcttgtaccacagaaagataatcggtttccaagatcgtgtgtagccattgattatctttgatccaactcaaagcttcgcggatcccgattgcctcaacaactttaggtgccacctagccatgaaacatccttgtgcatccctccagtaatagaccgcttgctcctctagccacttacctaacaccatagccctaggtctcgttaaacaatgccgcattaatgttaatcttaatgctattatcttttggtgctacctattgccttgccccatcccccagtataaaaccagtaaacaaaatattacctgaactttgagcaagtagccattgattaagatagtttttagctgatgaaacaatgctatccacatccaccactttgtttcgccaaactttatcattccttgcattccaaatagcctagcacaaggccaccagcaacttgatacagtcaatatcaagcataaaaagctgcctaatgcaccattcaataaaagataaaccaggttgcacatttgtactaatgcccacccgatcccaacataattgagcagttggataagtagcaagcgcatgtggaatggtttcctcctataatttacaaaccggggatatatatatatacacaagaataattatatataaatccaaaattatcataaaaaaaaaaagacaacaactcaactttaatatgcaaataaattagacataatatattaagtcaataatctaataaatataaaaataatttaataaattaaaaacacatacaaaatattacttatacaccataaaaactaaacatatattattttaatctttgttgaacaactaacaaacaaatagataacaactccaaattaattaactaataatttaataacaataaaaatttattcacggtgatacgtttcaaaaaaaaaaaaagtacaaattattaatataaactcattacattttatccagtaaaaaatatagtttgagaaaaatcatgatgatgagttaaatatagaatgacatgcgcttgaagatatacctaaacttatttaaaatatataaacaaacttgaaatcaacttaaaatacacatttgaaaactaaatatttatcaaaaattatataagaacatattattataaattaaagaatgtaacaacaatacaaatatatttatgtttttacatgcaaataactaacaaacaactaaatatatatttacttttttattgaccaactaataaattacaactgaataacaactccaaaatcaaaattaaatatatacaatataaacaacgtaaaaacaacacaacatcaacccccacattgtatcattctaatacgaaacaaccaacaaataactcaaaaatgacatgtatcaatcttattttgcg

SEQ ID NO: 68360 - DNA, 804 bp, Cannabis sativa
taccatttttaccttatttttcataaataaaaaaggtagataattttctttccaaaaataaattgattaatataaaagtcaaatacaaaatatggaaacaatgtaattactccaacgtattaaaacaataaataataaaatatttttatcacattaaagatgccaaaaatagaattaacataaagtattaaaaagtacccctcaagaaaaaaaaaataaaaaaactattacatagtgtaaaattaaaattatatattaatttcactctttgtaaggaaattttattcactcttagcttgatgagaacaacaatgcaagggaagatcgggctaatcttgcctttgttttctaatattaattttcataagcttttagtttggactctccttcttttgatttcatggcacctatttttaatgttgtcaatacgaaagtttctacttctatgaattctatcaaatggtccgaacctatacccatgatgatgttaaaggggacctctttcagatgcatccttataaaagtcttgggaaagatggtacgtgagctggtttctaccagaagtattaagagaccgtgggtgatgatgtgtgtacattttgtctcattttcttaaatggggatggaagtgttgttggtatgaattccaccttgataacccttatctcgaaggctgataaacctatgtgtgcttctcatttcaaacatattagtctttttaatgtactttaaaaaattattgcaaaggctatgtctatcagacattgtgagattctaggggatattatttcataggaacaaagc

SEQ ID NO: 68361 - DNA, 801 bp, Cannabis sativa
tgttttgattaattctggttgtctacttaggtgaagtcgccagaattaatggtagttctttttgtggttgaattttttttttcggttgcgtggttgcgcgatggttgccccatagttacccaagaagcatggatcctgggttgaatgtatgtaagtggtatttgtgtaatttttttttatttgggctgtatatttgttcatttggccagctggaagtatttttgtaatattgttacattttttggttgaaacttaaaaaagccctaaatttttactaaatttggctagaaaatattatatttgagcattgttattgggcactaacactttttagatgtgtgtcttgtaattggctagtaatactctctaaaaattattacattaaactatatgggatccgggcaaaaaaataggaaaaattcaacttctttaaggagaggtttgattggtgttttgtgaacaatatgtgagtggatcatcttctgttgcccactgtcacatatcttgattattatggttcagatcatagagctcttttagtcaatattcttgttaatatttagtcaggcggttgaaaagagaagatccttaattccgttttgaaagactatggttaaatgaggttgaatgcactgatatcattttttctagttggcagtttgataatgatgctaatccgtcatccacccttgcaatgtgtttagatcgttgtgcaaacaatttacaacaatggcacaaaaggaaatttgggaatataaagcaagacatcaaacaagctcaaaataaagtcaccttgctgca

SEQ ID NO: 68362 - DNA, 2371 bp, Cannabis sativa
  modified_base (1556)..(1570): a, c, t, g, unknown or other
tacctcccggaggtgctttgctatagctttgccctccgggagtacgtggacccctcatgccttctccgggaggtatgtttcttggtgatcctcttgattgaaaaagacttagtcaaattatctcaaaactatattcctcaaatccacgtgtcgcagtcgcattggtccacgtattttggatgaaattaagggcaacaaaactttagtatttatgccgcaaattactctttaaacaagcaatgaccatattatatgaaattatttaattcttttttttagaaaaaaaattacttttatcactaattaattttgtgaaagaatatgcaattataaaatttaattaaaaaatagtatgtgaaagttgcacactattaaagtaatttttgtaaaaaaaaaaattatcaaattttatgtgaatcagagaaaaaataaaaaaaatatatatacattttaacgattatgggtgttatctttattggagatactctaattacaatctcttagtcaactttcacgtttaaaattacatgccaaaatattttttattattagtttcctctaaacaaaatttttattatttcaatttaccatgtgtatttaaaaaaatttagacttattttcaccataaaaaaaaattaaaaaaaaaatttcaacaaatattttcaaatacaaaaattgactaaaaaattataataagaagttacaactaatctcaacaaaaaaaaaaataataaataacaaagtattttttttaatttaagtgtttatatattacaaacatatataatttggagctcgaactcaaaattttcaagatacacgcaccctcctataactacttagtccttacatagttgaatagccaagtactcggtgatgataacattgcccccacttacctgcgcatatcttggacataatgtagggcccactcacttgtcggtcaccaccaccgatcttgcttccatcttcatttattttagtgtttttttaataaaaagtcagattttttttcttaattaatttaatagttgtttttttaaagagaaataaaataaggattctataaaagataaataaataattattaatttttagagtcggtggtattgtttctggatccagcacatggcgcgtcccatgttggcgttcatagcatattaattatttattgatacaccgacattactactcattagatcgggaacaaatggagctgaaatagagtgagtctcttgagtgttgagttcattggcagatcgaaagaaacatcctttattattattattaaaaataaatttaaatatattacagatctcactgttacggtcaaaatccatacaactatttagtattaattaatacatttattttaagaataaattaaatataatacttgatgcaataattccttgttcctagtcggatatatttagtgtataatacgatatctattgagtactgtattgtttttggtttagaatcatacaaatctatggaaaagattaatgtgcatatgcttatgctgtgagatttcattattattattattattnnnnnnnnnnnnnnnattattattattattatcttaaataatataaaaattacgcatagctcaataaatttaggctaaagcaactcatttacctttattttgccattctagctgaaaatgtggaatagagtttcgttttttcctttgataataaaatttttagtgaattattttatatgttatttttaatttttttttttaattgctctagttattatgtaaatttgaattgcgatttaaattgttgtgctatgtaaatttttttaaaattataacaataaactactttaaaatataaaaataaaaaactctaaacattaataatgtgatataaaaaatattaaattagtaaataatcacttaaactatcaaaggaaaaaacaataactaaaataaaatatatgaatgagaatatgtagcatatttatatatcctagtaaaataacctttttcattttataaataaaaccttggaaaaaaaaaataaagatgaaacaacatgtttttaatagttcaattaagtaacaattttttttgaaaaaaaaaaaatcaattaagtaacattaattaatactatgtttggtaagagggatgtatggattgatggagagggatgaaaggagtggaagaaagtgggagaaaggaagagaaaggagaggtggcgggatactgttagagaattttatattgttaatgtatggaatgataataaaatatataagatgaatatactacttctttcattgtcaattaattttgagatgaaacttcatttatcttatcacaaattctaaaatggtatcagagcaaaaaaaa

SEQ ID NO: 68363 - DNA, 1256 bp, Cannabis sativa
ctcacgagtaaatgtgggctctaaaaaacgagacgaatcaaacgacgaggaatacaaagaaaaccctgaggggttcgatgcttacgacgacggtagttataccgagttactggtcctaaggcaaaaagcggctaatcacgagaccgaactagccgcccaaaaagaataaaatagaaggatgcaagaaataatggttgccatgcaaaaggccatggagacaattggaatccacgtgcatcccaaagccgtgcctacaggactagaggaaacacaagaagagtcctcgccaagcacccaaaggcccaaaactagggagccaagtcccatacagtatccttccgaggggaaccctaagaaaaatcccacttcaatccctgggaagaatagaaaggcacatgatgaggtccgcagaggggcaagctccctcgggagagtcttggccctcaagaccgaaaggaccgaaaaagcgtgtctgtgcaccaagagcccggggaaagagagaggaaaagtcaaagacatcccccgattgacttaagacaaaaaattaatgaaaaacatggtgacttgagaaagcaccttgaaaagaaaaagtaggtgatacccatgtcaggagacgctttgaatgagggaatcttggccgaattgacaatcctctacaaagacatagctagggtctctcagagataaaaaggagatgactcagattctgattgcgaggatcgagagccctacgccaggaacatcctggaggtagaactccccaaaattttcaaaatgcatgaaatggcaatgtacacaggagactcaaaccccagtgaccatctgtcccgattcaacagggtaatgaccatcattaaggttagtaatgaagcaaattatctatgctttccactgactctgagcaggtctaccgaagaatttaagaaattggagccaggatcggtggactgtaggaacaagttgcaagtgagtttccggcggcagtttgtggcagcaaggaagatcaaccttgaggtcagtgccctaaccaatataaaacaactgcctgcggaaaccttaaaaaacttcataaagagattcaaggaggaagcctcaaaaactaaaaaggtggatgatggacaacagttagccctactccaagttgggatccggacaggaacccttttctagaacgaattgcaacaagaaggagcggctagcctccaagactttcagaagagagtccagaacattaacctagaagaggcccaaatagt

SEQ ID NO: 68364 - DNA, 700 bp, Cannabis sativa
ttgataaatatctcttttttgtatatgttaatcaaaaataccctcaaattatatttcattaaaatatacccacttttataagtgggttgcccaatacaccttcatcttctacttaagtctaacacacaatttgtattaatctaagggtataatggggacatcatctataaaagtaagtatattttgaaaaatatagaaataaagataaaaatcaaaatatataaactaaagtgaatatacaatgtaattttctgaaagttattcctctctttctctcgttccactcttctagaattcaactccaccatcgctcgctcggttagaatctagtggtaatatcaaaatttagtagtaaacattttgagatgcttgaagcatgtatatattctataaatgttgccaaaaaaattatttaattacttaccataccaattttatattcattagttgcctttctataaaagtattgagttaacaactccaatttatttttaaaatctagtttattgctttattttttttttaacataaaatatcaattttattaaaatttagcattaagcatacaaaatggctattagctgggacattgtgatcatgaatactacaattagagaaaaatcgagattgtctaactatataatgagctactcgatttattgctcgtctaataaaacttaaactagtaatttgtagagag

SEQ ID NO: 68365 - DNA, 617 bp, Cannabis sativa
cttaccactatcacaaaggatagatcacatccactttcacctaccactctaattgagcttccccaattaaggtccaacgattggattcaaattatttaaccttgtaatcactcgattagaagataaatattgtttaatttagtttcttaattaaataggcctttgctaatcaagacctaagagtgtctttgcctatgaataggacaacacccctattgtaaaagcatccctaatttttgtttttaagctaaagcgttgtgaaaattgcgagaaaactactattgttgtgcttcaacaacaaaccccacaataatattaaatagtgtgctatgcttagttaacacctaaactatataaaaactttattttctttactttaaaattatcttttatttatttattttattattatttaagttgccaaaaatttcaatcaacgttttttaaaagaaaataccctaaaaacgagagccagagaagttcattaatcaagaagattcaacctcaatcaagggttaaatgcagtcacaaaatctacgccaccaaacaaaattcttagcaacagtaatacatacttagctaaagaatgaacaacatcgttacaagttcatcgagag

SEQ ID NO: 68366 - DNA, 657 bp, Cannabis sativa
atttgaaagaataattagatttttattctctaaatgcatgatgctactagattgcacttttaaaatatacggctatttaaaaatttttcttcaactttttaatttataaaaatttagtcatttcattattcaaatgttgatgtggaattgttaattagtgtggtttggttttggtggtatggtggcgataatgatggtggctctagtaatggtaaagaagaagattaaaagtatttatattaatgcattattttattaaattggtatgaaatttttataccatttcatttcatggatatactaaattatccactaaattgcacgctattaacggtgtgaaatttgtagtctacatcaaattaggacacattaatttttctattttaacccttcttttaatttattttcttaaaaataatcttacattttagtcctcaatctaaatttattacaaaataatcattcatttaaaacgctaacataatttgaaaagacagaataataataacaaaaatactaattttaaatgaagaaaacataaaactaaaaagaacaaggtaaaagaaaaatacaacaataaacaaaataatgattcaatgttcaaattgatcacttgagaattctaacctcgacgattgagtatcaaaatattagttt

SEQ ID NO: 68367 - DNA, 841 bp, Cannabis sativa
acaaattttcatatcaagaaatgttgtttttcatgaaaatatttttccttttcactaaattaatgaaagtattactaatgttaatcctttttctgagttagttctcccctcttccaccgttactaattctcccataagtgactatcctcctagtacaacaggtgatcaaagtcacagccctcctatccaagaaattgaataggtcattgaagaacctgccactgcctctcacagcacagaaaccagatctcagcctgctgcagaaaatgaaaatgcaggccccaggagatccagcagaacatcaaaacctcctacttatctacgtgactttgagtgttattcttacatacacgacaaaatctcttctccccatactcttaataaatatatgtcttatgcaaggttaaccgaatcttacaaagccttcattcttgcagtcacttctctcaaagaaccacaatcttatcaacaagctactcagtttcaacaatggttagatgcaatggataatgagctcactgcactaaagaacaacaaaatgtcgatagttgttcctctacctccgaataaaagagcaataggatgcagatgggtctacaaaataaaattcaacagcgatggttcggtagaaagactaaaagcaagactagttgcacaaggatactctcaacaagaaggactcgatttttttgataccttctctcccgtggccaagatgtttactttcaagttgcttcttgccatctctactataaaacaatggcacaccttgcaaattgacatcaacaacgctttccttaatggggatctcaatgaagaagtttatatggccttgccacct

SEQ ID NO: 68368 - DNA, 1762 bp, Cannabis sativa
accacacatattaggggggcaaaattttttttgataaatattacacttaaaaaaatattatttttattacaaagaaaaatataaattttatagagactagagtaaatttatgagtataaataaaaaaatatgtaaagataaaaatggaaaacacaaatttatatggacaaaattataatatgtgatgataaaactaaaacaaaaattaaatttatgggggtaaaaaatacaaaaatatatataaaaaaaatacatacaaaaaataattttttatttattatatatttataattaaatatttagctagaacccctaaacatgtgctaatagtcttgcacgtttatcccaatatagtaaacttggtagacattttgtccaaattaagaaagaaatattgataattaacttacatttattgaatattatctttccatttttttttttcttacaatttatttaaattggaaatatttcaacaacagaggggacaagcagttcttgtggctcagtcctcagtttacccgatagcaatttcaaatataaactttaaggaacctgcccacaacgcgactcatctataaatcattgaattgaaaacaaacattaagccaaaagtattccctccatcacagtaatggcttttcctcgcaaaaacactctctgcttttgctcatctagatgaatattcaatacccctcctcttggtgatgcctgtttaggataatcaattatgacacgttggaaatcaagaggtagagttagccaactttgaacagagtataaaacaagtacctgatatgcaataaagtcacacttccccagttctttgctccaataaggtgctaatgcacaatgagcacttccacaaacagggtcctgaaaaacatgcatatgaaaaagggctcaacaactcagtcttataagtaagtggttttcttcgttttaggctattagcccatgtttacttggttataaaacataacactacaaggtccaaaaccaagcttattagttaaattaacacctcattgactccaagctttgggcagaagaatctgctgtgaaaatcgaatccagactctggaggagcaattgccgttaccactatccccattcctggacagttttttagtgcaccaaagtctggttgcaaatttgcaacatcttttgctgatgggaccacagcctggaaagcacaacaagattgatttgtataaatatatacataatatacacatcacacactacatatatgcaagaaaatagcttggaatgaatgacttacaatgatcttagtcgaggttgttatccttgtattgatcacagtagcaccacccaatgctttagatatcaagattgagtcttcagcagaaaggacttcggtgatgggatcagtgggaaagttcaactcaataaagaagcctttgtgtgtatcaatatcagatctctctacaattcttttagcagttagaatcccagacagtgtgacaaactcaataatgtttgaatctacttctccagatgtaaagagagtgtgtgcagcagctagtgttgcatgcccacaaaggttaacctaccaaaatgttcaacatggctgttaactgttaatggcctttgaatcttcagtgacccttttgaatagcaattcctttctattagtgaaaaagggagtcaaatgacaaatcaaataactagcataatgcgggagtccaatttatgaacagaaattattccaacactctattaaaaaaacaatttaaca

SEQ ID NO: 68369 - DNA, 950 bp, Cannabis sativa
  modified_base (300)..(300): a, c, t, g, unknown or other
acatgaactaaataacacattaattaattaataaaaataaaatttattgataattgaacagaaaagattacattgaaattgagttttatttaagacacaaagcctaacaagaatcatattctctgagaaactttaacgagtgaatcaaagaaactaataacataaatatgagttcatgattactcaggattaaggtcaatttactattgatcatctttatgatataaattagatttttattgtaaatgacatgtttgataaagacaacttaattacatatcggtccatgtcatatataanctctattatatacaataccttcacgtagatgtcatactacatcaacaatccgaattgagattatttacactgaataatgagcatcaatgaaccgtactaacaactattgattaaagattctataattttaatatgacgttgactgtttcattcatgattaagtgattttaattctccgtacaatacaattcacagtctcatgtctgaataataaattttccaatatttatttataaattattcaatattaaatattaataatttaacattcaagcatatatgaaaatattcaacttatatttataaacagaaatatctttataagttttagggcataccactaacaaacacttatgctctcaagatcaagaatcaatttgttaaactcatccatctattcatcaacagatttgtcctccatcattttaaatgagcacagaccctgtttcaagtacaatctattcactaaggattttgtcatgtataatctttcaagcttcaaccagatacccgatgaagtggtttcttttgaaatctttcttagaaccttatcaccaaggttcaaactatgagcctttccttcttctcctttttcaggcatgttctttggaagacatttctcccctagcaaagcttcatatataatcctt

SEQ ID NO: 68370 - DNA, 1600 bp, Cannabis sativa
aatttttacaaaatattaaattttagacaaaaatttataatttcactatcatattaattttttaacaaaaatactatatttttataaaataattagaataattaaaacgatagtaaaacagttaaatatgtagtgtaaaaactctaattatttttatagttatgtacgtattatagttatttaagatattttttaaaattttaaaaaattaagaaaaatttagcatgtcaaattttaaactattacgtgtaagttttttattttatacgtgtataaaatagactgtttgaacattattttttaaattgtaaattattcaaaattttacagaatgtgattttttttttcttttaaataccaaaatatataatgtgcatcgacaaagctattttaagagtaacattacataaatatatatttatattagaaaaataagaacataataataagaaaattgtcaaataattaaagaaaaaaacgagatgcaagttggtggggataaaattattaaaatgcccccttgtgtttgggcattaaattatgctaagattacaagttgactctcttttctcaatttgcattaaaataaattatcagtttctttttaaataaatatcgccggtgtgagttgagtatttttttgggaagaaaaaagaaatggaaaaaaaaataataaatatatacattttttgaaataatttaataaaatactttgaacaattcttcttgggtcatgtgctatatttatttatttatttatagaactattttaaagacggtttagcttaattaacaagtgactttgtgctaaggttccacaaattaatacaattactaatacataatcaagccattattaaatgtacacaacttgggtgtaactatataattatatatactaaattaagcatgaaatttgacctaatctttaatacttattaagttattaattggcattatagggctaaatcttaaaaaaaagacaaaaaaaaaaaaaaacaagagaaaatgatcaaatgaacatttgtgataattttaatatttacttttgggagtgataaccaataataattataggtagaattactatcatcttcaattataggtagaattacttagaacgaatcaaatttattctttaaaatggaaaaagctaaccaataataatattgcctttctgtgctctataattagttaagaaagaactaatgaaccattctcacttgattcattttataaaaaaataataattaaggtccgtttgacataattttttaaaaaactaaaaattaattttttaaaaaaaatttgataaattaaaaaggtatttagtaagtaattaaaaaataacttaataaaaaaataaataatttatggagaagctacaactaaaatttaaagataatacaacttgttatacctgaaattcggttgtacttcagaaagtaacacgtgtcaattaagtggcactacaataaaatggactttttatcccacttcttacacttgaaaaaataaaaagtgggataaaaacttttgattccacttttatttttggagccttaaataaaagtttagaacaagggccttgtttggaaaa

SEQ ID NO: 68371 - DNA, 3894 bp, Cannabis sativa
  modified_base (61)..(70): a, c, t, g, unknown or other
acaatcttaatagttcaaggggaatttttaacggccataaaagttcaggggacataatttnnnnnnnnnnaaagttcggggggaaaaattactatttagcctataaattaaggtgggaagttttggactgttcggagttagttgcaaaatgttgaattttatagtaactggttactagtgacatttgggccatttttgtaaacttgagcgttttgagaatgttgtgttcgcttctaacaactcctataataccccaaatcattcatttaagcctacctatattgagagttgataacatccatggtgcgttatacttgtttagatttcaaaatatgtgattctaagtactatataaatacatatattagatgctcatttagatactaatttttatctagaaaaatattgctacaactttataagcttaattgttttcaaagcgattcccttagtctttgcatgtgtttttcttcaattgaggaaataagagattgtttgcatgtgtttttcaatttttagaattgtatttttaaaagtaagagaaaaaaaatagttttttgctattttaaaaatttaatagtatttatctaatgctttttaaaaactatttataaagttttcttactaaaaaaaaatattaatattctacatcatactacgacatgaatctagctcaactcggacccgacctcgatcccaaaactcagactccaggcctagatcccaaacctggacccaaagaatggagcccggacccgaaccctggagttggatctcgggacccgatactcggaccgtgatcccaagtcgggacccggaactggactcagccctagacccatggccgggtatgtgagagaaaatataaatagaaaaatatgttagaccaaaaataaaaattatttttgaaaatagaataaacatcattttaattttgctgtttttttttatctttttcttaactttattttcagaattcttttttttaaaaaaaaaaaattgaagccaaataataatccctctaagcttttagataaaagtgtaaagcaatatattgttcaaactttggtaatccttactagcttttcagtcgcgaggtgatgagagtaattaattaagatagttctttcttcttattaacattatttttgttctttattttcttgttactttgagttgtaatacattatcttcatttcctacttttcttatttacttgtattttaagtatttgtattacaatatttatttacactcaatatgttagtacttgtagttttatgttcaggaatgttaattacaacttcctattacaacttcttagtcaatttctatatctgaaatcacatgtcgaaatatttttttcatagcggtattcgttataattagaagatcatccctgtaaatttttgaaaaattccgaatagtttacagtactgaaaacagaattcttgatattccagtttaccacgcacgttcaaaaaacttcaaacgtattttcggcactataaactattagaaacttttcaaaaatttacagagatgatgttgtaagcatataacaaacaccctcatgaaaagaaatttgaaaaaaaaaatatattgatatgtgttttcgagggtagaagttaactaagagattgtaacaggaggttgatggtagcattcttgagctgtgattgttagtttcattccattcatatattaatatgtgacagtttgtattgttggaatggtgagcgtgatcattttatagaagagagaaatacaatttttacagacagaaccagtaatgaaatagttgaagggtgcaaaagaaataatcgatcagacagagatttatagttaataaatgtgaacaccattatttttcaaagtagtgattattttcactagtattaattataatggtatttgttagtatcgttagccaatcgcaagatgatatatctaaaaggtgttagacactactagtgcccaatagcaatgtttttgatattatgcaaaagttttaaacaaagagtattacatttaactagacttgatactttattaaactaatagtaatattgacatgtaagagggtgttagggtaaacagtaaccttgcaggctctaacatggcaagccttgagaatctgttcatattacacagtttatcaatgaaccaaaccaagtactagaatatcaatagagaaagtaagatttgtcaaattaagacagaatcaagactctattaatattggtgtcaacacttatcactaccttaatgaccattcaaaaccgaaaccagttgccacagccatgtttgttgccctaatttgggcgcaattgggttatcctagctactacaatatatctttgcttccatgaaatttgcattgccaactctatctttattattgttgcttcatttggcttccttacttcgtttgtgatatttggtcctatgttacatattctaataccttttttttgctgctggtcacagttgataagtgggttgaaaacaggtgggcaaattaatataggatattcagaataatattaattatcatgatgaattctactactatattttttgtacttataatgcttttcgtttatatatgttgtggatattatttaattatgtaattgtttgctagataatgagaagaattttggagagattagttaaatggaagaagttatattttatatcttaatagtgatttttgatttggtaccaaataatgagattacatttttattttaggactttatagactaatctataaacattattaaatgactagtttctacataatttttaagtgaaagataattctaaaaaattcaagagtactcaaacaaacaagaaaactctagatactttagtaaatataataatagtttagataactttagtaacaataaaaaaattctaaaaaattaactatattaaattaataactctaagatttagaattattttgatatctttaaacttgaatttttaactaaataatagagtaattagtgtctatattgtgtaattgtgtttagtttgttgtgtgtttgtagtaaatggaagtttgtgtgtgtgtgtgttattaagtgttagatagacttatattgctatttttgtgtgtattaagcaggaaaaaaaaaagctgaaatgagtgttgggaagtgtttgggacaacaagaaaaagagcatgaaaagacttgttgctgactgtcattgctatagcaattatcgtgtagcaattggccagcccagtaagtgaattgtggcagaaattccagctggcgttaatgaagaataaaggatgcttatgtggtgaaaatgtgtacaatgactcagccaatgtgtggaaaaagaagggcaagtggacaatgacttggatttctaattagggtaaactttagtaccctaaatggggggcagccaagagaatagggagatatagatggtggctgcacttgaaaagaaagaggagtacgaaatttcagagagaagtacaggaaaaaaaaaaagaagaggctaaaaagaagagaagaagaagactaagaaaaaggagaagaaggcaacctcaatagagacgatttgagctcaccaactcatttctcttgctctcctcttccattttgtatcattttctactctttgattttctctttagctgcatgaacatgttattttttggttttaggtttttaatttcagacataaactaagatttttgagatttgggtggttatgaacccttgtatgaactagtgctttgatttgcaatgattgaaacaatcatatctttgttcaattagatgtgatgaaatgttgattgaatgttaatttttggccagatttaacatttagtaagctagatcttacttggaaaagtaagac

SEQ ID NO: 68372 - DNA, 867 bp, Cannabis sativa
tacattgacaatgtggaactctaatagttctaaaatagggaagccttttaatatttaaataatcaaactaataacttactacatcatggtctaaattcattttttattttgaaacttaaatttattttctacatttataaaatactatttattactttaagcatattctattaattattttgagttttaatattttatatatattaatattatatatttaaaatcaataaaatatattaacatttaaaatttattatataatataatataaaaatttgagatgaaataaaaaattaatattttattgatatattttataagaatatagaaattgttaagattgctctcacttgagctttgaaaagctaatttgggctttaaggtccaaaagatatagtgtgctacagattaagtaactagtaagtgtagggggtctgagaagggtaatcacaggctacaccttaaagcctgggacaaactatgcctccccaagtctttagagggtctgggcttccgaaaaactagagaaatgaatcaggcattcctggctaaatgggggtgtaatcttctaacgggtaaccaatccttatgctgtcgaattctggaagcaaaatatctataaagataagtcttttcttgactataattctaaagactcgaatttgtagaatgtggttaaatcgagagccatgattcgtaagggtgactgcaaacgggtggcgaatgggtagtaaacaatatatgggacgatccatggattgcacacaggaagggtttcatcccccaccttagaggtcccactactcatggggagataaaagtggttgagctactgttagtgttgggttttgtgccctaaataagatc

SEQ ID NO: 68373 - DNA, 974 bp, Cannabis sativa
tcgggccgaaccaggttcgggcccgaaatgcaatttgaattgaaataatttgcatttttatttaatggtgataatctgaaattatattggatttatgggtccatgaaatgacttaatttcccatgtgagtgtgcatgcatgatttatggccctaggggcatttgggtcttttgaccttattaaatttattttaataaaagatgaattgtgcgaaaaaggagaagaattttctagttttttccttcccatacccgaacccctctctctcaaccctctcttgaaatttcaatttgatcttttatggattgcttgatttgaagcttgaatttggaggatttcttttgagtttagaattaaaggaagttctagctttatttgaggtagctttctcagatttttaaccttgtcttcttactgaattttatggttgtaaaggcatggaaaaagttgttttgagcttgtagttgcatgtttgtgttctttagttgaattgagcatgttattgcataaaccttgtttgtatgatgctttggattttggttaagttttcgttgagattttggaagtgttttctagcttgaatccatgtgtttttaaagtagttgctgctggaaattaattgaattaagtgagatgaagctcaagttctagtgcttgaagtttgcttagttaagtcatgaatttttcgatttttaatccaatctgaaatgagcgtttgttgttggattttgatgcgtgagtatgtgtttttaatccctagtgtttgctagcaactctggtttatgatttggaagttttggttatgaatttgaatgagttcgaatgagttttaggctgaaaattcgtgttcttggtggctggtttttgggttttcaacccaggtgccacgacattctctaagcctgtcgcgacccgcccctgtttggtggaacctgggatgtgtcccaggtgccgcggcatggcttgggcatgcc

SEQ ID NO: 68374 - DNA, 788 bp, Cannabis sativa
ctgcattgtttgaagggagttcagctgagaagaagcaaggggatcttgacttcatagactaaggggacttagatctttgtacttgattgtgaatcaagtgtattggtaacttttgtatgaattcatttctgtttactttgtttaatttgtaatcagaattggagattgtatttcgattgatttcatagtgaaagttactttacccggtttaagggaacctaagtaatactcggttggaatgtgtttccaatatcaggggaagcttataactttgtgttcctgatttactttaagttttaatatgtaagttgtagattcaatcaattagcatttgaataaaattgatttttttagaaggtaatgtttgtattgttggaaacttattttactgtgatctaggtttactaacatgtatgttgattataattttataatctaacatcctaaatataaaattcctaaaaaacgataaataaacacataaaggtattgaaaaccttacaatgatggtgacagaataatatgactcattccgttcagatctctagcccttgattcctatctgtaggagagcattattaagatatgaagctgtatcttctcctccttcgattatgttcaacacaatcttctacaaaggcatgaatatcaccttgaatagagtggggtgatactcaaacagctttggaataaaattttgagagagaattatgtaatttcgaaaatcaagagaagaggaagaagtgacattgggtttttcaattcttttctctttctttatataggta

SEQ ID NO: 68375 - DNA, 763 bp, Cannabis sativa
tccagcttgatatgtgagctacaatctacctgggaattgggcccttagcagcccaaaaaacttgatagaaatatctactttcaagaggcaatttagtattttgtatttaattaatttaatatgtaaatatttaatattttagttgtaaattagggtttaggcttttctatataaaggccttaactctaacctagaaaaactaagtcaaattctagccttcaaatcactttaagtataaaaccctaatctctcttctcactctcactctcatacatggctaaggggctcttccctcctctctctcacatgcctctaagactatatgtctctctcattatagtgatttgcctgcttgaccatgctttgtaaccttatagaaacctcaataagatctcacctatattaatctgaatagtattatctctataagtatcaatataactaaaaagggagtacgtcattacccgctaaccaaagggggccaaacctctataaatatccttatcttatttattttgttattcttgtggtgtaacacgtggaaagcatcaaatttatatgactgcattggttattggccttttgaggtcaacatatctttattcacttcaattttcaagtaatctatttacattatcatatgagcaatacaaaaaagaaagacactttctttttgaacatgcaattatattctacaacacaattattcgtgtaaaacatgtaactaagaaaacctaaatgaatataactaacttgtatatgt

SEQ ID NO: 68376 - DNA, 2235 bp, Cannabis sativa
taaagttaaagatatatactttagtgattttgagtttgttgaaaacatcttgaagaaccttgtaattctggatcatctcatactcgctcttagcatcgtaattgactttatgcatcggcaccattcctggatgagccgcatccataagttgacaatgaaccgcaccagaacacgcctaaacaatacataaacaatttcatccattttaatcagaaaaagttcaaaacagaaccaaattagggctcgataattaaagcaaagcaaacctcttcgactttggagagactgagatggagagtggagttgatccaagccaagatctccgatctaccgacgaagtaagcaccatccatcataccaatattggttgccattgttagaaatttctgaagctttctctctctggttttcgggtttgaaattgtagagagagaaagaagacgtttcaaacggctagtaaagtgttgtgtgtggagagagagagaaagagaatttaaaaagattgagaaagaagcgggatttcttaccgttcaaaatgttcatgtccgaatagacagacgttagtgtccgttcaaaattttgggttgggcttaatactctacattgggctttttgagatcataggcccacaattacaatttgtacattattattttaggataattacataatgttgtgtaattttttttacatttctatgttcaagaattttttttttacatttttaatggtgttttataaaatagtacaaaaataataaaaaaataatatctaaataacaaaaaaaaaaacttattatcctttttacatttttacatttttgatggaattattatgaaaaaagattatataagtgaaatggaatatgtcattaatttccaattcagcttgttcaaacttgttgtcgtttccaagaaactgttgtcgttttttccacataataagatatataaaaagaagaaaaaaaaacaaaaaacgacattgaagaacaactagttactcttcattcataattatgcagaatataatacattatcaattcattgtcgtttttctgtattttatccaattcattgtcgttttcaaatttcattgtagtatgaagaaatattttgcccaatttcattgtcgtttgaccaaaaattatgcagaattttataaatggcagatgaactatttttatccaaattcaacttgttcaaattattgtcgttttccaaatataataaaagattaaaacaataaaacgacaataatttaattaaataaaaatgattcgtcaaccatatattctgcatttaattttgtatttcaattcgaaagttggatgaaatgttcgattccataatctttaaattgaaaaacgagtaaacgacataaatatataaaaacgacaataatttaagaacgacattttgctaataaataaacaggagaattgtactaccgtgcctaatttttgtttttattttttaaaacattataaatgtataataaccaaaacagtaaagatttaattggttcaaccacaaactattctctattctattttatccaaatatacattttctattctatttatttctgttaataagtaattttcctacgtaccctttagcaaactttattttatatatatgtatataaataagtggattcgattggaaaacataacataatcattttctttaatcatattctctaattataatgctccttcaaattaggagagaaaacaatcattaaggggaaaaaataggtaagtagtagatgagtcaaataatatatttaaaacataataattaacaaaagtcttctaagaatccgaagctatatataataattattaattttgatttgattattctatataactatcaaataataattttttagaatatttcataaaaataataatttattccaccaatatagaaataaaaaatgtgcccatttaaacgtatagttctacttaattaattatgtcaattattttttttcctaatatgtactttgtctttttatttattttctattctctttcttcttttcaagactaataaacataattttaaatcttatttttaatgatagtgctccttcaaattaggagaaaaacccatcattaaggaaacaaaatacaagtttttaacatataaaacataatataaccaatcacgtcttctaagaattcaaagctcgatatacaagtatacacaaatttccacatttgac

SEQ ID NO: 68377 - DNA, 1083 bp, Cannabis sativa
tttttcataatgattaaggatgacattggcgcaattaatgaagacaagatgaccaaaaacaaacagacaaagaagggaagagatgaagacgagaagcaaagcttagggaagaagaaagcaagaagcccttactgatcaataccagagccacgcctgtaggaagcttcacgaagaagagaataaatatggtaatcctctagtgacatttgatataaaataatacttactacagttttaatttatctgcatttctataaaaatttattattaatatatttttaagaaaaagttagaaacatgctttgtaccatcttctttacttttggcccgaaatttgtgttatttttctttttctgattcatgttttatgattgaagatagtaaaatcttgtgtataacaaccccaaatgtctatagtttcagtttcttgttgtgacattgcttaatttttcttttattttgttacatcacatggtcaattttagagggagagtagtgttcttcggtgtgtgtgaatgagtatttttgctacagatcaatagttttatatattttgtattacatttacatttttataccatagctgaaaaataatcacatcattttcctgttagaaaataaaataaactcagatactaatatattaacttacatctttgtggtagaatgtaatatcattaatttggatggtcaaatattacaatttgacccttgttgaaaaataatacttacaaacgattctttattttatattacataattaaataaaatacttatttaagataatggaataagtctagaagaactagaaaaaaattgtaataaaataggatcagtcgtcaatatatatagaacaataatatccccacacatttatacagtaaccaaataattagacttattaatttataaattacaaacataatacttagcatctatcatattcctcatccttaacttctcatagctagttaaatgataaagaccatccctttatatttagatacaaaacaatctataaaagaatagtttattaataactatgactggactaatcatattgttcttcatcaacgattctct

SEQ ID NO: 68378 - DNA, 817 bp, Cannabis sativa
atagcttgaagtaccaatactgggcggcctctgcaagtgtagcagggaatattctacaccgcacatcaccttgtaccccttgcaaatccatctacatctcaaaatatttaagatgtgataaggggtcttctttcactgtatacatcttccaagtaggcatcttaaattttaggggtaatttaaggacttcaatctttggggagaagggtgattcgcgtgctcagtccagctcgagattagtgagttttgagctggtcaggccttgtgccatatttttcagttgatccaattgtgcttgcacgaatgaatgaactggttcggtctgttgaccgacctgagtcacatcaggatcccttagtgctgggtcctggatgcggatacctggttgggcagttggttggacgtattgttcgtccagaaccctccttctgttcaggtcagccctgagatcgtgggcagcacccaatctgttaaataccgaggtaccatgtggtctcgatgtctgatttgtttggccggtgggttggccaaaatttttagcctggatgaagttatttggtataactccacccaaagagcggtcaggtaggatctggccgtctactgcttggcccacaggttagacctgtggccggggattgaatggttgaccattatgagtttgggcggtatgcccaataacatagtcttgtataccgcttagtgggatactaggcgcgatagctggttctttattagtgacttggtaggccctccgtattagtacggtgggctgcctcatgcgatcatcgatagttgcttgctgagccttcaaagt

SEQ ID NO: 68379 - DNA, 766 bp, Cannabis sativa
attcttaattggtatgtatttttgctttattgttagcttcacaaaggtacatcatgtgtgtcttatattctcaccccaaatgagagtttataatgagtagttgactctacaatattttctaattgcattgctcatagcttgataaagttttaatttattgagttttcagtcttttttatgtgaacaacaataacgtttccatccataatagatttagacttatgccttcgagaagaaaaatctgttgatcttaatgataccaataatgttgctcaaaaaactcttcaagcacaatgagaaaaatcaaatcgtcttagtcgcaatgctatgaaaagttctattcttgaacatttatttagtggtttgccaaaccccacaaattctaatgagtttttcaaaactgtggaaaaattatataacacttgtgaaaacgtcgaacttggatatcgtatggatgaaaatgatgactgttaagaatgatgaatcaaaatgactgcaagattatattttgaaaattgtgaatgttcagtctaagttgaatgatcataatatttctcttcttgagtcttctattattcatcgtgctcttcatgcacttcctacctattttcacattatcaagataatctacaacacttataattaaacatggagcatcaatgacctaatttcttagtctgtaactgaggaaagcaagctgtaaatggagaagaataaatcttctcactatgtttctgacctaaaacccaacaaatgataggaaaca

SEQ ID NO: 68380 - DNA, 669 bp, Cannabis sativa
taaaataatttccaacaggtattaagtctgtttgatcgctgtctgacctacctggcttatgggtttggggggctaagtcctattaaatggacgcccaacaaaatacaaggagtcagggtaatagggtcgagaccggagggggtcagggaaatcaaattccctagaatccccgtagtcgtggcatgttttagggtggtcgacatgtgaaaccacctcaagctccttctgattgggagtagagatttgtgcaaatgcaagatcgtatccgtcagcaagatgaagaaattcaaagattaaggcagcagggtcctcctgcaatgcctccactgcaagctcaggctgttgtagttcttgcagtgccaacagaacaacctgttgctgtcaaccatatggagccgctatatgagaggttccataaacaagcgcctctagtatttttgggaggtccagatgtgatgaagagtagtggctcacagtgatagaaagaattttgaatttcatgggggtagttggaaatgaatgggtaacatgcactacttttcagttccaagaagacgcccttgggtggtgggaattagtgtccctcacgcgagatgtcactgtaatgacctggggaaaaatttcgagatttatttaatgccaagtattacaatgaagcagtccacagtg

SEQ ID NO: 68381 - DNA, 834 bp, Cannabis sativa
  modified_base (29)..(42): a, c, t, g, unknown or other
attcatattaggatgttaatcaacatacnnnnnnnnnnnnnnagatcctggtaaaacaatttctaacaatatgtttgataaatacaactaaaatttcatatcggtctatgtcatatataatcttattaaacaacaccttcacttagatgtcatactacatcagcagttcgaatcgagattacttgcacctaataatagacatcagtgaactgcactaataaccgttgattacagattccataactttaatatgttgctgactgtcttattcatggtcaagtgatcttaattctcagtataatacaagtcacaatatcatgtatgaataagtaattttttgatatttaaatataaattatgcaatgttaaatattcaattcttatttatagatagaaatatcattacgtgctttttagggccttaataacattttctttcttttatctttctaattgtttttatatgtttctaaatttcacgttacaaaattcttgttgtgatgaaaaagcttcgaagacacaacaaagcacaaaaatggattagggctaaacacaatcaaataagctcaagaacttgagctgaatcaataaagaaacacacaaaaacaaatcgaaacaaagaaatgagagaaacaaaagaatagtacagagctttttacgaggttcactagcgaaagttggagctacgtctttggtgagctgcctaagagaagcttagattaaatccactatcaagatcaagttttacatagtgtgtaaggattccacactactacaatgttagcctttagaggcagttttttcaaccccatttataaaaagggaagctaaagg

SEQ ID NO: 68382 - DNA, 838 bp, Cannabis sativa
ttcatatgaagttctggaatattcgcgtattgtgggagtgtcacgttaacttaatgttcatgcaaccatcacatgccccttgggatactgtgacacacccagccatttcttgagacatgtggttagttttcctttttctcacattttattcatttgtcagaattgactagattctcgaagtggtgggtatctccccatgattcaatgttcatgtaacaacatgacccttaaaatactgggaaacgcctagccacttctagagattcacgactagttccatgattttttactttgaattttataactcgggtgagagcacttaatttgttaaaaccgcactcgcaccacactgaaaagatcttttatctttcagatgggtgacctgtcagacagccagaggtacgactctggatgagtctaaaaagagtgacagctttatactaaccacactgtccgaggatgagactcccatagcaagggctcgaggggctcgctatccatggatgagatggataggatggttcaagaattagtagaaccggttaccatagaggtgcgtgacagcaaattcatggtatctgcccaaggctatctcgctcatctgcgaatcgccccaaacacggaggtcaaagagatgggtgaggacttcaaactacctaaccgcgaggtggagcatgaggtagatggtgagggtagcgagaccgatttagtagacaatgctcaactagacgagcctttttcttgtgaggacctagtctcacgggtcaaaaagtctgatttgtctacattcgtgaagtcaaatttgattcacactgctacctctaagcctctgccaatg

SEQ ID NO: 68383 - DNA, 689 bp, Cannabis sativa
tagcatgaacagatacaaaaaaatgtatatagttttatcataacaactataaattaagttagtattaatttttattttgacaaaaaattaatttaagataattttaattatttcgtccaatttattatttaacacaacagatgatctatttataatttttacaactacaaattcaaaatagtatttaccttttaaatatttatagtcttggctgagttttagggcaaggaataaataaaagggttggtctcaaaatcgaaatttgtcccatttttcactcacttgcttttgcttttgctttataaagtgatattataaaatcaagtcatttctttgttgctgacaacttttgcctttgcttcattgtttaacactacttaattcttattcttcaactatacaattatttattgatttatttgtttatttttttttatataaaatattctttggacagccattacctttctatctacctcaattgggttctttttacaaattcaaaaatgttttagatatttattttgtattgtttcctaacctaaaatttgaactcataatccttttgtgcattatttttatgaaaatgtagagaagcattatttatgagctaaaattttatgttatgttagctcacttgatgaaattctttttttaacaacatttccttagtgcatgtttgacatcat

SEQ ID NO: 68384 - DNA, 560 bp, Cannabis sativa
aatgaatgaaataaataaaaaaaaaaaaacttgtggaatattagtttaagtttgtgatataattatattttattggggtatatagtacatcatgaaagaaataaaaaaaacttgtagaatattcattttattttttttttcactatggtatatctatttggcttttgatatatgatttttgtatgctattatatatcatggaaagaaaaaaataataatttaatagtagattagtttcaacttgttatatattcatattgctatgtggtatatcatttatatgtgatataatatattgtatatcatgaagaaaataaagaaaaaaaaaactaaaaatagaataataatttttaagtttttagtatatttattttgcactaggatttatctttttttatgttctatggtatattaaggggaaaaaaaaactaaaaagagtggtggtatattaatttaaatttatggtatattattgttatgtgttatggtacattcgtttaagtgtggtatattatttcaaatatgatactcgaaatctgatatctagtaaaacttgacac

SEQ ID NO: 68385 - DNA, 1448 bp, Cannabis sativa
acgccaccaggacttcaccaaatatttttcctaacagtcagctccttgcttgaaccaatagttgatcatatatccacaattaatggagtaaagacaatccctagaaaacccccagctttggacatatgcactctggtgtgctcccaacacaacaccaaacacccaatcttggtcatcaagatggaaaactgtcattattttctcctcactctagatcccatctttatccttgagggaccccactacagcaccatcttcaaacttagcttttgtttgcaaagagaatgtcacaggttgactgatccacttgtcttgattaatacaaatcgtatcaccagtacccattatccagcacagacctttttcaagcaccttttgaccttccaaaatacttctccaaataaaggagcagtatgaaccatgttgagcctccataaagttgttgttgacttagaatttgatcaactaacaacggagccttatgaattgttaattatcaccatgtgtaaataagaataataaatagtaaaaataacaaacaaatttatagaggtttcgccaccttgatgaatggataatgacctacttttcttttagttgtattcactcttgagataataccatacagattacaggtctaatccttataatttctagctatgactcttttcagtattataattgtgagaataatgtgttacatataaaaaaaattggtaggattctatgaagaacgtatgaagaaaatagacttagagtctacgaagcgttaggtgcatatggagctttaaagggagagagaactttgggcatgtggcttagcttgagtctgtttttcatgtgatctagtgctctttatacagtgtagggcttacaaaagatcctaatttaaataggtaaagatatccctttaaaataggaaaaataacatctcttttatcttatatttggatataaaattaattttataattattttatttctacgttaataattataataaatatattaaactacatagtcaaaataaatagttgaataaaaatactactttctttaaataatgatctttattttataagacattcaatctctatggttggtcttacatagttttgtcatcaataggacctcgaggcattagatttttccctctaatagatgcatggttatccatataaaatttgacaccgtaagatctcgaaagataagtactttgtagatttatatttctagtagactcatccctaaagatgactaagtttactaatataaaataatagtagaagctcataaaataagaacaaccttgaatcttgcttactaggacaatgttaataggtaaatatatccctttaaaataggaaaaataacatctcttttatcttatatttggatataaaattaattttataattattttatttctacgttagtaattttaataa

SEQ ID NO: 68386 - DNA, 718 bp, Cannabis sativa
agtgaattaaattttaatgatgtagagatttgtatcttcaagtaagtcttattctactccttcctattccaacacatataataaatactctataaaaagaaataagtgtatcgatgtattattcttttttgtgtttttgacatgagaatatataatatgtttttatattgaataacacaatacgtatctttttatttaattactaaaattatattaggtggttaagatttgaaagttattaagtaaaatataagcctcacaaattatttaaatatgagatatccgaatagttataatttcaattttaaatatgcacattttgaatttttttttggaaaattcaaagtaattaatttacaatataaaaattcaaacaatgtttagtttatatactgtttgaatcttactttcaatatattaaattattttgaatttttcaatttttttttttaaatgtacgtttcaaatcactatgatgttttaagatcaaagctattttaaacatttaaaacttaataaaatatatcaatacatttatttttattgagaaatagtaaggaacatattaaaatgtcaaacaccacaataagtgatatattattattgatgcaatttaatatcacgtcccatacatttatatttaataaataattaaaaaactactaatcactcataacccaccacattaatatagtcaatgtatttaataacaatgctc

SEQ ID NO: 68387 - DNA, 813 bp, Cannabis sativa
gtacatgttggggcggttaggcctagagcgtacgatctttggggacattgaggcttttgctgtatagttgctgggcggcaaacttttgtatatgtgaatagaaaacttttataaagtattttgtaaacgggatcccgaaatattatatatgtaatactttaagtttttaattaattaaaaaaattttaattaatcatgattttcaataacctcgttgattagcaacgtgctgcacagtatgttaaaaatcacgctaacacgcctatgctaattagggtgttataatttacgtacttatattgtaggcaccgcctcctaatttttcctgttattttaattttgtgatactttgtgtatgatttgctcggaataaaattctaaaaatcatttgtttaaaagaaaattgttgtgggttgaaattaaaagttaaaatttttacatcatggaaccaaatcaagtaaatatggaagaaaaaaactctcattgatactttttctcatatttctcctaatcgtcaatcatgcattatttttcctaaaataaatgctacacattttgagctgacaccttccctaattcaacttttgccatctttttatgggttagatagagaagatccatagatccatgtgaaagattttgtagaaatttattctaattttagatttcaaattttttttgatgaatctattaagcttatactttttccattttcattaaatgataagtctaaagcttggttaaattaactcccagcccaatctatttctacttgggatgaattagttaataaatttttgtccaaattttttc

SEQ ID NO: 68388 - DNA, 1013 bp, Cannabis sativa
tgtacctcctcctccgcactagagcaaccgcctccaactcaaattctgcattaaaactctcaactcctgagcccatcattggctcaacatcaatagggggccaaggggtctcctcctccattccaggtccaccccttatggccaccatggccacgtggggatcatacagagcttccctaggcagtgtttgttttgttctggccatcactacaaggtaaataagggacctacgcggctatcacctcccctattcaacaccctacactactacatggaaaaaataaggggaggtgagcaacctaacaaagctacaaacatgtttaagtcaacgatacccaatggtaccttccaagtaaaacaaagtatataaggtcgattaatgaccaagtactgtcttaagtacacttactaagacatatagtgagtcctaagttgcataattgactataatggactcactacctagccttatacaaagtttccaagagaaaccactcataaggccacagttgtatatgcctccaagtctggcatgagaccctagctgaggtcaaaagagggaaaaaattggctgcccacttggagccttggccttagctggccaggatttgaagtcctagtggccggctagaccccaagatcaagtctagtggctgtccaggagccctagttctaggcatatgctggtcagcctccctatggtcagccagaccccatgaaagccacctatggctggccaggcttcaaacaaagcctccttggtcgaccaggatctgcaccaatcaaaccatgtgttttttaagagttgaaacatgttcttcgtgttctttatgacttaaagagccaagaatcacaatgaaggtcagatttagttctttttcatctagaaatcacacattatctatcctaaggctatcatgcaaattgaattaccaaaaggactaaaatctaacgtaagaatcaaagcatgttgaaagcaggaaatagtgttcatgcatccacagaaaaatcaa

SEQ ID NO: 68389 - DNA, 639 bp, Cannabis sativa
ccccacactaagcttctttacacaaaagacgcatgattcccacatttagcttccaacacccctacattcggatggtaactagccttcaatactttgctacacaaagaattcgggtatcttatacacctccatatttgcttagcaagaagggcttgattgaagagacccaaatcccaaaatccaagaccaccttgctccttgtgtttgcaaagaacagaccacttacaccaatgaatttttgcatccttttccgacgatccccaccaaaaccgggctgccatactatgaatactattaattgtcttctttggtaaacgaaaacaactcattgtatacgtaggtatagcttgaacaatcgccttaattagcacctctttcccagcagccgaaaagaatgaccctttccatcccttcaacttattccacaccttattcttaatgaactcaaaatgttgcttttttgttcgcccaacaaaggatggcagccccaaatacttcccatagttatctaccactttcactcccatgaaagtagccaagtgagtccgaaccagagcagaaacagagcgaccaaaacacatctctgatttatgaaaattcacaagttgaccagacgcaatagaatatttttccaacaac

SEQ ID NO: 68390 - DNA, 732 bp, Cannabis sativa
caaaaaaaataaaaaaaaatgtgattcagtctcttgcattatcatttaattattcccttcagcaaattgggtttattctattgttctcttttcctatttaataattgtttcaagtctctttacaagcgtggatatattattgttctaactagtgtcaaatataataatacacttaaaatatctttttgttttgtgtatatacacacatatatacctgcatctgcatgctgattatagctaattaaacatcaaattaagtattaatcttgtgttgaattaattaatatggcgaacaaagttcaccctggagaggcaagtagttcctccagtactacaactgctagctacgtctcctcgaagcaagaaactttcacaatatggatgaaatctcttatactcaatggtaaaggctgtaccgttttcgattccaacggtcgaattctgtttcgagttgacaactacaactgcaaatctagagacgtttttcttatggatagcaagggtgaaatcctcttcgccatactcgaaaaggcaagatatatatgtaccctcaattttatatttgtgtgtgttgtataaatgttttgactgtcataagttttgatgattttcagaaaaaattattagtgttgaagttttgggagggacatagatcgaagaagccagatgaggaagaggtgaaggaaaagggagcagcttgttttaaagtatcaaaaaggtttgggatttcaa

SEQ ID NO: 68391 - DNA, 1393 bp, Cannabis sativa
aaataactgttagcaaaatgtttaggcaactgtaatgcaactgttgtgaaacattaaaaatcagaatactattgtgaaacattatttctcgcatttcatctactagtaatttttcttttccaagaagagattgcctaactttttgtactgcttgtcaattaggcaaatctcataggcttagcttttccaactctgtatctcgggcttcaaaaccctttgaattaatacattctgatatttggggaccgacctctattacttcaatcactgctgttaaatattttatcttatttatagatgattatactcgtttctcttggttttatcttctaaatacgaaagacgaagcattcaatacattccttacatttaaaaatcttctttccactcaatttcaaagcaccattcaatcagttcgcaccgattggggtggtgaataccgatccttgtctcggttcttcactcaatatggcgttcgccatgatctctcgtgtccccaaactcctcaacaaaatggccaagttgaacgcaagaatcgacacgtcgttgaaaccggcctcactttgttagctcatgtccatcttccccttcatttttggccttatgctttttctatcgcagtgtatttaatcaatcgccttcctactcgagttctccattatgacagcccctatcacttactctataacaaagctcccaactattcactactctgagtgtttggctgccaatgtttcccctttcttcggccttataactctcataacttgaatttcgctcctctccttgcacatttctcggctacagcagcaaacataaaggctatctttgccttcatcccacattcgggcgtctttttatcactcgtcatgtcatttttaatgagtcatgttttccctttgccactccttcggctgtttcaccacctactcatacacctcactcagttattacctcacttcctctctcggttcccacatcaaccaatgttcccaatgttactcgtactcatccatctccacatacttcccctccccatagtccatctcctaatattttgtctcctcattcatctcatcatacctaggcccgtcctgaaccactccaaaattcctcttgcccaacacatgtttctcctcttagtcctctcattactactcctttctccaatgtatcttcaacttcatcttccacagcctcccctcccaccattcctttgatagtagatttacaaggcccgtgtgcacttcctattgcccatactaatgtacatcccatgattactcacgctaaattgggcatttccaagcctcgtttgttttttagtgttgttgcaagtacaccggttgaaccgtctaactttcgggaggctagaaaagaccctaactggctt

SEQ ID NO: 68392 - DNA, 731 bp, Cannabis sativa
tgttgctgtggcaaaaaattcggtcattgttgctgaaactgaccagggaaaatatatggattttgtgcaccgaaaaattgatccggagaaggttgctgcattgaaccccccaaaaaacatcggttgctgagatgaactcccaaattgaccaaacatcggctattgagactgtgatcctcccaaaaaaatcagagtagaaaaattgaggagactgggaggagcgtccaaacatgttcggaataagaggagatttggaggaacttccctgcacattaggagagaattgttgactctgctgaaaaaggttgttgtttcggccttggacatgttgcactaccctgaggttgggttggtaaatattgttggaggaaactctcaaatcgcgggtcatacatatcagaagtgtcgtgtcctggtggaaagcgttcatgcaatctctgaaaaattttagccataataccaacatcttgagaaagagtagaccttacttgagattaagtttgaatttggcttgaagagctagatgctgatttttccctttctttactatgttgtaaccgactccttgaatatagtcactcttctcaccaaaaaccttgctcatgaccttgtattggatgtcaggcggcacctctgaggatccagaatcactgccagattggctttgaagtctacttctcgccacctcttcctccatttcatgggtgagttcatcataaccatagataaaa

SEQ ID NO: 68393 - DNA, 1066 bp, Cannabis sativa
ttcgaagtcaactgataagtgtgtactgttcttcaacatattgcgaggcaacaaaaagttcaagtggacaaaagagtgcgaagaggcattttcatagcataaaaaggcatgtcgcaacgcctccagttttggcaaaaccaataattggagaggcgttatttctttatttagccatttcagaagatgtgattagtgcagttatagtgcgagaagagggcaagcaccagcaacctatttactacgtaagtaaaatattactaggggcagaatccaggtatccccctctagaaaaactcgcattatgcctagtccatgcgtcttgcaaactatggccatacttccaaactcaccctataaaagtgttaaccgatcagcccttgagacaagttttatcaaaaccaagtggttttggaagattgataaagtggtcgattgaactggggcagttcgatataacataccatccttgaacatccatcaagggtcaagctttagctgacttcttgatggatggtataactctagaagaaatcccacctgatcagcgagatgcggaaacctggaagttatatgtggatggcgcatccaacgaatagggttcgggtgtaggggtaataataatattgccggaaggctttaagtttcactattttctgagattccaatttgacgcatcaaataacaagcctgagtatgaagccttgatttccgacttaaagatagcagaggccttgaaagtcaaaaatctcatttatcatagggattcgtagctgatcatgaaccaggtccttggggaatatcaggccaaaggcttgaaaatggcgaagtatttagagaaagtttgaaagaacttggaaagatttgattactttaaaatcgaacaaattttgagagaacaaaactccaacgccgatgccttagcaaagctggcctcgcagaatgatctagatgaactaaatttggtttcgatagaaatgctgagcgagccaagtatatgtgaaactaaagacgtcgagatgatagatagctctccaacatggatgacgcctattatcaactatttact

SEQ ID NO: 68394 - DNA, 1613 bp, Cannabis sativa
gatttatatagcttaacttaattaccttaattaagatatccctattatataatatatatagcttaactaaacttaaagtttatatagtaagtgagtagtgagatctcctcatattccttgctgctggttgctttcgaattagctcattctacatatatcaatatataaatatatataattaatataacatatatttgttggaagttggtaggtatatatatatatttcataattaaacttggtacatatatatgtatataatctaataatatggttttgctagattgaagtttcaatcccaaagtaaaatatatattaagcaaaatataatccaattacctgaaaattctaatgtcattattaattacttcatttctaaaaatagagtattcaactcttaaaacaatagtaaacgttttcttattatatatcagcattttcttattgtaaagtgtatattattaaatatttttggccagcaccctcataaaatgttgcaatatttttttatttttttcaaaaaaaaaaaaaaatcaataaaacctatacgttgcccttttatttatttattttgcttcttttttacataaaataataattgaaaaaaagggtacaaataggccaatactatttcctaaattattgacttctttagtttgagaaaaacaaaaataaattcaaataatcaaaacaaaaattatctaccttaattaattatcaacagcaagaaaagaaaaaaaaaacaaagaaatccattaatagagatttttactttatcttttgttgaaatgtgacagcccaatgattagatgacggctaaaatatcattattatgtgacagaaagaaatgaaatgaaaggaaatctaacggtgataaagtgagctgtgacagtaaaagaaacagaagtcaggtgagtttagcattgttatctcataagaactttccttggtttactgacctgtctcaaagactcaaatatataataataataataataaaaaaaaagtacggtataattggaataaaataaatataataattatagaaatgggtcccacactctctgtctgagtctgactctgttttccggctcaatttcccaactgctgctgaaccttagttgtatggtttccacgcacaattatgggacgtgtaaaacacgcaccttcttaaccaagagtagactaattccaatttaatcaccaaatctttctagaaaattacatcttattaataacattcactaattttttctttcaatgaagtaaattaagtagtaatataagggtatgtttggtgggatggagggagagtaggatggatggagaggttaaagaggatggaaagtaagagagatagagaggactgctaatatcttttgtattgtttgatcttcggtgtgaggtgggaaagatggagaaaaaattgattagtaaaattacaaaattatccttttaaaaataaaattttattatttttttaagggtagttattgtattttgtaaaatgtattttgtcttttttacaatccttctaaatttggagggattaaattttgaaggtttgtaaggagaatgtctccctccatctctcctctccctcttgccaaaca

SEQ ID NO: 68395 - DNA, 705 bp, Cannabis sativa
aaattttattccattccattcttattcccattcttattcttatattttcattcctcccaactaaaggcctcctaagttctaactatataaaagaggcttcctataataaataatagatagaaaactttttactcctttattaaaaaaatttaatagtattttaatctaaaaaaattttattttattaaattagtttaaatttaataaattcaagatataaaaaattgttcaaatattcaaataatagttaatgtagaaaacattactataataaaataactctgtattttaacattttacttattttagttaaaatttagttaaaaaaataaaaagtactttcttaaatgtactacacacttttcaaaaaaaaaaatgtattacactcagactgaagtttggaatctgaagctaccgaaatttaacacgtgtcattacatttggtaagtcacgtcacaatcattttattcatttattttattttaaaaaaatattaatattttttatcactcctaaaatatgtaatataaagattaattttatatacaaatattacatgtatgttataattatgggtgcaatcttaatggataaaatataggaaaatttatatggtatactaatttttgccaattttttataaaaatactgtcaagtggtattttttacttttttactgtattttttttaagtttcatactgcag

SEQ ID NO: 68396 - DNA, 1331 bp, Cannabis sativa
agaggggtcatggccatctacagtcggagactggagggaaccaaaaacagagagagaatcgaattggccaaactccaagttccgattcgcctcttgagccgcaaaatgggccacacgattgcaggatctcgggatccaacaagcttcccagaggttgagctgagtaacggtaaggtgaaacttacttacgatttcttggatgttatgatgcagcagctttatatcttggggactgaggaggatggcttcaatagcattagacgaatcgctttggaagataacattgttgaagccgagttttaccgccgcagctgctccctcgtataaagccgcaacctcaccagcgagagaatcgcagtgctggcatttaaaagtgtaaattcttttgaattggccattgtgatcacgaaagatagcagctcctgcagaatgattggtgctaattgcgatgtctgtgttacaggtgagccagccaaccgggggagggagccactctcttagctggttagtaggattggaatgtgcattcagaagctcaacaattcggttgttgatgttggtcacggtagcaggaggtggggttgatttcttgtcatgtattagaacattcctggcgcgccaaatactttggaagatgatcgctgcccctcccaggaacaggtggtaattgacattagaaggtctatgagcgtccgtggcaaaccaattcaaccaagtctcccaatcatggatgtttagcacatcagttcgaacttgccagctacacccgaaccagactacacgagcatatgggcagtcccaaaaaagatgaaaagatagttcaaccattctactacacaatgggcagcttgtatctgggagcgagagcataggtccaagttttcctctagtcaacaggctatcggagaggattttccaccaaaacattttgagtctattgtgtatcttagcgccccaaatggtcttccatttccttgaactatcctcggtcgaggataggttcttgattgttcggtaggctgacttgatggagaagtttccatttgattccgacatccaaagccaagagtcttgaaccggcctactcggaagagtaatgttgataattcgccttgcatcgtcttcatggaaccacctattcataaggttctcatcccaagtgttattgttgataaagttgcttaccaaactcactccacctgcatcctccacccgaggagtgggaagggggttcgtccctggaacccacggatcaaaccaaatggacgtagtattcccgttcccaatcttacggcaaaggcccttcgtgagatgtactcgagctttaagta

SEQ ID NO: 68397 - DNA, 1120 bp, Cannabis sativa
gattctttgatggttctatttctaaacctcatattctgaacataatctttataatgcttggattaggaataataacattgttatatcttggattctcaattccgtttctaaagaaatttcttctagcttgctttacgatgaatctgcagctgctatttggacagatttaaagattagatttcagcagcagaatgggctgcacatattcaatctaaggaaaggtttgatgaatctccgtcaagagaaccaaaccatcagcatgtattacactcgactaaaaaccatatgggaagaattgtccacctatagacccaaccgcacctgcaacggatgcacttgtggtggtgttaaaaggctccaagatcaccaccacatggagtacatcatgtcatttttaatgggactttcagaccatttttctcaaatacgcagcaacattcttttaatggagccattacagaagccaatcgtgttttccatcttgttactcaataagaaaaccagaaaggtaatctctcttatggaaatgattccaacactaatatggcctttgcttttcaatctgataggaatgccaacccaaagtatgatactcaaggttccaaaagtcatcccctaaagaaaaacaggcccttttgcacgcattgtaacgtgcttggccataccattgaaaagtgtcacaagatccatggatatcctccaggattcaagaacaacaagtctaaggatgcctcggccaaccaggttcaaaccagtacagattctaaaagttacagtgatgaaggacatacgattttgcctcaactaaatgcccaacaatatcaacaactcttgaatctccttgtcaatcaacaaatcggtatgcccaatacagatcctagctcctcctcaggagctacaggtatcattctatcccaccattatattgctccaaatgatgattcttggataatagattcaggagctacctgacacatatgtaacaatataaaattatttcaatatttgtctcccatattcaaaaccaggttaattcttccaaacaatgaatctatttttgttaatcaaagtggttccattgctgtgaatgagcatttaattcttactgatgtgctttatg

SEQ ID NO: 68398 - DNA, 631 bp, Cannabis sativa
attatattacaaatatatatttcgtgcagtagtactgtttttgggtgtggtatttcgacggttctctatagtgcaatagagttctgatacaatgtgttcgactgggctgttttatcctggggacaacgagactgataatctgcttgcacagttctaggaaatgctacgaacgtcttaaagagagtgacctagtctgcgactcaacccagattttaattcggtaaattcgttccttttattttctacaacaactattttcaacaattttaagacatgccatgactaccaatgataattctggtgttattgatataaatgaatctttttcgttttgagtgaaactattttaaaagatggaaacagaaaatgttatttctcctcacgatgaaaaaggttgcttatgttctgaccactgacgaacctgttgtttgtaatactgctaaggatgatgaaaaacagaagcaaactactgatttagcaagctaggttgagaataattttctatgcaaaaattatattctcaatggtttatctgacgatttgtataactactataattctgacaaaactgcaaaggaaatttgagacgcacttcaaaagaaatacgacgacactgaggaggctggaacta

SEQ ID NO: 68399 - DNA, 1490 bp, Cannabis sativa
cacgtgtacacttgcgtatactgtggtagtctattgtggagatacggagtacaaagcaaaacgatttttcactctaggggtttaaccataccaaacttcaaagtgagtttagttgtaaattacttttttttttaataaaactattaattaaatatccaattttacattaaagttttgcaattgtatgttaaagtacaatgctaaaatttggtgtaaatttaccacaaaattactttttgtgctaaatattttataatttttatatttcttattggagatagtctaatatagctaataaattctaacattctctcccttaagctgaagaataaatgttaatcatgccttgtttgttacaaagatagtcaatccacaccccattcacaacctttgtaaaaatatctcctcattgttctccagattttatatatcttgtggagatcaagccttattgaattttttcatgaacaaaataacaataaatttcaatatatttagttcactcgtgaaacacaagatttaaggaaatataaaaaataacttggttatcgcactagaattttgcaagaactaaagttctaaacctgaattcaaagctgataaatccatacaatcttacaacatgttagcgaagtatatgtgagtgtgccaccttaaatgtagcttattattaattagtgacatatgctattatttttagtgacatatatgtgagtgtgcaaccttcaatgcaacttataagtagttagcgacgcgctggcgaaatagtatgatatattttacgaaatataggtaaatacattatatttaacttttagttatttactaacatgctagcaacaatatttaatatgttttgcgacataaaatgaattgacatacttaaatgcagtttgtagttgtttagcgacatgtttgtgacaatcttcgatttagcaacattaattgtgacatttagcgattatttatcgattaaaatttagtgatgttttgcgacattaaatatatattttttctcttttttatttgcagttggtcgtaaagaagtgtttgtgcccccaacttactgaggatgagtattttaggtccattaatgagggtaaaacctctctttgttttgggatggacatcgatgacacggtggatgatgatggtacacaacattcgatgtttgaaacgcaagccaagaccattgccgtggccgtgggtaaggcgaatataattccaccacagctgctttcggaactagccgagtcatctgctttgagcgctaatacaccagagtatagagcgctggtggagaggttggatagacttgagaagcaacagtctgccattataatgtcacatgcagagttattgaataaccagactaatgtgagatgtttacttctagataatcagaaagaaatgaaggagttcttcatggctcagttgggaaacttgatgacattgttgaaggagggggcatcacagccacaaccatccca

SEQ ID NO: 68400 - DNA, 1893 bp, Cannabis sativa
ctgtagaagtatctcttaatacctctgcttttaatttttttaactgcttcatatctaatgacaatggcccaagtttccacttcacgggtttttatggcgctccatctgtctgagatagaacaacttcttggactctccttcgtaggttggcagatgttgctctcttgcaacctttgttggtcattggagatttcaataaaattctttcgaatcaaaataaatctggtggttctcttcaaagtgaaactaaaatggaagcttttcgtgttactcttgactgctgccatcttattgaactttcatttgaaggtgactctttcacttgggcaaagagtaggacagcggtaaacactgtcaaagtgcatctcgattggtgtttcgtcaacaatcaatgggacaaccaatttgctgcacctgaagtaactcatctggactactaccactctgatcaccgtgttatttctacttttttcgccactaggagctgtactacaccatataaaaggggctacaaattttgctttaaaaagttgtggttataggacccagaaagtcaagatataattgcccaatgctggactaataacacatcagctaatcctatctctttggtgcagcacaacctagattcatgtgcaaaaacattgcagcattgacacattaaaaaatatggcaggcttaagaacaacatcactgaaacacaaaaaactttggcttcccttaacaatgctaggcacttgtcaaccgatacaacttcggccataatacacaatgaatcaatccttgatgatcttttagaacaagatgatatatattgtcaacagagatcaagagttgattggatgcacttaggagataaaaacacaaagttctttcattcaaaagcctcagccaggaaatcaaataataagataacctttctacaaactgaaaagggtgttaaagtgacaacaaaacaagatatgggagaggttattcaagtttattttgcaaaaaatttccaatcaagcacgactgatgttgatgctcttgctgcaactgtcaacaaaattcctacaaaagttacagatgacatgaatcatgatcttctcaagccatttaatccgattgatgttgaacaagcactaagtgtatgggatcagacaaatcaccgggtattgatggcatgtctgccatgttctatcaaaataattgggatgtggttggcaattcagttactttcacagttctaagtgtgctcgatggtggggctgacccgacaccactcaactctaccattatcactccattcccaagataaagaagcctcattacatgaaaaactttcgtccgatcaacctatgaaatgtcatctttaaattcattaccaaggtgttagtggctcggctaaagcctattcttctaagtgtcatctctgaaacacaaagcgccttcttgccaaattgtcttataacagataatattttggtggcttttgaattaattcatgggattaagaaccaaaccttagggcggaagggggtggctactttgaagcttgatatgagtaaggcatacgacagagtggaatggagattcatagaggctattatgagcaaaatgggtttttctaaccaatggatctctcttattatgaaatgtatcacaactaaccatttcacttttcttttgaatgacgaagcaacaagttctttaacaccaactcggggtctccgacaaggttgtccactatcgccataccttatactgatttgctttgaaggtttattacgacttttgaaacatgaggaagtattgggacaactacaaggttaccctcttacttgacgtgctgcacctatatcttacctatttttcgttgatgacagacttctcttttgtaatgctactgag

SEQ ID NO: 68401 - DNA, 956 bp, Cannabis sativa
caactcaacacgcaggctggggggtcaatatgtacattgctggagaagaccgccatctcatggttgttctaactttgccttacccttacctacaccacaaagcacttgtgagtcatatggactcagcaagaaaagtaataaagaatgatacattaaatagctaattatacattttattatcacaaaatgattaaactataacattcaacagtaggtaatataatcagtcatgtgaatagaaatagatatgctcatatacttgcattgcctaattaggcaagcccatgtcataatgcgatatcatatataatatcattgcgccaccgaatcaggtgagcccgtgcaacaacttgacactaatatatcgcatcatctaatcagacgatctcgtacctacgctcggtactcatcatatgccactgacacccgtacctttgcctggtacgacgctagatatattgcatcacctaattaggtgagaccatatattgtatccatagtatcattacattatcattgcctaatcaaacaatcgataatttcagaacatgtcatgccatgtggtacattatacttttcttacctcaagttccaaatcaggtatgttggccaacctgcttagagaacgatcgataatctcaggcccaatgtcataacaataataaatcaataagtgtttatcccaaaacaccacttaacactcgcgtaagacaatctaggattttttaccaaatttcgtggtatacatatactaaaataaaacttatattttgtctctaaaacatacaccatatcgtagagctcattgcaagcttcgtaacggtatatagaacgtccaaaacgaacacctgactaaaaagttatgataaaaatacgatttctaatctcctatgaatttctaaaaactatgaaacacgaaaatctcaattttcgcactcaccgaaacactaccaaaa

SEQ ID NO: 68402 - DNA, 834 bp, Cannabis sativa
aagaattttgagaactattcggtaaaattaatacgcaagtatacacaatcgaatcaagtaatacaataatagatagagtatcattctcatgagaattgattatcaattaccaatcaagtattctttagttctatttcattaataaaaattattggaaaaaaagtaaataaagcaagacaataattaaaatttaaagaaataagacaagtattattatgatctccaagtatcctttattttacttcctaatgcaattacccaatttctcttcttcctattcagttgacaagttgagttaagtagtttataatctggtaattaagacttataaacccaatctatgtgaaaaccttttatattcttatagtaaagtttaatcacaaagatagcattaagcaaaacaactaataaaatcatacaaataacttaggtactttcgttataaattaattcgtatctataacaattagagcatattcaaatcttacattttagaattttaattcaaattcatagataacaattatagatggccagtaaataattacaaaattaaaatagattgtataaaattgaattaaaagaaaaaaaaaattgaacaattacattaatccataaaataaattcaagtggttcatataataattcttataagaaaattatctactaaaagtcattctaaaataatagaaattcaattaaaaacatgaaagatagagataaatttggagtcccccaacggtgtcttctgctcgtagccttccttctatgcttagaatttttctaaattttcgagatctaagctctcaacccctttaaatatacaattagtaa

SEQ ID NO: 68403 - DNA, 1386 bp, Cannabis sativa
gcactgagtacaatagtttttgcgtctcgtttttatcatttggaagttgtccgtcgagtaagtaattgataatagaagtcatccatgtaggagagttgtctatcatatctacctcttccatctcacatataattggcttgctaagcatctccaccgagactaagttcaattcatccaagtcgttctgcgaggccagttttgctaaggcatcggtgttggagttttgttctctcagaatttgctcaattttaaagtaatcgaatctttccaagttcttcctaaccttctctaagtacttctccatttttaagcctttggcctggtattccccgaggacctagtttacaatcaatggtgaatcactatggcatatgaggtttttaactttcaacgtttcgacaatctttaagccaacaatcaaggcttcatactcagcctcgttatttgatgcgtcaaattgaaatctcaaagcatagtgaaacttaaagccttctggtgatattaatattgcctctgcacccgaaccttgctcgttggatgcaccatccatgcataacttccaagtttctgcttctcggtgtataggccgaatttcttctggagttataccttctattaagaagtcggccaaggcttggcgcttgatggatgttcgagggtggtatgttatgtcgaactgccccagtataattgaccattttatcaatcttccaaaagcatctggttttgatgaaacttatatcaagggctgatcggttaacacttttatggggtgcgcctggaagtatggtcgtagcttacgagacgcgtggactaggcacaaagcgagtttttcaagagggggatatctagattctgcccctagtaaccttttacttacgtagtaaattggttgttggtgcttaccctcttctcatactatagctgcactaatcacatctttccagatagccaaatagagaaattgtgtttctctagttatttgttttgccaaaactagaggcgtcgctagatgcctttttatgctctgaaaggcctcttcacactcttttgtccactcgaacttcttgttgcctcgcaatacattgaagaacggcacacacttatcaattgacttcgaaatgaatttgttaagggcagccattcttcctattagagcttgtacttccttaggctttgtcggtgatgacatgtctattaatgccttgattttcttgggattcgcttcgatactcctcgcgttgactatgaaccccaaaaactttcttgaggagactccaaaggaatattttttcgggtttaatttcatttatacttctttaatattatgaagcatttcgtgaggtctgtggtatgattcccactttttattgattttaccaacat

SEQ ID NO: 68404 - DNA, 1650 bp, Cannabis sativa
aaaaaaaaaaaaaaaaagcgaaagctccgtccctccttcgtcctcctcttcccagatttctcacaccggagctgctcagtcatcggcgtcgcgcagggcaggtcggtcggcggcctcaagctattgaatccctcaatctcctcgccggaaatataagcttctgagatccgaggtcagtcattgcagggtcccatttgattacatggtgataatttctgtaatttatatatatattatttatgcatagtgaaatgcatatgttgatcttgccaattacaaaaatgattttgaccacgaatgacattaagattaacaaaagggaatttgctttgtcttgaggagaaggcatgtaatttcttttttattgttattaaaaaaatttattatactcaaaggtaattaaataggcaattgtgttgctctctggctgtagccttaatcaagatttgaactatttttttaataaagaagacaaatttataatgtagatccttcatgtaatggaatttgctaatgtatatgtatgagtcagtattgatagtattcagatttacaattaagatgaaaattagtatcatatgatcctttctattcagtattactccatatttttaaatataagaaggaaggaagaaaaatagaactttgcaaggtttcatttgtatgaaatattacactgaatttggactttaggatttaggagttgagggatcttcactcatgtaacagtaacaattgtttgatatcatcttgaaatgttttaattttagacatcttttttcaattttttttttcaagtaaatggaaaaacagaaatattatttatttatctcttgctgactcaactgaaaaatgtttccagtttgaagaagcagggttgaaagttgaagtgtcacagcgaaaaaacaaaaatgcaagactgtgattcatcaggcatagatcaaaggtttcaagttcgaaggctagaactcttggacaaaagaaaaggtttcatagagctattgcaacaactaactgtttgtgattctgtaactgacaaggactttgaagatagatttaaagagttgagctcccttggagatgatcatgttattgctgttatagaagatgagcaatctgggatgattgttgcgactgggagtgtgttcattgaaaagaagttcataaggaattgtggtaaagttgcacatattgaagatgttgttgttgacgccaacactcgtgggaagcaattgggaaagaaaattgttggattccttaccgatcatgcttgctcaacggggtgttacaaggtgattcttgattgcaatgttgataataaaacattttatgaaaaatgtggtttcaagcagaaagaagttcagatggtgaagtatttcatttgaaaaacatttgcctctaatttcaaaacatcatcttttgagtttttgagccttactgagaaattagttttagtttgaataagtctcttctagaaatgaggaaccctgactacactgcacaaatcaatattggcttttctttgtttattaccattattcatattctttgcttacataaaaatcagaatagcttcattctagatcttgcaattaccatctctataatttgtgcaaaacaaacaacattgaatcaggtctttcgatctat

SEQ ID NO: 68405 - DNA, 1190 bp, Cannabis sativa
catagataccgtaatttgagtaaaatattttcaagcctggtaaccgtggaacttgacgggaggttagatatgtaacgacaataaagatgaattgaattggatttgtataccggactagtttagagttttggattgttggttttgcggattaattatgagatgactataatacccctagcatttaatttaaagttcaagggttatgagagggcaaaatggtcattttgatgataggcatttatatggttttatttaaatcatgttgctgaaattaaaattattattagttgggattatataaaaaaaaaagaattaaaaatttattaagttaaaatatagtgaataaggggcatctatcttcatttttccctcattctttttctttcttgcccgatcctcttaaggagctgcctttaaggatgattttgttagaaaactcatctaatgtctggttgatttggttggttgtggaggttattaaagcatcaaggtaagttttcggttttgtttccttaaatttcttaggttttaggtttgatattagttgagattttggtaatttcaggattaaggtattaaactgagattagaacaggcttctaggcttaaattagagtttgtttatgaatgatttggttagaatcagagctgttagtgttgacttaatggaattttagggtttttaagcttaaactttacttgactatgttattttgattatatggataaattgttgtgaattgatggttggattatgttgtattggtgatattggattgatctagaggtgttgggcaggtgtggttcagatttggttcgagtttgaggagaaaaaactcaagactgctgcactgccagaaccggtcgaccagttggttctagtgcagcagaactggtcgaccggtttgcctgttgggggaaaattttcactttcctttagggccagttttagggctcggggtgatttccgtgttcggtatagattgtctaaaagttgtaaaacttattttggaactattagaatctaaggtttattggttatgggaattagggttattcccgaaattatggattaaggtatttattgaatgttattgttgtgacataggactcgggatcgtcaagctttgtttatccacttaggtcggcatgcacgtgtaacaccctaactagcataggcgtgttgacgt

SEQ ID NO: 68406 - DNA, 2391 bp, Cannabis sativa
tctctctctctctctctttcatcaagaacatttgagggctacagtccaaacaattgtacggatttgtaaacataaaaaaataaaaataagaagatttatttaaaaaaaaaaaacagaaaaacatgaagaagaagatgaacatagagatgtaaagcttaagaataaaggggatcatgaaaaaaatataaaatgatgatcatgtcaaatgagggggtaatgtgtgattacaaaataaataataatatataaagttttttattttattttatttgttattttgtttaaaaagtgaactgccaaccatgaacctcatatcacaattttttttaaaaaaattaattaataaaaaaatagaaaaatgacatgcaaaaaaacatgtggccttatggccacaaattttatactatttaaaaaagacagtataaaaccatacaatatttttgtaaattataccttgtggcagtataaaaataataaaatgtcaaaatataatatatcatgtaaaaatcccaataattataaatataaagtggaccctagtgtaataatgtcaaattgtttattgtaaaatattcttagtttgagagttttttttcagctaattttgtacactggacaaatagaataattgtagaaaaatagaaagagttgtacaatttaaaaacattattaattaggcaggtatataaatgaagtaatgcattaataaactaatagtacattatatctaaactttatttacttattaattaagaagaagatatgattgccttgcagtgcaacataaatagctaggtagaaataatcatgtagtacagctttgattgtttaatatgtgacgtataggttaaccaattatatatattatatataaatatccttataatgtaaaatttgttagtatcaatcattgactttttcatcctcatccaaaatatatatatttatttttttatatataactaggtgaggttagcacgtgcaatgcacgtgtcaaactctttttgttccattttaattttatttttatttacctaaattttattttataaataattgtaacaaaaatataaaatctaattttgacatcttaattgttgtacaaattataaattaaaatacatatattaatattatacaagagtaagaacaaatttttaaattgagtattttagttatatataagtatagtcatatataaaatggttattattttgatatattttacacattatttatataatttgtacataatttttatattggcttataaaaagaatcaaaaaaatcataaaattgtagacttattgatttttatatagtaagcattcttattagaaaaaataagaaagttaaattaatataattttcaattaaaagagatttaattaaatttattgaggtgagtagtaataataataataataaaaaataagaaagttattttttttattatatttaagtgcaaaacaaaatattaaactttgcttctctactattatattcacatcttagaattatcaaaaatattatatgagatttgactatatatatcacattatatactttaccttttattaatataaatgtaattatatatttttgtgaggagcaaaagtggtatggtaatattattaccacacttttataatagtaatatatattttacatatatggggatatgattttgtcccgtgattgtactttcacggaatgcattccgtgatgtacggtagccgtcagatgagagacttatttgatctgacggttgagattgatctaggggtaattagggttaaaaagtaaaaacgtaccttgacactcatttaatgtacctcgagacccacctaatgtactacgaaatacattccgtaaaagtacattacgggacaaaatcgtgtccctacatatatgatatggatctaatgatagaattattagagggatatatattcgaggaagaatgaagattgttgtagttgaagtaaatttaatcacaccatataaaacaaaataaaaatgatgtaaaagtagtgatgacattaattggcatctatcttatcgtaagactgcgttagaaagaaagaaagagagttgggcggaattacagagatagaccgaaaggtggagattggagagttatagttattgaccagtcaaagggtaaaattattaatacttactttcttgaaggataaaattgtcttcaaactatcacctcattaccacacttttataatagtaagaaatattgttatgtaatagaatttttagtttgacgatatttttttaaatttctactttaattttaacagaatatttttttttattaattttataatattattatgtatctttaaaaataaaaattatatggatattttatataaa

SEQ ID NO: 68407 - DNA, 678 bp, Cannabis sativa
catgtcatgaaatttttattttttatctaaaaattaatttaaatatactaataaaaaatgacacgtagataataacttcacaatgatgagaagttctaaaaatataacttttaagtattattaccgtaaaaaatttaagaatttatttaaaaaaaaaaaattaaatttaaatatttacgtcacaaattatacatatacttttttctgtaagtttatttatagtctataaaaatgtagtgaaaattacatctagtattattatttttttacaaaaaagttatacacttttttatttttgatagatgtatggtagatacttagggtatatgtaaaatcttatacaaaattttaaataaaattctgaataaatgtgattttttccttcaaccatagcctatacccttatataaatttgccctctgattttctttttttttgttaaaaaaggttccccgaattataataattgttatttagaaaaatatctaaattttacattaattatagatggaagtaattgaaatatatcttagtcaattttcgaaagaaataacattatatttcctgtaaatttttaaatttgggaaacacggagcaatattgcattattttttctttttattctttcttaggaaaaaaaaaagatggagcaatgaaaaaagtgtaataaagacataa

SEQ ID NO: 68408 - DNA, 1021 bp, Cannabis sativa
ctagccaatagagaattgggatcctcaagaatgtgtcaaacttgctttgcgaggagtgcttggctgttttgaaatatattttattcatacacgtttgaaataacttgtgttgaagcaagattttgacaccatcataaatgatttagaaattcacgaaaaattttgtaacactaatatttagcttcatataaaaactgcgaaaatatatacttatattgctagtgagaaaatgcatactcatattatcatatatttataactgttaaatttttatgccttaattaaaatctcaatttattgtacatattttattatcaataaaaaaacaaattccacttttgatggccaatcacattgttcacatgtctaattttattagggctatttttaaaaatatgcgaaaaaaaaataaaagtttgatatacatggcataaaaatctaagtatacaaaatatgacattttttcttaaaaaaacttaaaaatatgagaaaaaaaacattatatataagaagaaatgccattaaaaactttcaaagttttttttttcttttttaaaaaataaaatactggaataaatcaaatgatttttattttttttatagaaactgaagcaattctaaaataattttattaagacaataaattaataaatcaattaatttatatcattgaaaacaggttttttaacaaaaagacgatttcaaatacgaaaactcatataaattttacatattcttaaaagttctaagacttgactacaaacccagttgctgaagttactgtcatgccgaaaaagtcgtcaaaatttgctgagttgctaatggtgccaaaaaattcgctggaattggcatcatcaccggtaaaaatcaccgtcggagttattgtcatcaccggaatttgatgtcagactcatcaccggcgtttgacattaaaatctgtctcagagaaactaaccatatttattaggtaattagaaatttgaacaatgaacccaattatttaaaataacaaaaaaaaaaa

SEQ ID NO: 68409 - DNA, 2108 bp, Cannabis sativa
agaaccaaaaataacctcaatttgtaaaattcaccattgttcttgaactcaaacttgtttaacccaagaaataaccaacaaaaacaactcaattaagcttcaaataacatgatatgaacccaaaaatcaaaccctaaaggccactggttcagacaaagccacttaaagaaaaaagtttctagggttaccttagcttatcccttacaatagcttctgaattcccttaaattcccagctagaaatgatagaaaactggagatgaaaccttgattcctttgggttcaagaagtgtcgagagagagagagagggggtaatagattaatcttaatttctaacttatctaaaagaataacttttaattagtaacttaattattttacttcagttaagaaaataagtccaaaatgctaaaatccactaaaggacaaaaccacaaaattagacaaaatgaccattttgcctcttacttcaagcttagataataatatggcttaggagtaaaatagtctgataccataacctcgcctaactccaatattcaaaaattaaacttctgattgtcctactagataaaaggttctaacctaacccatgtgactctaacgaccatctgttgcatttttcattgttaccgaagaaaaattataaaaatattaaaatttcacatacagtataaataatacacttagagtctaattaaatcttcagaattgaaaaattataattttaatgcctattttttgaaaataggacccacaagacaaatttccatatataatcataaaataaaagtgtttaatgctaattgccctactaatattttctaagtatgcggttcttgcacatatatgacctctattatatacaataatgtcacttaaatatcgtactacatcagcaatctaaatcgagattgcttgcaccaaataacgggcatcagtgagtgtactagcaaccgttgaataaagatttcataactttaatatgttgctgactgttttattcagggataagtgacattaattctccgtacaatacaagtcataatcttatgtatgactaataaattttctgataattatatataaattattcaatataaaatattaataatttaacattcaagcatatatgaaaatattaaactcttatttataaatataaatatctttataggcttttcagtgcataaaccttaacacaaacatggcttgaaagcttcgagtaacagaaaataactgaaaaaaataataattattttctttttctaactaagtatgtgagagatgatctaggatgaacacgtggctaagtttaatgagagatgatccaacacctagcctgtcactataactcaaaactaatgattataagccaccagggagttcataaattctcaaagttgtattagctaattccaattctatgcaagtccttacaatgataaaactttcctagagttataacttttttcccatatgagaggaattgtcatctgtatgcaccttttctattttgatatgtccttgtggtaccttttcccttatgaaaaaatatttgatgtctatattcttggttctaccgtgatacatgaaattcttgtacaactgtatagcactttgactatccaaattaatccatgcaatatcttcaaatagctttagctctttcataatcccttgaatccaaccacactcctttatggcctctatagctaccatgaactcaacttctgtggtggctagagctatcatagataacaattatgttttctagctaacataatttcaacacactaagaactggtaggttcaggtaaatcttttggtgtgtttgtgatctgcataatctgaatcactaaacctttcaaaactaaccactccagctttttgtttatacaaaagtccttcattgatagttcccaccaagtatctcattaaccatttcattgtatgtcaatgatcctttcctggattggccatatatctactaagacaactgatactatgggaaaaattaagtattgaacataccataaggtacatgattgaccctactacagcaacatatggtatcttttccttctctttctttttgttcatagttt

SEQ ID NO: 68410 - DNA, 735 bp, Cannabis sativa
accaatcaacaaagtttagttttttccaaaagtaatacttcctcagatgtaggttgtttagcattccaaatcacctcatttcacatcttccaaatcgaccataaaatcatacctgcctctaagcattctgctgtgttccactctcttaacccttcttcccaccagctgcaaaaggtcattgcagcagttcctacagcaggaacctgaacctgcctctagcagctttgagcaaagttgcatcgtacaaggacatgtaaagatgttttcggggcagcaaaacacaaaggacattcataattaatagggacgtgttttgttgtaagttgaaatcgggtaggaaaactattggtgcacacacgccataagaaattcttgacttttggggggagtttaagctaccataaattcgtccatgcaccagaaaaaattggttgctccatgctggttttttgctgctgcagaattgcatatgcacttctcactgtgaacaaccctgatgattcctttctccaaaaccagccatcactttcaacatcagtcgacaaaggtatcttccacactagctcttggtctcttgcagtgagcacatcatttaagacatcgtcatcccattctacccacaaggcacatctgttgggactcagcaaaagggttaacatcatccattagccacgggtcattgaggatgctaacatttgaaccattaccaactaaccttctagccccagcccgaac

SEQ ID NO: 68411 - DNA, 1112 bp, Cannabis sativa
aagcaatgcctgctcaaatgccatgcctcctttcattttacccctaagcgagccacgctcatggctaactttccacacatggagagggatcattccaaagatctggcttattcaactctgctgatagcaaattcagcctaaccagaaacttcttccactgccaccattaatgtcaagttatatgtacatcataataggcttaaataactcataaaagatcaactaatcaaaagatgattcagcatacataaaaaagtattaattagtcatgctttgagattagcataataagatatttttaacaactactagctagttcttttgttttgcaagtttattatatttgatcagaaaatccaagcctttctctccaaatctcatatgacatcctgttatcaaagtaaaagaatttcacattacattgtgaaacaaagaagaatgtaaaatggaaacaaaagaataaaagttcatagattgaaaaaataatgtgaaagagagagtccaaattagatattaacatacatgtgatttcactaggtaaaatccaagtcaatcaacacaatcataatttcaagtgaagaatgtttaaaagttaaaatcctctaacaaaagaagcaattatcaattgcaaagtaaatttcatgttgttaatggagacacttagtttaacaaatcagaattttaatgaaaaaaaaaaactacaataaaactctttgcaagatgatggcttatgacttgtgaagatcctaagatactataatcaaaaaacagctatcaaatatcataatcagaaataaatgactaatgaacaacgatctcggaaacaaatttctgaactgaaaagaaggctcacccaaaacagaaaaacaaatcgaaacaatgctatagaatgaaacttgagaagacataaacgttactttaattatcgaaacagaaacagagcatagaaaacattatcatgaaaaaaaattaagtcaacgcaacaaagacaaactatgctaagtttacatcaaagcaagacaacgcgcagacacaatcacataacaagaaaggatcattcagggaaattttatgacttttctattttcaatgaaaaagtatacaaaatttat

SEQ ID NO: 68412 - DNA, 632 bp, Cannabis sativa
aaaggtgacattaggatcctagggtgtctttgatgtacgtggcttgggagacattatttcaaagtccaagtcacctggttcaaaagcaatcgtgacttagggtaaaaacaaaggctcagccaaaagaataaaggacacactgggaggttctggccaagctgcatctcgtaaaaaaaggcatttaccttcgatgatttcttgtaagaagcgcctgtgacgactagcattatcttcctgataggctctcactaaatgttcattaaccctagcatcatttaactctaatttggatgtgggtttagaagggttgggtttataagggacgattgattctgtaggaaattcaagttctaaatcttctggatgataaatttcagaaccagattaggatattgctacaagaagaaagcaatcccaatccctggaaagaattttatcaaacctgaaggtggtgagttgaagcaactgaaaaaatctacgtattgcctaaatcctaatgttgaccgaaatacagttcaaccctaaaaattactaaaaccaaataagatggtgatggtgtaaataaatgatgcagcaattaaacccaaaaatgcaacataacaagcatgtaagatatcaagaagaaaagctac

SEQ ID NO: 68413 - DNA, 633 bp, Cannabis sativa
cgagatttaagatcggggttcggaccaagtctgggtccaaggttcgaggcaaatctaggtccaaggtttggggtcggggtttggggtctgggtctagggtccaggttcagggtcgggttttggggttgggtctaggtccaaggtccgaatctcagttcggggctagagtttaggtctggaactaggtctggggtctagggttgggttcatggtctaggtttgggtttcaggcctaagtttagggtcaggtatgaggtccaagtccgaggctggggtctaggtctatagaatgggtccaggtctggggttgggtcaagggtcagggtagggctcttagtttggtttttgttttgggtgcgacacctggtatgggtcgggtgactcgggtctaaggtccggatttgggattagggtctaagtccttaaacacagatcctttctaaatattataatataagttaatacagataatttattatgtattaaataatacgattcacattgtattaaaatttatacttgtaataattaatacaatataaaattttatctaaacatagattttcttattatttaaatacaatacaacctttatacggttcactgaagaagctttaaaatgcaaacttcatt

SEQ ID NO: 68414 - DNA, 834 bp, Cannabis sativa
gcttgggcttgggcttggtcttggtcttgggcttgggcttaactgaaaaataccaacatacccacgtttttcttaataatgtttttttaagggatttttataaaaactgccaaaatagcatatattgttacttttttccactagcacacacaattttaattatttcaaggaatttttctttgaaaatattttttttggtgtcctaatatgaaaatatccgtttaaaaattgatatgatcatgttaaaacttaaatatttgtttttctaaagttcaacaagtgataaataaataaaaaaaaaaaaaagaatgaaattattgtctttaatctttattggtttttttaatatataaattagccctaataataataatattttttttttcataattatcggaaaaagataaaaaaaaaaccaaaagaaaattggatggatgaaattttaaacatttttacaaattaaattttttttgtttttttgttttttaataaaagtacatactattgttttcacaaaaatattatttatgttgattttacattatttttatgttacttctacatttatattatggttaagtttggcacaattatgggaaaaaatatctgtagttgtactgtaagaaaaaatacatgtagtagaactgtggaaaaaaaatgagttgagtatttaaaaattataaattttaaaatgctacgagtggttaatattgtattataataatgataagttataatctagttcattataatcacaaatatataaaaatttatgctaaataaaatttttattttctatatatttttaattatttttctctatatagaaaaata

SEQ ID NO: 68415 - DNA, 2051 bp, Cannabis sativa
  modified_base (40)..(68): a, c, t, g, unknown or other
  modified_base (175)..(183): a, c, t, g, unknown or other
aacataaaatgttatttctgatatttattaattagtaaannnnnnnnnnnnnnnnnnnnnnnnnnnnngggcacaaaacccaacaataatgtcacacagaaataaaaagagtaaaggaaaaaaaatcataagaaaaaagccctaaaaaaccatcagaaatctaataagattgacnnnnnnnnnatgcagaattttaactgcaaaattacgtaaaaaatcctttccgtttatacttttttctttactatttttatttttctgtgtgagattgtcactattaggctcatatttgattaacgaaaaatctgctttaacacctagctactcgtagctatttaaatgatacagatcatcaattaataattagatacgtattacatctttacatgaagaattaattaataattaagataggactaagctaatctcatcattctccatcaaatattctctctcatcccataagcactgaattgatttcctagaaaggaaatatagggagtgagcttataaagcccaatagagaaacaactaatatcaaaagaccagtagtttaatataattctatgcatggttagtttttaaaaacaaaacatctcatcatcatcatcattatcatatataaataaaatagagagactacaaataatcacaagagacaagctacctgtgtatatcacaccgtccactagatccctagctctcaatatcaatcatagaaaatgacattctaaactgagaagtcacacctgataaccataatattgctgagactcagattcagtttatatcctatacaaattctaggttttttagctataagtgagtgcacacttgatctacctatgatcacacaaactaggtcctgaaagaataatatgaacaaaattatgatcagcatggctctcaccagtaatcaatatagccaaaagcaagcaaacaacaataataaaagaacatattccattttagtttaaaaaattaggcagtatactgactgtaatttaaataaatccaaaaattataacttacataaataattgtattaaaatatattttgcagtcagtgttccaaaataattcatactaatatgcagattaagtttttaatttctcaaacattttataaatcatataaatttgaatatatctaatgttattcaacacatataaaatcaactccaataattaagttgagtccttacctccttaggatcatcaaactttctcgaaaagagacgctcctaagcccctgattcttaagctccaaatagcttatttaaatcaaaaatcagtttgtcctacactctttaattgaataaataattatcatcattgtattctactcttcaaatcgagtccaacgatatgttacatgactatatatttgtagtttaaagttttaaaatctcacctcagcggtgcgcaatgacaattggtggcggtagaaattggtgtaccgaaaacgtcaccaaaaataagagtagtatatatcaaaacgaccatctcgatgagtagatcacactcataccaactatttttcaaaacaatacacaacatcgctgaaaagtcgtcagaaaagggcagagctacaaaaaaattatcgaaaaaagtagtgagttgagtgaaatggcttcgtgggcgatgttcttcttctcccgacgctgattccaatggtaccaatcattcgtcaaatggtctcctaagttggtcataatattgattcgaagttttgacagtgaaactttggagctttcatacaagtacatttcagctttgattgccactaaacttgggacgtgaagactttgctgatttgtgattgtgcaggtccagtgcatttcgaaaatagtactttggtgacggtcacatctgagcttggtcaaatatagtggagatggttgtttaaaaggaaaaaatgaagaaagaaatgttgataggccaatcaaggagagaggaataaaaatgaaaacaaaattttaatgacctaagtagattccacaatattatatatatttttttggggaccggtcttcacatgatttgtaccc

SEQ ID NO: 68416 - DNA, 648 bp, Cannabis sativa
tgctaacctgcccgtcaaatgggacacaccgtataatacagcgttaatgtttcaaagtgccaaaagcgttaaactatgctagtcgaacattatctgattcaactaaacatagaacacaaccaggcgaacaatatatttcaacaagggacctcataatttgggcttttaacaatcaaaattctaaagattatttgagtctaaactttatactctttaactcgagcaaaactcaacttaaagactagggaaaaactttagaggccaaaattgggctcaggctcaatgtcatatgtgataatcccaaagaatgctcaaacaagatcgggttaggctatttaactaattatgatggtacggtcacaacaccaagcccaacaggcccaaaacaatacaatcaagtcaaatattaatattacccatgacccatcattgagaatcacaatgatccgacccgtatacgagaccgagtcttatcactcatcttacaatctttgaagcggtcaattaattgaccgcgtaaataacgatctccctcgtaaagtggaagaggagcgcttcacaagggggtgagcggtcatatgtaacgtccttcctgttggaatttttttaccaagatctagatttactactaagtatgtttcattaaca

SEQ ID NO: 68417 - DNA, 537 bp, Cannabis sativa
ttaacaactaaaccaaacacaaaatttattaactgagtagaatgaatagcctgaacggcgagcatgctgtcactctcaatcgtaacacctttccagtgatttgccttgatccaactaagtgcttctttgatgcccatggctttcaccacttcatggtggaaagtagcctccatgatactcggcatgaatgtgaagaggggaaccaagatgatcacgggccaccatcctgaatccataggaattttcctgctcaaatgaagcggcatcaacattaatcttgatagtttccaacaccaatttgacccaaagctcatttctatcacctaaattgttaaggaatatagatgagagagaagtaatatcctgagcttttctccaatgatcaagagaagtagttgttgataccataacctcattcaaagaggaagtttgattcttccacgcttttttattccgcgctttccacaatgcccaacaaaccatagcaattttacacatatcatcggttgcagaagaagaaaatgtgagttcaaacca

SEQ ID NO: 68418 - DNA, 4413 bp, Cannabis sativa
gttttggctcgagagaattcctggccaaccagagattgtgtgtaaagaaattgagaggactagacgattgaaaactaaaaaaggtgtccgtcttggtgatgtttctcaggggaaggttattccaatatctgatgtggataccatagatgaaagaccagaagctgagagatttcctaatcaaccagaagctgcccaagaagaattgaagctaaccaacaaatctaatgttcataaaggtgtctctctatatgatatgtctctagggaaagaggtggtaatgccatgtggtatggatacgaaagatggtgagagacctccacctttaaacgatgaaaccgtcaagagtattagtgaaatagaggttgcagagaaaggtgtaaagagtaaaagatttagatcacgaaaaaggtgtttgtctagatgaggaagcgattccaatgcgtgatgtgaatactagagttgatgagagacctccatcttcaagatacaaagccatcaagagtattcttggtgaaccaaaggctgcacagaaaggtgtgaagagacgtacaagatatgtgaagagacgtaaaagatctgaatcaaaaaaaggtgtttgcctagatgatatttctcacggaaaggagctaattccaatacgtgctgtgaatactatagatgatgagaaacctccatcttttaaatatgcaaccaatttggtgtatccggattggtgccatattactcctcctaagagttgtgactgtattgatggatgctcagattctaaaacctgctcttgtgctgtcaataatggaggtgaaatgccatatagctcaaatgggactgctgttgacgggaagctctttctttatgagtgtggtccttcttgcaaatgccctccttcttgccacaatagagtgagtcagcacggtctcaaatttaaacttgaaatttttaaaaccaagttaaggggatggggtttgagatcccgagaatgcattcctttaggcggttttatttgcgagtacataggagaactccttatggatgaggaagcagaaaaaagagctggttatgatgactacctctttgatattggaaaaaatcatgattccaataccagcattgatgaaggcttgaataattgcgaagatgtggatgatgacagcgggttcaccattgatgcagcagagtatggtaatgtagggagattcatcaaccatagttgttctccgaatatttatgcacaaaaaatcttgtatgatcacgaggatgagagcattcctcacataatgttttttgctgctgagaaaattcaaccttttgaagagttaacttatgattaccattatgttattgatcaagttcatgatgcaaatggtaatataaagaagaagagttgcttttgtggctctcgtcaatgcactggtagattgtattgagcagactaataaaagtttggactaaaactaataaaagaaggtaaccgcttattccttgatataatttttttggtatagattaatgatctaattctttttattcatgaatttatttatacagatttaaaaaagttattattatttatttgtgcatgtgctcttctacactcccttgttggtagtatgtagtatttttacaatgacaatcaatttctttttggagaatctacttctttattctggtaaaaatcttaaagttgtgtttcatcttatgtattcctattttgattaaggatgcattgtgtttgttggtgtgtgggttttggagagtataagagtagaaagatgctgattggtcctcattctgtatgaatcaagttgatgatttcatgttaataatatgatttatttcttagttctgttcaggctcatttcatcagatttttcagtttgctagtttgaagtttgaactttatatgactccaattgcttgcatggttgttcacgtacacactcacatggtaacaccacatggttgacgtcggtttattagatgatcttcaatgtagtttcaaagttttgtgatagtgttacattttagcacaatagggaaaaaaatcttctccaattcaatgcaagctgtgtcaaatttgacgcaaaatatatcaacttttgcactacagtaaatactaataaaagtttaccaatcaaatgggtttttcttatttatatttatttatttagactcgattccaataaattattatgcatttattatacaatattgacttttataactattatttctgtgtagttttgtacagtaaaatactgctcaacagtgtgccagatatagtatttagcctttttttattctaaattcggtattggcattggcacttacattggacatgatcttaacatagtacaaaaatttaggtatatgttgaaagttatctggaatccagatacttatgtcatttttttgtagacactaagacaaaatttcattagatcattgtgttgagtgtacaaaaatgttcactggctgtttggtcagttatgctctgaatagattcagagcgttattttaactaatcctgttatggtacatttaaaaagatttatagtaaacttcatcatctttctcattcatatttatattgattttcttgttatataacaattgattcttgtttctaaatgattgacaggttgcattcaatcaataatcttaaatcgtctactttcagttctaaggaaaaggatcatcagtatagtttgagaaaatactatgaagaaaaagaagaaaagaagtcaactgcatggatcatttttagaataattcatttatttattttcctctcctttgctgattcttttttcatctttatgctaattatttgttctgaaatctttggttggcttattctttatgctgataaggagtatacatttctctagtttggatacctatatatgctattagttaaattaataaaacaaaaactcgagatatgcacacattgtgtataatatatttcccttgtaatatctagaaaaatcgtatgaagtgggtccaattttttccctttccaattaattgtccatttctttactataatcgaaaattgtggtaataccaacattttctagttgacactatacttgtatatattccttctgttcaagtcttgtcttagagttagttgagaatgtcaggtgaaatggactcattaacgaggtcatttgagtgtgtctctactcttatcagaggggaaaatgaggcataggtaagctctctctccattgattgaggatgtacaacttcaagttcaggatgctcccgatgcatttccagacactattctataataagttacaggctgaaaaaatgacgattgtcatgtgctattgaggtttgcagtctgtctctcttttgatttggttctctctcttttgttttttgtattcttttcaacaagtaaaaaatagtagggcaaaacaaagaagtgaaaatgtagtatacttttttttaaaaaaaaaaaaaaaattgcagggagttttaaacataaaatgtatgctgaaaatgctgttttatgttggatgagcctttcccacatctcagaagtaatttatgttagaatttttttattagcaggttcttcaaggcaagaaagtcttatttgaatatacaccaggggtgtggatgttggatatggtttaaggaaggaggagatcggggtaagttgataacttgataccaataaaatattgcaagttacagtcatggactgataagtggcataccatgttcaggaaaatgagaaaaatctgtgcaacaaaattttcagcttctaccatttgcagcatttagacacgtaagattcaagcccaataatcttagttggcttagtatgttgcatatgaccatttatccttgcaatttctataataagcatattttccacaattgcattctccaacatttttgaataatgatgtggagaactttataaagactacaataggaactgattacatctgcagaagattgacggtgacagccaactatcctgaggtatgaaatcctagccatctcaatattttttgttttatttaatccatttgtaaactaatcctaagggtgcgtcttgaaggcgacactgcaattggaattgagtgtaatttggagtaattactaggtttgacatgtttgtttaaccagataattaaacaacaatcatgtaattggatgaaaataattactcttttaaataattagtcattacacaatgttattttctatgtaattactaactcttttgtcaaccatgaaaataagatttcatgtgattaccacttgacaatcttgtatctgaaaatagtgtatttaccatgttgtgtattatgagcgttgtatttacactgtctcgtaaaacacaagcaatttaattgaagggtatgtgttattgctttctccataaga

SEQ ID NO: 68419 - DNA, 2055 bp, Cannabis sativa
gtctgtggctcaggctcttccaagttatgctatgagtgtgtttcttttaaccaaggaaatttgctctagtcttgagggtttaatggctaaattttggtggaatactcaagctaactcgtctcataaagggattagttgggtcagttggaagaagttatgtcaacacaaacatgttgggggcttgggttttagagaccttaggaagtataatctttctttcttgggtaaacaagggtggagattactcacaaaggaagactcacttgtcggaagaatttataaggctagatactacccaagaggctcttacctcaatgctgaattaggacaaaatcctagttttatttggcgtagtatttgggaggctcaatcacttgttcggcagggtgctagaaggtctattggagatggctcctatgtgagtgttttacttgatccatggctgccttacgacagttggccttatgttctcacggacaaccaaggtcttgaaggcaccttggtttccaacctgatgttgatggaagagaaggggtgggatgccgagatcattgaagacatgtttgaagcccgagatgctcagctaattctgagtatacagctgagtgattcaacaacagtagattcttggcattggatgatggaacaatctgggttttataccgtcaaaagtgcctataattatcttcaatcttcaagcggtaattggcttcatcttgatgaagatagttactggaaaaggctttggaaaattgatgttccttcgaaagttcttcatttcttgtggaaggcttgttcgggttctctaccaacgaaggttcaacttagcactaagcacgtgaatgtcgatcttttttgccctctttgtaatgtcttttatgagacaattttccatgtgcttgttggttgtcggtttgccaaagcttgttggaacatctcggcaactactgctgctgctggtgtggacgaattcagcacctggtttttcaatattttagacagcaagcagccggaggttatagtcgatgcagcaatgatttcttggagtatatggaagacccgaaatgatgttttctggcagaacaaaaactgtacaacgataggagtggttcagtcggcaaggaaggctcttgatcaatggcgcgttgcaaacaagaacacagcagctacattcgctactggtgtactttctaacagcaacatttggcgcaaaccattgtgtggaaagatcaaggtaaatgtcgactgctatctttgaatctcatcgaatgtttggttttggttgtgtaacgcgtgatcatacgggtcagattttagaagcaatctcggggtcaagaattggaggagtgctgcccgaaattgcagaaattgttggtttgaaagaagcactaagctggattaagaggaaaggatgggaggatgtgttcattgagacggattcgctcatggttgttcaagccatggaaagtactgtccatatgccttcttactttggcttattggtggaggattgtcgcttgattttgtcctctttaaagaatgtttttatttcctttgtgtatcgatctgctaataaggctgcccattctcttgctcgggcgtcttgttctttgtcagattgtctgtttaatgagcggaatgctcctttctttttaaagaatattgtaatggctgaggctattccttaataaaattactttcaaaaaaaaatatgtatgttgggttgttaggttttaaattatattttatatatatttatatattttaatgaaatcaacttaaattgtagctaaaatagattggatggatataatcaaatctaatagacaatcaattaatgcattcaatagttgatatcgatctaatccaatacatctattggatcagatcggatcggatgactcaattcaattacattagatcggatgataaaatttaatatccaataaataattagattggaacagtaaagttcaaatccattaaatgtaattcaatgaacacccctaatcacaaatgcatctctctctctcaaaccccaaatacaactctttc

SEQ ID NO: 68420 - DNA, 636 bp, Cannabis sativa
tttttattggtctatttaaacgatttttttaaaaaaaaaaaatcaataacttggactaagtaattaaggattgtcacgtggtaatttatttaatatttaacaattaagtacctacgaaattctaaaaatataacttaattattattgaccaatcaaaaattgtcatgtgataatttactccaccaagtataccaaaacaacatttcatagatgtaaaagattttaataattaattcatcataattttattttagtttgaacaaccatttttttctactgttttttttctttattaaaaaaaaaaggagagaaaagaaactatgaatgtttagaaagttcctttacgaagttgtgtccaattcattccaccacttatattttgttttttttttttcgtctcgtctcatgttatgtcgctagacttttcagaccttttaataatttgtaaaatattaattcagattagtttccaaataaaagatgtacattctctatagatctcaattgtttattaattgaatcgacggttgagagaaactcttgcccagctggtgttcacggttctgcttaactgtacaacgaagagactgacaataaaagttgcctttaaaacttatcagaatcaaataaataata

SEQ ID NO: 68421 - DNA, 776 bp, Cannabis sativa
  modified_base (31)..(31): a, c, t, g, unknown or other
aaaattttaaatagtttacagtaccgaaaanagagtttctgatattccaatttaccacgcgctttcaaaaaacttcaaatgtactttcagcatcaggcatgatgctgtaagcataactaacacccgtgaaaaaaaaatattccgacatatgttttcggacatgaaaattgactaagagattataataagaggttgacgttaatactcctctatttataaaacatagatattctatttataaaacatacatataaaaggttaaagctaaaataaataaataaataataataataaaacttttcacctgtatcgcagttctagagatcaagaaacgcgcaacaagcaaaaaggagggatttaattttatattgttgctgttcaaaaatatgaatgtacagaaagagagagagaggttgattgaagatgaagttaatgcaccacaaaattagggctatgagatttttaggccttttcgaagggaataaagaatagaggaataaaacaataaaaatgggattttattagtcgatttcatttcttgaaggccaagactcacattttttttaagatacatttatggtaataggaaattaggaagccttatattaaattgtaattactcttaacaagtagtgtaatcccattttttccttatagctttgaaaactattctatatttggtctaaaaaatatattcacacatctattttctatgtgtgacaaaaatattccatatctcttcacagcacagtaattaattcaaagtattttagaag

SEQ ID NO: 68422 - DNA, 833 bp, Cannabis sativa
ttttttttttaatttttcttaagagtacacattttttagaataatattaggtagactcaaacttttacacccttgaaaaatggaagagtgcagtagctcgttggatatcaaattgactcaaatcgtatctcccagatggtcatggaatgaatgatggaaataatttaatttgcagtatgatacaccctatactgatatgaaatctagaaaataataattattgatataaaaaacagttacaatattccaattttttgagacaattggagatttcccaaaaagagttttactctttcaatatacagaatatcagatacctctctaagagagaaagccgtacagctcactcaactaaagaatcatagcatagcaactccaacaactaacaagatgtacaaattagccacttacaaaacataaacaactcagcacattatcgttctttcgcagcaattccagaaaatgtcaaactaaacttgggctacctacaaatgtattaacatgagcaagcaactcatacaaaatcatttaaaagacatatgttagactaaaattaaaatataatctacatggacgattccagtggggagcaagaaattaggtattcatcttcaattaaaatatttactataattaattgtcataatattttgacaattaataagaaaataaaattagctaactaagtatcaagtctcatatagtttaatgtaataacttttagggagtatcgctagccaatcgtaagacgacatatttagaagatgataggcaccactggtgcctaatagcaatgatcttttttctactatcactttattaggtctaaaagt

SEQ ID NO: 68423 - DNA, 1418 bp, Cannabis sativa
gttttagttacaaagtagcactaaagaaatttcaatcataagagaaaatgtgaggttggaattacaaatctgatcagatcatcatatatataatatatggcctacattatcactataataattattgttctgtgataagagataatccatatataaatgttttttttttatcaaagcaatgcaggtacgatgctcaagtttattagaaaacacattccatttctaattttctattccagcaaaagaaaaagaaaaagaaaatgtttaagaaatgagatgatagtgaaagcccacctggcctttcccctagcctatctgagggggacgtgggccgtgggcgactcgagtggacggagtcatggaggaggaggagccaccgatcctggagccaagaggaggaggagccgaggtcgtcgtcgatccctcccttcggttgtcgtcggccgtggcgtgggttgtggctagtggacgctgctggagaaaggtggctggtggtggcggatcgttcgtgaggtgaggtctggtctggagtggtgtgtggttgtgtgtcgtgtgggtgtggagtcgtggactgcggaggctgaatttagggctgctttaaaatgtaaatgatttacaaatttagggttttttatttttttaattaatactttaaaatatacatatataaaaactgtaatataaaaaattaaaaaatatatatataataaatttatataccgggttggcgggcgggttctcgggttcaacccgaaacccggtaccttaaaaatctcaacccgcgaacccgcctgaagggtaccgggttgaacccgacccacccggaacttttttaaaaaaaaaaaattgcgggatcaccgattcgagttcgagtgggttgctcaggttcgggtcgaacccgctcataatgtttagtcctagtataaagtggtccaaacttagcacatgctaaaaattatgtcaaatttgacacaaaatatagaatgggtcaatttttttttttatgaaagcatggtccacattttacaccaaaataaatattacctttttatttattcttttgccactatattaatgtaattaattattttttacattttgtatatatttaatagaatttttacatagtttcaataaaaatttaatgcttttgtaaactttattacacctttctaaaagaaggtttaattttaccctaaatgcatttgagcactattataaaatttggataaaatataatattgactcatttttttagcttaaattatacaccattcattggagtgataaggaaaacgctaagatatgagctaaacaccataaatggtggcatattgtttagaccaagagtagtcctaatgatgtggacatcaatgtttgacatgagcaagaaagatgacatctcagagttgagtagt

SEQ ID NO: 68424 - DNA, 1673 bp, Cannabis sativa
ttcgatccttaagttatatagtgcatatatgatttatttattccgcactttattcatattcatgtatgtttcagtttatacaaataaatgtctaacaaggacatcatatctcgttgctggcacacttcaaactcaaataacccaatctcgaatgtactccaaaacctggatttatgtccaaataacttacaacaatggcacataagaaaatatagcaaaatgaagaggaaaatttctactgaacaatcaaaagtggttaaccttaataatattgttttgcgatcaacagaacaggctactaaactcaaacaatcagaagcaattccagatgatcttctagagcaagaagaagtctattggcaacaaaggtctagcgttaattggcttaatttcaaggaccgcaatacaaagtttttgcatgctaaagattcagctagaaaagcttacaataagattaaattcctttgtactgagacaggggatacagtgacttcaaaaactgatatggttgttgtcattcaagcttattttgcaaatatttccaaagttagtgccattgatgattcaactctgcattgcactcttaattcaattccatccacaatcaccactgatatgaatgaagaactcttgaagccttttatagctacaaaggtagaactttctttacactcggtgagtgttgataagagtcctagaatagacaggatgtccgcaatattttattaacaaaactggcttgttgctggtgatttggtcactagagtggttttgagcatgcttaatgacggggcaaacatgaaggatatgaacctaaccattattattcttatccctaaaattaaaaaaccctagcgagtgagtgattttttccccatcagcctgtgtaatgtaacttcaaattaatatcaaagtgttggtttcaagatttaaacatgtgctacctgctgtaatctctgggacacaaaatgctttcctctcaaatcgactcattcaagacaatattctggtggcgtttgagttggtaaatgcaataaagcacaagataaaatggtcaaaatggagttgtggccataaaattggacatgaacaaagtgtttgatcgtgttgaatggcgctttcttgaggaggtaatgaggaaaatgggttttgcaaatcgttggatcacccttagcatgagttgtttaactacaactagcttaacctttctattgaatggggagttaacaggttatctacaatccactagaggtcttcgtcaaaggtgtcccatcttgccttatctattcttaatttgttcaaaaggttttttgcagctgcttcaatacgaagagaatcttgccaatcttaatggtttttctctcacacgtcgtgctcctactatttctcaattgttctttgctgatgacagcttgcttttttgtcaagcaaatgaaaattcatgccttcctattaaaagggtgttggatacataccatcaagcgtctggccaagttctaaatttggataagtcagccatatctttctcctccaacacaactctagcggtacaagtccttttccatagacaacttgttatgcccattagtgagtgtcatgaacagtacctgagcttacctgcttactcggggagggataaaaaaaaactcttcagtaatgttaaggagaagatt

SEQ ID NO: 68425 - DNA, 1602 bp, Cannabis sativa
aatgaccatcattatattatatatatatgatcatcactatgccactatatataaatgtacaaattaataataatttcaacaaaatcatcaatttataagctgaaattaattaattaatattcgtgttatattcaaattatggtgagtccaatatacaatacctcacaaaacggaacaaaacaaaaagtgtgtaattagtccttgattgacgttaacatatatatctcacaatcacatataagtagttattaaatattaatatactcattttctttttcgagaaaattaatatactcaattttaattaggattaattggtccaatttggtcaaaattgtgtttagctactgtgattcgattttcggtactgttaattttgcctctatgatatagttttgagtgttttaatcttatttttgtaacatgattttgagtgttttagtcttgtttgtgtaatttgctcgccatcaaatcattactggttggaaataacaagttatattatctgtgactgaagggactcttagtagtgcagttacttattttgcacaacattaattgagttcaaaaactacgaggttgaatgaacatactgtaacagtttctactgttgtgtcttttaggcggtagatgaaattatatatagttgttattaaggttaatatgatactacaaattttttcatcttattttatttttaacttttttgtcaaacatttgagaattaagcgactgattatttgacttatttttttaattctaatcttagacgtgcctctaatagggagatgtcctagttagattgtatgatattaattaaaaaaaaaaattacctattaatatatagttataattaaaattagagttatcatcgtgaatgtaggtcgtacaataatattaattaatagaggtaaattaattttctctctgtttctatttttttttttattattttaaactattaagatatcattttaataaaatattaatccaaaagacaagatgaatactaataataacaataattttttttggctgtattaaattttgtttcttctaactaaatatacccttaaatttactgcactagaaagaaaatgagttttttctagctggtatgaattaacaaagagttgctcttaaatgaataatagattagtcaccactagtatacacttaaattaacttaaagataaatgattttttttttttagttttttgtttgtttgaaatgtagataaaatgaaaataaaaaaatcaatcaattataaatatatatatatatatatatataaatatgatagtaaaataatattatgtatggattataaattagtttgggaaaaattttaaaaataccttttctttcatattttatttataattttacagtttaaaattgttaattataaaattacttctataaaattacagaaatatagtttgctaagtaaaaactaaaaaaataacttaaaaataacaaaaattaattaatctataaaaactataaataaattattaaacaactattaaaaaaataatcttatgacaactacatataatataattattaaaaagttataaaacgattaaaaaataatt

SEQ ID NO: 68426 - DNA, 1451 bp, Cannabis sativa
gcaaattggtgcacttagcaaattcgtctccaggtccaccgacaagtgtgttcctttctttaatctactaaaaggaagcaacaagaggttttaatggactcgtgaatgtgagcaagccttccaagctctcaaacatcacctagtcagacctcctatcctagccaaaccgatagaagggaaagaattattcatctatttgactatcaccgggcatgtgaccagtactgctctagggcatgaggaaaaagggatacaacacttggtttactacatcatcaagcatctcgttgggccaagtctaggtattcccccattgagaagctggcttattgcttggtattggcttcaagaaaaataaggccatacttccaagctcattcagtcaaggtgttaacagactaatcactaagacaagttttgatgaaaccagaagcattaggacgtctactcaagtgggtagtagagctaggtcagtttgagatcacctattagcatcacacaataatcaaaggacagacattagtagacttcattactgaatgcactggcctcaaagaagacgaccccatgatctgtgagaaccaagcccacacgtttgagactgtagctcagggggcattggaccttcttggaatgtttatggagatgaatcctccaatgagcacaactctagtgcaaaactcatcttagtatcactttgatttgtacatctctaagaatgactttatgaacgatatgttgatgagagtttcattcgtacatctctaagaatgactttcgtatcacccatagaagtgccacatcatcactagtagattttaggataacttttatcttccaagtccacatgggaactatttgttggcatgtggacttgctcgacccacgtgataggtataaagggtgacatgtgctcagcctacgaagtgggtgaacaaaaacatcattccaaatctttgagttgtcctttatatcataatgcattgagtatccttatctcgagaatcacatccttgggtcgtgtgctgacggttgtactactcaagcgtattgattgtactttttagggaggaaatttgaaataattacaaagatgccctttcacaacctataaaaggttttatagaacccattcattctcttttaggcattttgaaacttgagaatatcatagtgaaattcacttctctttcaaatctttaaggatttatcgaagcttcaaaggatttttaagttaccatttgtcttcgtaccacaattctagttgataattctccaatagtgaatgagttcttgagcttttatgcaatttctttttaatttatattattttactttgaattgcttcggtgaatatttttgggaatatttaggttttaaactaggttgttcttgatttttagggattagaatttagattttgatactgaatatatgtgcacatactataa

SEQ ID NO: 68427 - DNA, 1009 bp, Cannabis sativa
cttttgtattaatcaaataatatactctggtgttgcgaaattcactcgacaacaactactatcttacttgttcttgaagtttctaaatgtgagaactcatcttgtctgtgaataatatttgctcacagttactgactttcttaggtttatttgtaaaccttgcaagaaattatgaatgtggaataataatctaaatcatccactatgtgttaataatcatattaactatattagaataaattcgtacaaaacaaattgatattttattggtgataataaggtgtgatttatttttcctaattatacagtaaaaactgtacattttaaatgaagttatccgaataaattttggaaatttttactggtattgaagaaatttatgaataatgatgtagtaaaattatataattattaatatatagttttgaggtttaaatgaatcatgtttttaccaatgtataaacatgtttaaatatgaaattttattaaacaaatattgcctgtgggctaaatttttaatttaataagattaaatttagatgtagattatgatagatttaatttatttatgaaaaacttaaagtttaatatttctatctcaataaaaagtgtgaaacatttattaatttataaatgtttcaaaattttaaactttatgataaaactattaaattaaatctacacaattccctgtgggatatattaagagaatttaatttaacatattaattgcataaatataataaaatccctgtagggtaagattattatgtccacataattaattataattcaggtccattagtgatcttgatccacttaatatatatataattttatataattaaggatgatgtgactactccctaatcatttaaagttatgtggttcactagacagcaaagtataaactgaagataaaaattttactaaatctaaaattgtctgtgggataaattttaaatttaataaaattagatgaaccttgtgatagatttaattaaacaat

SEQ ID NO: 68428 - DNA, 517 bp, Cannabis sativa
tgttagcactctcattcaatcaattttttaacaattatgtctcgaaaaaataagaaaactataacaattgctatgtagataccgaggaaagactcgaactttagaccttgtggaaccaaaccacatgcctaatcatttgagctacccctttcggtcttgggttccaaaccgatatatttgagagtataattaaaaggaaaaaaaggattttggattcaacccactttgagtttgaaagccaatatatacaaacaccatttagaaaattatgaagtaagagattgggaagaaagaaaaaaaatgctaattttctttgaaaactataacaattgctatgtgaaccttagaccttgtggaaccaaaccacatgcctaactatttgagctacccctttcggtctcaggtaccaaaccgatatatttgagttttgagattataattaaaaggaaaaaaaggattttggattcaaccactttgagtttgacagccaaatacaccatttagaaaattatgaagt

SEQ ID NO: 68429 - DNA, 936 bp, Cannabis sativa
tgtataaaaaagaatgaaggactgctgggatatttatgagtactttttatagaaatttataattgtattgtacaatattgttgtacatcctttaaaacaataggaccagcaaccatttttgtcttttaattattatataatatttcgaatataattttaggacatatcataatagggacattgatttggtttttagggtagtgaagtttttatagccatagataatagatctaagggtgataaataaagaagtgcatagtattgattaatatttgggttacattagattatttcttatttatttttttaataatatttgagaaatcattaaaaaaaatgagaaataaatataaaatttaattatatattatattatgatcaaaatcttcttcacattcttcttatcttggattttttttttttttaaagtttctgatgattttttcaaacagattttgatttatgtattttgttatttaaaactaaagaaaaatctctctatatagtcttcatcatttcctctttcacactatttttttatcttttctaaaacatggcatcaattaaaattgtttttttattgatggaagaaacacacataattagattttaaaaaaatatcaagtatactttaattatttaacatctctaaaatgtaaaattaaattcataagttgttgttatattaatatagttcaatattcttctttctttttcttccacccacgcctaatttatactttcagttttgttgtaccaaatgtgatattaaataaaacaataaaataagaaaataaagaaaatatcatatgtttcaacctttaacccatcttgatgaagccacccttttttccttttcttttttcatttcatctgcctatttttttttagttgacgtatcagcttattttactgtttagcttgactctccaatta

SEQ ID NO: 68430 - DNA, 723 bp, Cannabis sativa
cgtatcacatttttattggtacactatattattatttgaaaaacataaacattatttcaaaatttataatattttttaatttttttaaatattttatttttataattttacttaattttaaaataatttttaaataataatattaggtgtaccaatataaacgagccatgtgcacacttgtgtacaagaatgtacacataagcagtccatagtgatagttaaccgaaagacactataaatttgctaccagtttggagggtcttactgtcaaatttgcgtttggagggttaaatacaagtgaaacaacagttatgagagtttagctgcctaaaaatcttttattttaatatgtttgtcaaacgatctaaaaattaagctgctaattatttgattcatctttctaattctaatcttagtcgtgtctaatgtggaagatgtcctaattggattaaaagcttaaattgctattaataaaattgtatatgcgctgcttgttttgtagtagtaaatatgatacggaagcataaattgttacccattaacaaatttttttaatttaagcgtttatatattacattgtataacttaaacttaaactcaaagtagaatctccaacatacactctgcaatttaacatttttcttaattgatggaatcaatgcgtttcagtcaaaattaataaatttcttgaaatgtcgcgtacgtaactatcgccaaactaat

SEQ ID NO: 68431 - DNA, 722 bp, Cannabis sativa
ctctctctctctctttaattttttttcaattctctcttttttttctcaaattattttttttaactttgtatatatgtaaatatatataagagtaatttgaggtgaaaatacttaaattttactccgagtaacaaataaatacctaagtcatattgcatttatttagttatttttatgttaatttttagttattttttcaatttatggttgttttttaactatcactaactcaaaaaggacaagagaaaaaaaagttgaaagaataaagttgtaacaacaaattccataaaaaaaaataatacaatagtaaaaaaaaattgtaatacaaaaacatattgaggagttgatattattttgcttattgcaattaggttaatgttttgttatttttttgttgctttgtagttatatttttgttactttatagttattttcatgttgtttgttaagttcttctaagattgttttagattttttttttactgaaatacagtatttttgtaattttgaaactttaaatataatatttttgtaaaatttgtgcagtataaatgtaaaaaactttgtgttacaatatttttataaattttcccctatttacagtatttttgtaagttttccttaaaaaaattaagtccacatagattagatgggttaggataaagctcacaaaaatgcacacctatcccaaaaaaaaacccttttttatacattagccaaat

SEQ ID NO: 68432 - DNA, 1469 bp, Cannabis sativa
cccccttgtgttgaaggtaccacactgtatgataggcttgtatttggtagcttaaacagtgaaacgttgatatttggtagtttatctgttctcctttcaaatgtgtattatcaatttcttgtacatatattttagctagtaatgattacttatctgatgtctcatagagatgcaatagtttatgtcctttatttattttatttatttttgttgttcagctgctcttaatctgggttgtgttccagtcagggcttcaagaagccaacgtcactgtaaccccaggaattaccttaccccaagaacgcaggaaccattctcggcagttactaaaactactgatgagaggcagcctcatatattgccaattcactcagggagtcaaacgaattttgtaaggaccccagtggcaaactctgtgaaatttcttcctaattcaagcatccacgtaaaccgaaatgacaacctaacttctcctcggagtctttcctttttacccaagaatattcctactggccataaccaagtaacaacaatgaccactaacaccacactgagcactggttcagtgtatccattgtattatggaactcattatcaaaaggaagagtaccaatcaggctctcagattccagaaaagttacattataatacaatttatgttggtacaccagtcactacatcaactgctgagcctactatacataaatgtttctctcgcaagaatactgaaaatgcttcaaacgtgattccacaaatgaatgcggtcgacgcccgggagaaacgaagacgagaagcaggctgggatttgtctttaaggctgggtagcttttcaaatcaagttaggaatactgagaaaaggttagccactgaaacggaagatgtagacagctgttctcgggagggggccaagttgaatgaaagacgcccattcataagccaggaattctgtttctttcctggcaagtcaacttgtgatccctctgaatccagttcaagaacgtggagttcagggggtgaaggccagactataaaggcacccataccaaagggtaaggaaccatttagtaggcatgaggaggatgggcagttttgctggcaaccagatgtcccatccaactggtttagtagtcgacttacgaggccaggttcgtaggcgatttcttttgttccttgttgtagtatatatgctttatgatctgagttctgttgacctctcttgttgaattcctctgtgataactattttattagaagttgattttgagatgcaagcttcattggaaagatgggagctacttaagttgtaaatgacattttagtttcattcccacaaatagttagtgacaaatgcacaagcactagtttgagacttcatgctcaacgtttagttgatatcaagtttaaacattaataaatactttaatcaagtaaaaatgaaaaaaagtatttttcagatgacatgaaaccata

SEQ ID NO: 68433 - DNA, 1186 bp, Cannabis sativa
  modified_base (44)..(45): a, c, t, g, unknown or other
tttccagctgctgatacatagcagataatgcatttgaagaaggnnttttatgtgtatgatgcaaattatacaaccataacacctttatatagctcatgagaccgcctctactttgaaaaataatgataggaaaagtttattatttaagttttttaatttattatataaaaagaaaacatcactttgatacacatgtccattgattatgactcagcatataattattttaattaaaaataatatattatttatgagaaagtaatacatcaataggtgaggctctagattgtaatcattaagctaatctaaagcactctctttctctcatagcaaagagaaaaaacttctctagtttcttatgtgcactctctttccaaatagtataaaacctatggtatttattaagatttgatcgaagtcttaatatgccttacatcaaatttatatacaaactccaatttgagagcaacacatgggtgcgtgggaaggaaaattattatataatctttaaattaatttttggaatgataccaagaatttcttttctatttagatagggaatttgatattgttcgtacatattacatctatatatacatacctatatatttataggtatattaatttgtaagagtcaaaagctgatgagaccgtaagacgtcattataattagaataattatcaattgatcaaaaattttgtatagttcaaattatcttttggtcaacattttatttcagttcaattcttttcttacaatcatggctaatttgagcttttctttattatttcttttacttcttaagatggaacaaaccaatatgcattagaaggcaatgtttaggtgatcagtacagaactactaataccattatttaattaatattatgtaaattaaattttgatacaaggataacttatttagttttttatatcggagttgcagagttgtgcaaaaaaaaataaaaaatgttgtttttgttctaagttctagtaatattatctataaactcttgggtgagctacttttggttattttttaattaactacagtgggattttgattttggttttgtaaattactcactattcattacaaagttgagcattggttacatattgaaacctttgaggcctctatttgtgtctataccgatatcatcatgttagaagttgttatgttcct

SEQ ID NO: 68434 - DNA, 1032 bp, Cannabis sativa
  modified_base (26)..(57): a, c, t, g, unknown or other
tcaccctgaccaaaaagtaagcttannnnnnnnnnnnnnnnnnnnnnnnnnnnnnnntgagatcgaacctaaccatgtcacgttccccaactggaagaccggttctgtggagtttcctggggaccaactggaattttagttcctacaggtcccactgaaccggtcgaccagttcagtgtaggaaacaccaaaaactccacaaacacatcaatttgattccaaatgctaccaaaccttccagagtacctatttacactacaataaacagaatccaagcaataaaaccagccaacaacctcagtagcaaaaaccaccattgttaaaccaagtttgagttcataaactcaaacttggttaacaccacacaaaaaccttatatctaacaaaattaagcctaaattaactcaacttaccctcagaaaacatcagcaacacaaatcaaccctaaacaacaactaacacaataaattgtatgcttgaaccaaactttaaccatgaaaaacaaaagaagaaaggttctaagctttaccttggttcttagcttccaaaatcacatgacttccagctgaaagctataaagattgaaggagaacactttggtttcttgatgaatctactaggggcaaaaataggaaagagaaaggaagaaaattatttttcttattttgtcactttcttctcttaattttctacataaaaccaaaacaaaactaatttacttaacccaacattggctagctgtcatcacaagaaaaggccacttaatcccaatgtcaaaatgataaaaatgcccctctcaaaaaccttaactagcaaagtggcctaggggtaaaatggtccattaccaatacccagcctaatttcgatatttccagtgtctatctatatcgccctgctattactaagatactaaatcatattaaaatgtgactctatcggccaaacatcgcgttctactattaccggcataaaatataaaaaacatgaaatttcatatatagcataataaatacacctagaattcaaatatat

SEQ ID NO: 68435 - DNA, 1392 bp, Cannabis sativa
ttaatttaattatatatatttaaaaataaaaattacatctaaataaaatatatatatctaaacttgaattttacgataattttttattttaaaaataattaaaaatatgtatatatatacttataataatttgtaaattttattataaccagtaaaatcattaataaaatatatatttagaacaataaataatattttataaatatatagcacgagtaataaattttaaaagaactttaaaataaaaacataattaatttaaagcataattatctatgtacgtagtatgtttttagtaatttgtttcattaaatattttaaaactttttcattttagaacatgtgagtgcccaaatatataattatttcaagtgtttttccatcattttctaacattattataaatgtttgacttaataattaatggttaatatagctccaactcaatcaacgtatacgtaacattcctaaaacaaaagaaaacaaataatataagacaggtagagctgaacaggaccggccctcgttcagccctatttatgtcgtccatttgcatgtgttgtcaacaatacaattaatgtgttacgtacaaatcacgaactcatttatatctatcaatataaataatattttaattaacaaatgtctaggacaaggatatgatcacgaccttagataacaagctttttttttttaaaaaaaacttaatctcaaacaagtggatattgtaggtgtattgcatctacaactataatcagttcagtactaattaatatatttaaaatataatataatgaattaagcctaaaagttaaaaataaaattaatgtgcacttagttaatagtttgttattatttcctgattgtataaggatataatattgtatcggattaccaacattaatacatttgagattaataattttatatcatttctttacaattcttttttctctcattctctttcaattattcaacagttctaacataatatgagagtcttttcttctattgatggcaaatgtggctagcatcactactgtaattatggattttagagacggtttttaaggcatttcagcgtcgattttgacaaaatttgctaccgatgctgatttgagcgatgctataagattgaaaacaaccgacgctaaaagttaccctatgacgtcggttattacaatagaattggcgccatatataccctattatatcccaataactgacgccaaatgtccttataaccgacactaaatggcattttaaccgacgctaaaaactaaatataaatcataaaattaattttttaaaattatatatttattagtttatttattatattattcaatttaaatttaaattaaatatttatttttttaaaaggtaaattaa

SEQ ID NO: 68436 - DNA, 961 bp, Cannabis sativa
atgtcatggcggcatcctttgcagtttgctctttcatcacatgttgctctgcctcttcgactatcaaggctaattcgaccactttcttgtataaagtgttgtgagcaatggtaattttcaagttccgactgattgtggcattcagtcccctcacatacttttgtttttgggtgaagtctgttggtaccaaatcaccagcaaacttagatagccgatcaaattccaaggtatactcagccacagtcattttaccttgagtcaacttcacaaagtcttccatatgtgaagtccttacagcggtgttataatttttttcctcaaatagactcttaaactcatcccaagtcatagtactaacatctcgagtctaccccacaatgtcctaccagatgcgggcctgatcttgtaacataaatgcagtacaatttactcattctgttcccgtcactcccatattatctaggatgttgtagcttaacaaagcattcaaatatggaatctctatgtagtagtataaatcctaggttacccacaactcgcataggagctggtggtaacacttgttctgcgggagctgccgatgccggttgcctcgaccgacacaattcatcttcttaacgaagtatgatacttcgcatctctagaaaaatctgctaccaatcagcaggcggattagcattatcccccggatttggcggaggcccaagcggtgtcggtggattggtttggtcaacaccaggctctgcatgctcgccctgtggtctagatgtttgcggagggtccattttcacaaataaccctgtaatcaacaaccccggtgagtcagttaccaataccacacttacccacttattgcctttaaccttaactcaactattttatttcttattaaataaacatttatcaattattacagtaatcatagatttcatatcacaaatactagatgctcacatactgc

SEQ ID NO: 68437 - DNA, 1025 bp, Cannabis sativa
ttttatttttttaatttaaaaattcatttaaataagttggtaactttaaaatattaaaaattaaattattgattttatataattggaaactttagaataataaaaaaattcgttaatttcaacaaaatgaaaaattaaaatgataaataaagattttataaaaaatagttaagataccagtaatagagaaatttattaagttaaaaattgataattaacaagttcaaatttaattaaaaaaaattgaattaaaaataagggttaaactttaacaaatttgtaactttaaaattaaaaataaatattaattttaataaattaaaaattaaaaaaattaaattattaatttaaactaattgcgaaatttgaaattaacaataaaaatttataggtggtacataaagtagcataagacattgtaagatagcataaaatgaaattcttatcttgatttgatctctttggttataaaccaaaaataggatagaataattgtgtttgtattatcacttagtgataattttctttcacgcgcacaatttttcttaaacccgtttggggaggctgagtcagtaaggactcttattaaatacgcttctctaaattatgcatgacttttcatctcggcatcgaaagtttgggcttgttgtatacctatagtgtgatctattgctcatttgattgtttctttgttatagatttcggtgtgtcgtctccttgcacgttcttgtaagttgccagacttgttaatagtttgcttacttatgagaactgtggggaggtgctgccaaaattttgataaaaagaagcaatcttaagagagtagattgtactatatgtatattacaaacccgaatgagatagtttctttactctttttgtaatggagtgagaaggtggactaggacacttgcacattttcaactttattttgaacttctttttatattatgtagaaatatggtgagcgagagaagctggatgactttgaacagacggtttgtagagtttcgtaggggtgtgga

SEQ ID NO: 68438 - DNA, 4238 bp, Cannabis sativa
ttatggtcaatagtactgtcatacaaacgttctagactccgtatgcgtggaacgcatgataaggttatgattgggtgtataggcgcctagttataatctggtttaagtttaagttatgattgtgcttttattactgagtttgttgactcatagttgttattttcatgtgtaggtaagggcaaagctaaggccgagtagcagtgagtgcgagcagataaagattgtacatattggggcggttagacttggagtgttcgatcttcgagatagtaggctgtattttgaatagtcgctaggcgaaaatttttgtaactaatattttgtaatatggttataaatttttaactacgggatcccagttatgtaaaggttatttattttcaattaaaggttaattaagtaaaattctaattgaacacatttttcaacaaactcgttgattagcattggatggcataaatagctttaaatcatgataacacgcctgacctagtagggtgttacaatttgatattagagccaccaagttgtcttccaaagattgttacaatatgtacaatcatcatcagagataagctcgactcacgatttagtaagcctttattgctttcttagtttatttattagtatgttataagaaaagtcttatagggaatcatgttagtagcctaatagctgaataggtgtatgctttattatctcaagtaagtggtaattaaaattgttcttaatcgcaatctgaccaggctagctcattgtttcacaagttgttctattagaatggatgccagcggaacacaagaagctagggtaattcgatcggatctagtggtggtcagggagttcagtttcccccaaatattcatggctgaggtagaggcctaagaggtagggcacgcggtcagggtgatattaacccaccacaggctgcccaagattgggagaataggtttatagcaatgtaagccagaattaatgaggaagatgaggagattcgacatttcagcagggtgctcttgcaatgcatgctcttgaggtgcaagtggctcctgcccctgctgtgtaggtggggtcgattcctgttcctacctgaatggaaccattgcatgaaaggttccgtaagcaggcgcctctagtttttctgggaggtctagatgttataaaagccgaacagtggctaactgttatcaatcaaattctgaactttatgcgagtcactggaaatgacaaagtgacttgtgctaccttccagttccaggaagataccctagtttggtgggatatggtagctctcacctaggatgttaccactatcacttgagaataaaatctaggagttgtttaatgcgaagtactataacaagcagtacgtagtgcaaaaagaaaggaattcactcagttgacccagaaggaaattatgttagttacaaaatatgacccagtttgacaaactgcctaggttagcctcgagaatagtgccaactgactttagtaagaaagaaaagaatctagatgggttgaaccctgagattagacacgacctaatgattacaataaataccacttatgctgatatggtggggaaagcactacgagctgagggtgcatctaagtgcattttggagtcttgagtgactcaaattgttggtggagccactgctccacctacctttagttatggtaggagtggtaatgactcaaccactgatcaaaagagaaaagtcccatctacgtttggtggctcgaatcagaataaaaggttccaagggaaccaaggttgtggtaactgtcaaggtgggtctaagagccgatacacttgcccagaatgccctaactgtaagaagcatcatctaggtgagtgtaaaggtcgaggatgtttccaatgcggtgtaactagacactataaaagagacttcccacatttaaagaaggaagaatagaagtctaaggcaaaacccactccaacaagggtgtttgctcttactcagactgatacagaagctagcccctcagtttttacaggtcagctctcaatcaataactcttactattctattttctttgactttggggccactcattcatatgtggcagccagaataattggtaaattggataggccatgtgataaatatgataaaggttttagaaccctattgcctggtggagaattgacaagaatcatgaagaaggtgggtatgaaacctgattttttctaccatgatagatgtgatcagcttcaactaaaccatctcagctttgttgatgatgtgttaatgttctataatggggactacaaaagtgtgatatacttgcttcaaggcctaaaactattttctcacacttcaaggctctccataatgcatctaagtctacaatttattgcagcaacatgccaaggcaagatgtaactcgagtactagcaacttctggtttcactcagcagcaactaccattcacctaactaggggttccgatttgtacagagaagatctcgagcaaagagtgcgccactttagtaaaaaagatgacaacaagaattagaacatggagttcaagacatttgtcattttccggcagagttgtcttgattaactctatttttctaactattcatgcatattggggtcaggtgatgctccttccaaagaaagtaatcaaagatattgaagctatatgtagggaattcttgtggaaaggccaacacttgtttcaaggggcaggtgctatagcttaggacaatgtttgccaaactaaagcagcatggggtattggcttcaagagagttaaggaatggaatcaagttgcaatgatcaaatacgtgtgggcaattgtaaaaaaaaaaaaaaacttgtcagtcaaatggatacacagtgtttaccttaaagaggagaactggtggagctactttatcccttgccaagggagctggtattggagacaactagtagctctaaaaaagtagatatggcctctgattgatacccaataattcctagcagagagatatcaaattgcagcagattaaaaattactttgctctgctcaagataaaaaaaggtggagtgagtaggtatggggaagattcaatactcctaaacatagttttattctatgaatttctatgtaggagaagctgagaaccaaagcaagactacatagatttggcattgttggagattcccgctgtgttctgtgcaacaatcatgaggaaacaaatgaccatttgtttttttcctgcaacagatctatggcatatcttattgaaattgcaacatggatgcaatggagagtcactaatacaacattgcctcgactaaccaggtggattcaaaaggattaaagtaagtaaattttttttaaaaaagtgatggctgcctgtcttactagaatggtatacaacctatggaaaaccaaaaatgagattttatggcaaggaaaatagccaaatatggctcagttagtcaatagaattaaagaaaatgtaaagcaaagagaaagttagccaaaaagatgaggaatggtttcattctttgtaaaatcttgtatagaaatatgcaggccatgacatgaaggttatggtacttatagtttgtacaaatcatagttaatttggaaaaaacttcctgattccaaaaaaaaaaaaaaaaatcttcctcccgaagagtgtttaacttgctcttttcctcccgaaaagagtctcatgatcaagacttctcccgaaacttgatgaatgatatccaaggtgttcaacctgtacaatttcaacaagaaagaatcctgaataatacaataataaaatactaagaacttgttggactcaagttcttcacataacaaataaactttctctaattttgaaagtaatttgggaaatgatacacaaagagatataaaaaatatcaatgacctaggagtgtctttatacactttagaaaccttctaggtcatgaagaaagaatcaagaaacaatcaggccaataaataaaaaatattttcaaacaggaaagtcagaatctgtttaaacagacaatcaatgtgttcaaatagatacattgaacctggacagttttttaacaaaaatttcatatataaataagaaaactttgacaacttttattcatacatctatacactgtttcttgactaagaaattagataggaataaaataaatataataaagattttccttaaaaaaaaacaaagataatttcaaataatctaaataaggaaaact

SEQ ID NO: 68439 - DNA, 707 bp, Cannabis sativa
tctataattttttttaattgtataattttttatttttttttaattacaattttatggaattagaaaaaaaaaaaacaacaaaataacatacaaacaataaaaaaaacataaaaatataataatgtgaattattttcgttaaaaaaaatttctaaaccgtcaaaatatttaaaattttgtacaatcatatttttatttactttttttagtttttttttttaatgtgaaaatattattgaatgaaaaataagaagagaaatggagattgagaatagagttggaaaagaagaggatcgaactcggtaattactatttttagtaattaagattagacaagttttcaatatcaacattaggtactaattatacactaatttacattaatcagatgctagttgagcttgagttcaaaggggagggcatgtgaggttatttgcctcccctcaactttttataatataaatttcacttataaatttttggatattttacataattttaatatgataaaaataattttttttaatctacttttatatattttttatatttgttctcataaaatttatatttttttttatttttctcccatatatttttgtttgtaatccttagaaaatttataatttttatttttattcccacatttctttatttttgtcctcataaatttgtaatttttcgataaaaattatattttctttaaat

SEQ ID NO: 68440 - DNA, 1064 bp, Cannabis sativa
atttatatataataaaaaatattaaaaatataagaatagttaattatattttttaggctgtttatttatttactaatacatttaattagttaatctttctaaaaaataatttaattccacctaaaaataaaagaatagcatgtttggcttattgagtttttccaaacatgtgttgtcttaaatccctaggagaaaacctaatagctccttctttttcccttaaatagtttcaatattaattaagtttttatataattttcttcatgtttttaagtttatataaaaaatttgatgtgtaattggatatccaattacaaaatcgatccaatcaaattagtaattggattggatttgattttgaggtctaatcgaatcagatcggataatgattttctaaattcaattactaattagattagatcggatgaggaaaaaaaggttggattagatcagatgtccagccttacatcttcataagtcggcttgcaagagaacctaggagtttttttttttaagagaattcacctctagtattgttgctggtttttttttcatatttgttctcagaaatttcacataatttttggtgagcagaataatcttttcttcatctgggttctcaagggattcctgcaaagagattttcgatcactttatgaggtaaaactataccacttggagctttctttttctggtaatttaaaataaaaaaaatgaataattcaccgagctaaaactatattttaaatattctgtttcatacatgtaaaataacattcaacattataactacgtatgcagagttagaaacacatagaaatgatctgtattactataggtgcatttgtaacacttttttaatagttttttatttttttatttagaaaagtgaaaatatttttagaaaacatgttttataaaattgatttcagtttttaatttaaaaattttgaaaaacagaaaaaaatcacatttaaaatttttttaaacatattttttaaattataatttatttgtattttcggtcatcaatattttggatcctaattccggacccggttccc

SEQ ID NO: 68441 - DNA, 620 bp, Cannabis sativa
ttgattgaggttagcattgagcaagacttaccaggaatgattgaatttgaaaatgaatatggcagcaacaccacagtaacagtccagtatgaatggaagccaagtgtgtgccaacattactatggaatgggccatgtggctgctaaatgtaaaaagaaaactcaggccaagaaagaatgggttgtgaaggcatataatagagtagaaaacaggaagaacacacaggatgaagacagttttcaaccggtttcaaaaggaaaaaagaccaggccgcaagaagaccctgtagaaaccgaaatacagaatgtttttagcattctaactggtactggggaagagcagcaagaggaacaaggaattgagattggggcaatacagattaatacaagagggggggggagatccctctcttggaaatggataagttcctttgttggaatgtctgaggggccaacaacactcaaaaacaaagagcaatcaagcaacttattcataatcagggtgatggttttttggggctccttgagacaagggtcaaggttcacaaattgggaaccttgtatcttaatgtgtttgaaggatggtgtttctcaacaaacattgcttggcatcgaggtgga

SEQ ID NO: 68442 - DNA, 676 bp, Cannabis sativa
taatgacttctctgaaatatggttgcaaatttgcaatggtgtgccccgtttgttaaatattgaaattttttacaaaacacttcttaacaaaatatgttctcatgtattttttttttatttgaaataattgtttagataatttttttttaattgtcatgtatgttatatttatttaagaatttaaaaaaatttaaaaaaatttaaaaaaattaaacacgccaaaaataaattattttatacgcatgcatcattattttattttatacgcatgtgaaataaattgtttgaatattattcttgtaaattattttaaatttctcaaaattttattattttatttaatacaagtacttattattattttatttaataaaaattaaaaaaaaaataacgctttctcttttactttactttgtgtctctatgaagaagtagatctaaatttttcttttgcctattctttctcttaaatcctaacgctaaatttttctctccatagtgcctcaagtctctcgcttcatctatatccatagaaaaatcttttctctaacgaccgaacaccctacccaaatcaggtaaatgttgtggtgtattgttatttttagaatattttactaaaatttaattccaataatgtttgactcaagctaaacttgtgttaaatttaacacaaaaat

SEQ ID NO: 68443 - DNA, 962 bp, Cannabis sativa
gaagttacttgaacgtgggtctgcctgtggtggatcacgccaatgtaattgatgagaatgatgagcttgacaattgaacttgggctttggattcaggataatacaaagacaactttccaacaaatcatgaaactatgatatatgcttggccataataaagagtccaagtatttggaaaaatgatctattaggcctttgaaataaaatctcggctcagtgaatatcatacctagaaagagtaaaataaaagtaaagccaaagctagtataagaaaaaaacttcctgtcgatcaatttaactccacgcaagttattacatcatgtgtgatgctttgctcttttaattgttgtatcttgaacttctcatttaatttttatgtacaccactatgcttaaatctaaaaaataacacaaaaattaaagtaaattaaatatttccatttaaataaattttaccattagaaataagaaatatttaatttatattaagaatatgtacataaataagagcttaaaatgtacaaatttgagtcttaatcattatccaaagtaatttttctatggtttctcaatttggtttacttgttcaagatatccgtaatttgcttttagtttttccatatattgagttttattttattaaacgatctgcaaataaattggtttattacttggcaagagagtcttgtttctccaggttgtgtgcttcagttggaagattgttctgctgaagtacgctctattgttttgaacgaaattcttaattaataaatcttttgatcttattcaaaaaaaaaaaaaaaaataaataaataacaagagtataacatataaataatattgtattttcggtaaataaaattttaaaaactataaaaatattttaaattttataaaattgtatttttgtaaagagttgattagtagtgattattagtagtacatagtcacatacatgttttc

SEQ ID NO: 68444 - DNA, 943 bp, Cannabis sativa
aaattttgggacaaaatttctttttaagagggagaaaggtaagactcggtaaaaaaattgtatattaaattagtgggtgcgacccacagctttattaaacattccctctcatctttcccgtccagcacaaactacctctctctctcctctttcttattttctttctctcacatcaaagaaccaccataactaccatgactaaccaagctctgacgacttgtttccattcaccactcaaccgcacgcttgggagcattgtactctccaactttcggcgacccttcaccttcagtggctttgcctcaaatatcatcattagactgggatcgtgggtcaaagttttgtattcgaactttgaatggattttttggctagctctgatctccatttaatgatctattttcactgctagactcaacttcgaggagaaaaatctccactaaatgatttgacccagttcactactttttctggtgatgtttttgtagctttgccacttcctcgtaactgtcctgtgataccgtatactatttcgataagtggttggcacgtgtgtaatctatttaccgaggtggtcaatttcatatatactattcttatttttggctatgtttcaggtacaccaatttttaatgtcactgatcgtctttgtgcaccgcgtaggtttggttacttcaatcttcaaaaatagtcatggtatatgtcgttggacttgattttaagaatacattacaaagatgaaaattatttattttatttgagaatgtaggataaagtgactaatctatttgaacttaagaattaggggcttaggagcatctcttttggagaaagtttgacgatcctaatgaggtagggactcaatttgattattggacatgattttatgtgttgaataacgttagacatattcaaattttattttataaaaaatttaaaaaaa

SEQ ID NO: 68445 - DNA, 655 bp, Cannabis sativa
tccaataagtatccgaatgttttggatcagaggtgatccgtcgggtcggagctccaacccgctccaactaaatggatctttttgacatccatatttgcgtcaatccaaggaacagtctcctactgatccccagatagaaaatatgagaagaatatattatgcttcaacagttggaggtctaatgtatgccatgttatgcaaccagacattttctatgcagtggaaattgtgagaaggtatcagtccaacctaggaaatgaacattggatggcagtcaagcacattctaaaatatttaaagaggactagaaactatgtgttagtttataagggtggtgctttgaatcctttaggctatatcgactcagatttttgggcttgtcttgatgataaaaagtctacatctgagatggtattcactcttgggggtggagcaatcatatggagaaacgtcaagcaattaacattatttgactctaccatggaggccgagtacatagctactgctgaggctactaaggaaccagtctggctaagaaagttcttcacagagcttggtattattccaaatatagaaaaatcactggtgttactttatgacaacaccggtgcaatcaacaacagtaaagagcctcaaagccacaagaggagtatca

SEQ ID NO: 68446 - DNA, 784 bp, Cannabis sativa
atccggctgcctctgaacctaaaactctcaattcaaatctgacaccaaagaatatactttttatctcggtaaaataggtatcaaatctatgaactgatactatatgtataagtgttagtttaaaactaatacctgaagttcagtttatagtagtgtttgatagaaaaagttgtaggggtacaacataactttttaagagttcacccatcctagtactattctcgtccaaacatgcttaactgtattgttctaatgagatttgttgcattagtactagtatgattgcaccctatttttgttagaatgtgactaaaatataatgagttaacttgaattcttgaagtctagcactacttgaagagaaagcaacaaggtaaacatggtgtcatggctttaaaatttgatgagtaaggcatacgatcgaatcaaatggcttttttttgtatggattctaagaaggatgggtattgacaaaatatgggtgaagttaattgaacaatgcatgtgttctgttcgatttagagtagtaagtggggagcatgaaactaatcagtttgttccaacaagggaattcgtcaaggctatctgatatcaccatatttgttcattgttaatgttgaaggtttatctacaccataaaatatgaacttcgtggttggcttcatgattgtcaagtagcgaggagagctccgttggtatctcacatgctctttgtcgatgatagttatttgtattgtcatacaacaaagtaggaggtgggaaagatcttgaagttgctcagagt

SEQ ID NO: 68447 - DNA, 541 bp, Cannabis sativa
taatggtttaatatttttaaaaattaatacttataattaaatttgtttagtactcattaataggtaatacccattaagaagtatttcatatatatattatgtttgaagcaataaaatgtacgaaacataaccttccatctttcaatgaacgaaatcctcatctctattcagattacagatgtagtatgacatcaaagtgaaggtgttgtatataatagagattatatatgacaatgaccgatataaatgaagctgtagtttttatctaacatgtcgtttactataaagacctaaatttatatcataacgatgatcaatagtagatcgacctaaatgctgagtaatcatcatgaactcacgttcatgaaattagttttttagagaagatgattcttacaacttttatattgggaagctaataatgtgtatggttgagaacatgatttacaattatagaatattcctaactttcctaacggaccgaatcttggttcccttagtattaattctagagctggaatgttgtgcataaatttattag

SEQ ID NO: 68448 - DNA, 635 bp, Cannabis sativa
ttatgtttatttttctttgcgaatttgacacactagttaaatattatctttaaatatcaactagatgaccactgtatacaactgtgtatatgtaacactaaaacctcaaagtcgatacagtagtaatccagttaatatttaacggtaatatctaactaaaactttaaatttgcaaagaaaaggaaacttaaggggattttaccaccaaaataaaagatatagaggttaagtgtataaaaattaaaacataagggggttttgccacaaaaaaaaaaagataagggggttaattgtataaaaactaaaatataagaaggttttgccaccaagaaaaaagattagggagttaagtgtataaaaattaaaacataagaggtttcgccacaaattactcttaaaaaataatttaaaatatataaaaaaatttaaaatcaaaaaaaataatttttttttcttttttcttctttcttctttctttttcgttgttcactcagcctcagaccagagatctaccatcatcgttctccctttcccagatctctttgcacgacaccaccaccacctcattcccagacctcccgcagacataccatgccgattctcccattctggatctctctcactcctcttcttct

SEQ ID NO: 68449 - DNA, 895 bp, Cannabis sativa
tgtgtcacactttaaatacaacttttagaggaaaatccttaataaataacgaaaagaaaaagccgtctaaatattttactatgcaattattaatgctaaaagcctagaaactcatataatttataattgaatattctcaaaaacttgttatcaaaaaaagaatattcccaattttttttttcttttggacattttgtgtactttaacattaaataattagtattttgtcccaaaattttttatactattaaattgtatttttataatatacaattagttaataatacacatttaaatataatttttacagtaatatgatctttctatcagattctatttaattgtatcgtgaaacgagtcacataatggatgataatttataacaaaaataaaaattaaatacctttcacttttaatctaattcaagtgaaccgaaccgatccaatccaatctaattacaaaaaattaaatatccgtttacaattggattggattggattggatgataaaagttagattctaatttaattgaatcgttgttggatgtcaatctcaaaatttaatttaaaaccgatccaatctaattatatttatatatgttaaaaaattatttatgtaattttttctaaaaaaaagtgtaaataaaaggtaaagggaattcgtcagttattatctactactttatttatctattttatgataaaattaaataaaatgtaatagaaaaattgtattttacatttcgaatagtattattaataaatcgtatctggtagaagtacaatttgatagtataaagaattcattgaactcatctaaccaaggaaggtccaaatatgtggcatttgacaaaattaattgttaggccttattaattatacttttaccattttac

SEQ ID NO: 68450 - DNA, 848 bp, Cannabis sativa
ttccatcattcaagctagttaattagtataaaattctctatagaaggaatgaaatcagttaatgaaaagttaaaccaagtttagtttatttttttattatttacttgattgttgttattgggtatcagtagtcctatcattttctaaatatatcgtcttgcaattagttagcaatattctttaaaaattattgtattaaactatatgacctcatttggtacgccgtattataatgtattgtattgtgttgaattgtgttgtattgtattgtattctattaacattatttaatataatacaatgtttggtattgacttgtattaattaattgtgtaaagtaataatatatttttaatacactcgatcctaacatcaactctgaatccgggtccgggtcctaggtaccagatccgggaccaggtccgggttggagattggtgttgaccccaaatcttttataaatattataatataagctaatacagaccatttattatgtataaaataatacaacatacattgtattaaaaatttggttgtaataattaatacaatacattgattaatccaaacatagtattatgtattatttaatacaatacgatctttatacggcgtacgaaatgagccctataagacttgatacttagttagatcaataacgatattgacatgcaaggtgctaggcaccaccggtaacttctagcatttttctatttacttagagcaacattcaggctttgctagcattattgatacccttacgcccattctagtaattttgcttcgagaattgtctttcgctaagatgggactaagagcttcttcaaaatgatattttaatcaaa

SEQ ID NO: 68451 - DNA, 1109 bp, Cannabis sativa
agttaaattagaaattattccgacttaataaatgctttattctcatatttgctttttcattttattttatccgttaccgcttgaccgtttaacacctacacagtacaccatgtcttaagaaactcgatcacttggactaacctcactgtttcttgaagttatctttacatgagagtacttacaaagatgtgcaaaaaattttgaatgctcatgtgacatatggctctcagtataccataacataacctatgtgtccctaagtgatcaaagaagtgccttcattggttactagccataccaaatctcccttggccgtcttgatttgaatcttaggtgggtgttacacttttgagcattctctacttagctgaagatttgtggagtgaaagtgttgaactcactaaagaaacaactgaaatcatctcaagaccaactcacaagctttgctcagcgcttgaaagtgtcgttaggtctgtgagctgtaattgactaattttaatgatgtaccaaaaaaactttgttcaacgttctagcttattcatcaaattaaatataattacattattgttagctaagttggaagcagaagaagtagtagttgcagatttcgtttttactcctgtaaaagataaaaaaaattataggaagaatgttcttaattttttgtaagacaacaaaagagtgttaaaaaaaatatgagaaagatgataaaagtaaaagaatcatatttaaggaaagttaaaaaaaaaattaagatttttttttataaaatgtgattaattaaaaaaaatggtttgaaatagttagagtgagaatattaaatgaaaaagagagaaaaagaaataggataagtgtttgtattttatttttgaaagaaaataataaaataaaatttatgagagagtgtaaaaatgttaaaaaaataaaatataaaaatgtatacttattatatatatttttatatatgtatacaaagataaaaaaaaattgtttgaggaaaaaataaaaaaaaaataaaaaaaatgagagaaaaataaaaaaatgaaaatgataaataaagagagaagagaaagaaagaaattaacttaaaagaaaaagaaagaaaaaaa

SEQ ID NO: 68452 - DNA, 856 bp, Cannabis sativa
ctttcatttttgcaactatatatttgttcctgttgaaatatgtaaagatgtttgaaatttagttttattactaattcataaatcaactaaactcatacatatattttgcttgagcaatttagaatgtaatgaaataaaagtgcacatgggttggattgatcatataaatgaacattcttataacaatagtatttcttaagaaaaatttcaaaagtacctaagattttgaaaagaatatggaatcttttttgggggaggacaggaaatctacataaatttttattttttgtaaattcgttatacttttacgttcaaatatatttttttatatttgtacggtgttcataaaaataacacaaaaacaataagaaaccacatgaaaataacaagaaaataacataaaagtaataatacacaaataacaaaaaaaataacaacaaataacaagagtacaacatgaaacatatattaaaagaccatattttatgtaaataaaattttaaaattcataaaaatatttaaaattctgtacaaccgtatttttataatttttttggttatttttgaaataatccttctctttactacacatattataaatctttgtaactaatatttataagtttgtaaccttttctcaataaaaaaaaaaaaaaagtttgtaacctatatatatgttacaattctgtaaacaatatttataaataaatagcaaaactcatggtaaatttgtaatttttatactttccccaagtatataagggttagaatgggccaacccaactatatacaaaggcctaattaaattatgggctttaatatttaaataacactttaagaaaaaaaaaaaaaaaaa

SEQ ID NO: 68453 - DNA, 756 bp, Cannabis sativa
gtactcaattttttagtttagtagtagtactagtaagagtaggagaaaagttctaaaagtgtaagacaaaatgaagaatggtaatgattttttctttttgttaaatgggtaatttccaattgcaatgcaaaaagaattctttctttttcattgacaattatgaaatacatgtgtgcatttgtaaatgtgatataatatttgtatgataatagataaattcttgttgtgcctaatccatttttaagattagcatgtgaaaaatggctctttgtttttcatgtttatacagattcaccactggctatttcaaaatcacttaagaacacaataaaagaaaaggaaagaataaagcaaagcataactatggtagaataatgacactagtacaagaaaagatgaatcattaaaattaacaacaaacaacaaaataacaaaaaggaaacattaattgagactctgatatttgatgataatattaaactatgatgagaataagcaagagataactacgcgtagtctaggttatacaatcacacaaactgaggttaccataaaacaccttttatccaaggtttataattctaaacacagtaacatgttacaacatgttaatagcatcaatttagataagaatacgacactaatttattcaaacacaaccaaactagaaaggtcaaaccaatttattcaaattagtactcaagctaatcataaattagctgacaaactcgatcaatttagatacgaaaacgacac

SEQ ID NO: 68454 - DNA, 577 bp, Cannabis sativa
taatactatattaaactttaatttataataaaatattatatatttaggtgtccataaaaattaatatcatatataattttacatataaaatacaattcaatataatacaatacaatacacttaatacggctattagtacaatatatatttctttacgctacacttacgccacacggattcccattccattttctttacgctacacttacgacattttacagatttgcttcttcttttacgatttctttgtatgctttataattttataaagctagatttacattagccaccttttgttttttttttttttatctttattttaaaaataatttggctgatcatctaatgtaatataataccattttgaggtttttatgtaacatgtgtaataaatttaatgatgcttttgtttttgtttcaattataattactttataggtttctcaaaaaaaaaaaaaaaattactctttgggccaataaatataatatataggaaaattctacaatacactcccttaaaatagatatattaatgtacccctatctgttttagcatctgaaatagttttttagtcaa

SEQ ID NO: 68455 - DNA, 1155 bp, Cannabis sativa
  modified_base (29)..(41): a, c, t, g, unknown or other
gggggtgggtgtgagagagagagagagannnnnnnnnnnnnagagagagagagagagagttagtgtaaaatgagaagggtaaaatgggattttagtaaaaattaacccattttacaaattgtgtatagttttaaattagtggaccaattttagtccaaataatgcataaaaaatcaaattttctatttataattattaatttcttaattattttattgatgaggtgatttttttaatctagcttatcttttcccttaatgaggttttaattgattatttaatttttaatttttatattataatgtctatttaagattattttgtaccataaataaagtgtttgctataagttgtgatttatttggtagtatatttatgtgtcaagtgtgtcttatttggtactatatgtggtggtttgttttatgttttttctaagaatgacgagagatagtatagacacatgatccgttccacaaatggtaaagatacattttttcttcacagtataatgttttggaatgttttttaacatctaaataaaaattgtcattttaagttaatattacaattaaaagggcattaattaaattttatatattttatataggtatgttttattttccttagtcattttaagatgcaaggactttgaaagataagttttattataattctctttcttaaatattttactatattattaatttctatgcaataattttaaaattacttattttaatattttttttttggtgaagttactaaatatatttgttttgtttttatttttttgtttaggtatcaactttgatagatgttgttcttttttttttggttggattatgatgagctcaagagaatctcacatttcttaaagagattttttttctataatgatttaggctctctttcagatgtttttaaagtttaatgtcaaattttcctaaagcgccccttattcatgtaaattattctgctaatatagttatgcatgaattaattgtacacgcacataaggtggatagtagtctagtatggatgaaatttttctatctcttcttatgatgtactcgatgctaatttttttcaatgaaagtttgttcattattcaaaaaaaaaaaaatcttttagaaggaattatcttgcatcaaaaat

SEQ ID NO: 68456 - DNA, 700 bp, Cannabis sativa
  modified_base (49)..(56): a, c, t, g, unknown or other
caagaaactggtttcttcatcaagcatcaagaaaccggtttcttcatcnnnnnnnnagtttcttggtaatttttcctgtgatttttccggcaacaatgttaatttcttcatcaaaacttaatagatcacatgtatattccattcttttttttttaaaaaaaagaagcgtagatatatattaaataaaactagacatcatggtcgttacacaataagttctccggtaaagagttaatcggtatcgatccatacacctggtgggtgaaagcccacttagcaacattgtgggctgcatagttacagttcctactaacattcgaaaaattacaacaattgaaataaggagaagacttagtacaaaaggacacatagttctctagggcccaatgggagccttcccattgagagtgttgattgctagtctcgagtcactctccacaataacatacttatactttagatccaaagcaacagacacggccaagcaacaggtcgtcgcttctccacaaagagcctccgagaaatctaatcgagacgtgtgaatggaaatcaccctcccaaggtgattcctaactacaacagctatgcacatactctccaagcccactcgaacatcacaattcaattttatccaatccagaggtggagacgtccagcaatccttcacaggcggcgaaggactaggcaagagagaagtatg

SEQ ID NO: 68457 - DNA, 1034 bp, Cannabis sativa
  modified_base (419)..(420): a, c, t, g, unknown or other
  modified_base (969)..(1000): a, c, t, g, unknown or other
aattcttcaaaactcattttatatgtaattaatttatagtacatgccatatataacatgtgtccctctctctcaccttcaaggaattatataaataatttgttccacttattcaaatctaacacatatatatataatattttctcattaattataatattttttaatataatatagggtaaatactattttgaaccctgtgttttgtaaaagttaccgattggaatatgtattttgttaaataataaaatagaccctgtattttctaaagtagtacaaataggactctgagattaatttttgacaactttctttaatataaccaacttgaagatcattcttaatacgaacatatacagaaaatataaaacgttttgtcataacacttttagatcggattataattaaattttattttgnnaaaaaattaatttagggttctatttgtaccattttaaaaaatacagagtccgttttatcatttaacaaaacaagaggtattattaacttttacaaaacatagagtccaaaatattatttaccctataatgtatgaatgtataattatgttgtactcatacttctcatttgaattaataagaaaagttaagtggttgaaaagtatatgtctcgtttaatttaaaagtaaaaatccatttgtacattttctattaatattagtggagcaaacaaatttatgtgttcttgaattagtattagtagatgtagttgtttcatttcttctttatcaaaaattgtgatattactaattacaagtctcaaaaatactatctaactactttggtcgaatgtttaaaaataaatgtaaatattcgttaatttatggagaatgacaaacatagtatatgagactcataactaactatatgtgaatatgtaacaccctaactaacataggcgtattacatgatttttttgaacatgctttgcagctcgttgctaatcaacnnnnnnnnnnnnnnnnnnnnnnnnnnnnnnnnttttgctttttaattaaacttagaaaataatatt

SEQ ID NO: 68458 - DNA, 856 bp, Cannabis sativa
aatccctcccctttacagttcgaaaagctgctgcgagagtgacgcgactcattagcaagcttgtccacattggagatgaaacatctcttaacatacaggaaattacaaacagtaaaagaagataataaacttaaaacaaaggaaaaagtagcaaacaagtgccaatcaggacacttcttctgattcagcgcctgaaccaggatcttggaatctgagacgatggatacttcattcacatgttgatcgactgcccatatcatagcatagcttatagcctctaactcagccgccagagcattaaaacaggtaccagcagtagagccccaaacccagtccgaacttcctctggtttgaaccaccaaggcacacccatataactcattagcatacgaaccatcaacaataacaacgcggtcagttggaatggatagagatggagggggctccggtaggggcacctccatccaagtatgttggccgcctttcggagtcatttcatgaaatctggaaaccacattggctagagcctgattaatgcagagttgaacagcagagggggagtgaatcacttgattcctataattccaagtagtctcgaaaatgatagctgtgtagattaattcctttattacttaataaaaaagagaaatattaaaaagtattacactgatactaattggtatagtttaagtatcaaacataactaattaagacaatatttttttataaaatattgttattgagtgttaatagtgttcaacaattttttatatatagctaataatgttctctaaaaattattttttaaaataaaatgaaaccgaatacttaatcttaagatccctttaaaaaaaaa

SEQ ID NO: 68459 - DNA, 1899 bp, Cannabis sativa
ccattctctacatagtatcagagcaatacttagaattgtgattcgaaattcgaaattaaagttcataaaaaaaaaaaaaataagattagggtttgagtttatggctccttttacgataactatagttggagagcgagttctttctcaccgcccatttagtatcctagctctctatataaatatatactattctatagaatacaatacacaattctattcaccattctctacaataagcaaacctttattcctcatctccaggttcccaatacccaaacctccctcttctcgaggcctgcaaacctcatcccatgccactaaatgttcaccatctgttgactcactacattcccaaaagaagcctctcattatcttctccaatgctttagctactaattttggcgctttaaatagtgacaagaaataaatggggagagaatatagaactaactaaataaaagagcctgcccctttcagataaggagcattttcatccatctagccttttagcacacgttcagtattggttcccaaatgctccattttcgaggcgaaccccctaacgacatgcctaaatattgaattggccaacttcaaacttcacatcctatttgagacgccaaccttgacaccaacctctcatccaagcaaatccccaacaattttttctttttttgaaaaagaggagatcctttagtcttatagacaggatcctccccgttatatattaaaagcctcccttgtggtggaggaaaaaccatggttacaattaataacaaaacagaaattctaaggcaagagtactcccccactcgctcatattaacttttagcctagatatagcacaaaaagcttccactaatcccaccagtttctgcactgagttctcatcattgacaaagaataaagtatcatctgcaaattaaagatgactaacaagaactttctcttttcctaccacaaacccagagaagttgtctgaacttactgtcttatccaccatcctcccaagaacatccgcaatcagagtaaacaaaaaggttgatggtggatcaccttgtctaaggccctgaaaaccattgaatttccccctcggtgtgtcattaatgaaaaccgagaatgaagtagatggcatgcatcctttaatccatttcctccaaataactccaaaacccttcttgcacaaaactagatccagcaaatcccactccattctatcataggctttctcaaagtcaatcttgaagaccagaccgctcttgcctctgcttctatagtcttctactgtctcattagcaatgaaaacttagtctaaaatttgtagaccttcaacaaaggcagattgtgtttcaagaattgtattctccagcacttcccccaagtctgatagaaagcatctttgcaattatcttatagacacctgttataaggttaattggtctataatctttgactctacagctattgaatttttttggaattaggaaaatgaatgttttgttgatgctaccttggatagttccctctctttcgaatgatttaacgactttcattagatcttcctcaattacctcccaatgagactggaacaaagccacttaatcttcctcaaacggcctctctaggtgccttgcgaaggcttctaaaatcacttgacattcaattccttcgatacttctaccctatattttttcagaagtgtaaaggtttaataaaaagaagttatctccgtgactatttctttctcttcctcaatgatagatccatcttcccttttaagccttgatattgtgttcttggctttccctgcattaaaagattatgaaagaaccttgagtttgcatcaccctccttagcccatttacactttgattacaaccacacacttctttcctcttc

SEQ ID NO: 68460 - DNA, 1124 bp, Cannabis sativa
taaactcacttttgtagatgatatccccattagacccattaagttagtgtaaattatttaattatatgctagacttaaatagcgagtgagggtatattatgcaaccactcataaaagtaggtatattttaataaaacataatatgaaaatatttttgattaatggatacaaaaaacaaaaacaagagatattctccactttatctctcaaaaatatgccatatagaataaacacttatcattttggtgtaaattctacttgttaatgggcgggttgccttaccctactcaatcacccatttaatgcagggcaaagctgcccgacccgtttagtgccggtgtaagcctccccaatgttctagacatacgaaaacgaattatcaaatacttcaagttaaagcctctgatcacagcacatgtagttttggttactctcgtcatcaatcatgatagtgtcgacattagttggtttgcatttatttttctacatatatcctcaccagcattgtaatgcattaaatctagtaatctacacacactttactgaagaaccaaaaataaaaattgaattcaatcagtcaatttcattccaatccgaaactccacatactaactaacatcaaactataaacgattatactaagcatatgccaaggaatatgaaaccttgaggagaatatgaatatctttatgtttacttataatgttaccacaaaaagaaacaaatctcaaataacaatagctaatgttgtgggaaccaaagcttctaacataaaaaagatataaacgattactctatggatgaagttaaacatttcaaatggagttggtgaccttgaattgaagaaaatatctttatgttattgtaaccataattagaaaatctgtaagaacacccccaacaacaataacaacaacaattagcataagttattgacctttttgggagttttcatcttgagactgaggttgagaaagatgagtggtgtagcttttgattctcaaggagatgagaaggcttgagagaattcctagaagagggaaaacgtaagaccaaatggaactagctttgttggaggaggcaacggctgcaccggcgaggctgccaatggatgtgttctgcaa

SEQ ID NO: 68461 - DNA, 507 bp, Cannabis sativa
tacattaattaaaaattatttatgtacaattatgacattttaccaacgcacttagcgagatgctggtaaaagtaatttttgccagcgcattacacatttgcgctggcaaaagttacttttaccagcacacttttgtattggtaaaatgtataaaaggaattgtgtttagacggcttgctataccggcgcaaatatgggttactctggaaaaaaatacattttcccaacataaatgtgcgctagtaaagttatgacccttttacaaacgtagtttgtgagatgcgttgggaaacgtgagttttgccagcgcgattacactactacaaatatgagaatccgcgatgatcctaaaaataatttttttcggggaccgttgctaaaaaaattaagtaactatttaaaatcgtcgggaaaaattttgtaatcccgatggtttaaaatcgtagtaaacaaaataggcgatgtttttttaataaaatacgtttttttaataaaatgttatttttt

SEQ ID NO: 68462 - DNA, 1347 bp, Cannabis sativa
gtttgagaatgagagagaaaatgagaaatcccattttcgtactgtgagggtttttaagttcttaaagtcacttgttgagatcattacacatggcagttaaaatcaagagatgcttgatccaacggttactacaagttgagcttacacagacctcgtagggttcaatgacatgacatattaggaaggcaaaactataattacaactgtcattttaaaagcctaggtaagatacccaaacgtcacaggaacatgacaagttaactagcatgtccttcgagatagtttcatcgcgtgacacatgcaaatgccaacgtgaaactgggggcatgtatgttgtgataattttttccctagaaatatttaagtacaatctcatagaaagttgacacgtgaactcattccttgatggaaaaggatgattgtcgacaaatagcttcagtagagctaacctcgcatgatataaacttgcgagaatgtgcgaccgagacaaggtctaatcgcacaatatgcccagcatagttgataaaacagaagactgagagaagttagtactggtcacacgtatactgattatatccaatgagaaagtatatctctcttgcgacatgtaaagaccgcatctttacatatgtttagtccgaaactataatgtgttagacaactcattaggatctcacaagttttaagttgtcaacacatgaatgtccaaatacacgatcagggtaaatgcaagcagtcaattatctaactgcagttatggacctgaaggcccaatatgcgaataacaccaaggaacctgcgacctcatgttttcaaaatatggataatcaatgtgcgacttaacaagttgcgtacattcaagaaattaatcaagaacagtcaaaattgttctttcatttattctttaatattttttactattaatttgtataattaatgtaataacgatcctgtctgagtggttatgtaaatccaaatgaacacgtgctttctatataaaggagtgatctgaatcaaatagactaagctaaaatttttcctaaaagtagactaaacagatcaatttttgactgaatcactataatctcatcttatttataatttttgtttttgtcttttaattcgagtctatattttaagttttcatcattttaggtgaatactcacaattccgtacgtgtgtattaattgaatatactcacacgtttatggtactgtcaatttttctccaataacatatatatatatatttattcaattttctctcattaaaattttccaaatataaatatttaaaaatctatttaagattctcttttgagaaaaattgaaaaatttataacaaga

SEQ ID NO: 68463 - DNA, 627 bp, Cannabis sativa
ctaggtcttaattgggctacacacactataaatctagcaaccaagaattgagttggacattggagctcaccacttcccactctagccaagtttgaggttgatgaaaatgaagactcatatgccactttttatgggcgaaactagaactcttacaaaagttaagccaataaccctaaatcaagtgctttttgaaagacaatttaagtttctaaactttgtttttaattttattactctaattgctttcctttcaaccaaaaagaaaaaagaaacaaattgcattgaaaaaacaaagaaagcaaattgcagaaaaatgaaatgaaaaaagaaaaaagaaaaaaatagtcatgcttaatcttgttactttatttcttttctgttttttttctttttcgggtggatttcacattttgtgctatgtttctagtagttttgctggaatttcggtggagcaaaactgagcacataatgtcaaaggtcactagctgagcaaaatcacagcaaaattttcacataatgttgggatgggagatttacagaatacacctatatatatatattttaacaatttttattttttttaacatttttacagattctgtttttcacagatcttcatttgttttt

SEQ ID NO: 68464 - DNA, 2243 bp, Cannabis sativa
ctttgctgatgataccatactgtttgggcaagcctcactccgtgaagcaagccaattcatggatagtttgcaggaatactgtaagtactcgggtcaaagtgtcaatgtcgagaaatcctcggtgttcttttccaaaatggttccatcacgcacagcccaagcaatctctcaactgctgggaatgaaaagaatgtccaaaaaggcaaagtatttgggcatacctctgttcaggtccctcaagcgcaccgaggacacaaaatttcttgtggatagagtgttggctagggtgcaagggtggaaatcaaagcttctttcctatgcgggcaaggtgtgccttatcaagactgtgggttcttccttggctaattacgtagcatcctctgatgtcctcccatcttcaacgacacaccaaatcgataaacttctaagggacttttggtggggcgactcaccaaacaagagaaaactccacccgattgcctgggagactctctgccgtcctaaagtgaatgggggactaggattcaagtcaagtgaagccattaataaggctttcctaatgaagtgggcttggaaagttttaacagataaggaaagcctatggcaccatctcatggaggctaaatatctaaaaaaccgaaactttttggatgttgaaagtaccaatgctgactctactctatggaaagccatccttaaggttagagactttttgaaaaaagggttatgccgcagaattggtgatgggaactcgacctccatttggtttgacccttgggtaccggggggaaatctcaaaccaaatcccagattagatgcctcggctggattgagcatggtccataacttcatcacccaagatggttggaacgaatcgctcattcgaacgtggtttcttgaatcggatgcaaaacggattttaaacatctcgctcccaactacaccaagggaagatacctggttatggcttcccgagagcaacggtaatttttctgtcaaatcagcatataaggtgatcaagaatgtggatgtcagagccgatagtgacaacaagtggagggtcatttggggttcaaaaattcatgagagactcaaaatggtatggtggagaattatggccaattgcctactcaccaaggaaaagcttagtatcataatcccaatcacagatccaaggtgttatttatgccatatcgaggttgaatcctctctccatctgttctggcactgcgactttgcgagagcagtgtggttcggtagccggtggcagataagaacggattattcccacataaactgctgggaagggtggcttgactggttctctttggatactaatcgccccgtcgggcttcacttacaccctttccttggaggggctgccaccatattcgaaagcatatggcgcaaaagaaacaatctggctcatgggggaactcctactcctatgcatattatcatccaacatataaacacaaggatccttgaaatcatggaggatgtgcaatcacagcaagctggtttaattgagtggctaccgccaccccccggatggatgatatgtaatacggatgtttcaattgggaaccaccagtcggctggggctgcggttttcagaaacgaagatggaaaaattatcaactgcttcacttttcggctagttgtgagtgagcctctcatcggagaggtaatggttctttgtagaggagcggaagaagcgctgaagcttgggtattcaaagatgatctttcagaatgactcttccactgcaactgctgcactgaagtcgaatttgcaggaagttggatctcttcatcataatattcaggatcaggtggcggccttcagatgctccgtggatcagctcgagttttgggaagtctcctggattccgagaaactgcaatggtgtggcccattcggtggctaaatgggcgaatcagaacaatcgatttggttggattgatctgtcttctgagagtggcactctgccctctgcgctagcagggatggaatgtctttaattctctgttttgatataatttaggtactcttttattgtttagttagtagcttcttttctttgctgttaggacctttctgtttttttcgtttgttgtttgtgttctctttgttccctgctcccagggccattaatcaaaaaaaaaaagaaaaaaaaaaaaaaaaactccttttcatcatttaaatgaattttttttttctactttgctctcagaagtcaga

SEQ ID NO: 68465 - DNA, 1001 bp, Cannabis sativa
aatgtgtcatactttcgagttaatttatttgtgcttaagtgctgtgctttcgggtttgtcgtgtcgtatcgtgcttaagtctatattttttgtatcgtgtcatatctaagcttgtatttttttttctactgtgtcgtgcttaagcacatatttttttatgtcgtgttgtatcatgcttaagcatatatttttcgcgttggatcgtactcgtgcctctcggacttgtactagttttatgccgtatcaaaaagttcaattcatatttacaatctattctactatatattctactttctagtattattctcgttcaaatagtgtttgaaagatcaaagatatgtagtgattattatattatgagcatttttgttggatattagaagtgtcaagcattttttagaggtggtgtcttataattagttggtgatatttttttaaaaagtattacattaagttatatgggacctgatatttaattacactaataacaacaatatgacacctcgaaaaatcctaggcatcaatagcaccttttagtatttctctcatattatattctctttaaattatactatttatttggacgtgatgtagtaagaattatatataagtgtagtgccaattacaactttctatcaaaatcttttagtcattttttatgtctgaaatcacatgccgaaatatttattttttcataacgatattcgttatggttacgatataatctctttaaatttttaaaaaattccaaatagtttacaatactaaaaataaagtttctaatattctagtttaccacgcgtgttcaaaaaacttcaaacgtattttcggcaccgtatcgtaaattactcgaaattttttaaaaatttacaaagactgtattataaatataacgaacaccactataaaaaaaaatttaaaaatatattctaacatatttttctttaagtacgaaagttaactaagaagttataatgctaatcaaaatatactattacaaa

SEQ ID NO: 68466 - DNA, 1307 bp, Cannabis sativa
  modified_base (972)..(984): a, c, t, g, unknown or other
ggctaagtcagcctgtctagggcccacataaagacgaccttttcttttattttttttttaaaaaagagactattttctttatacccaaaaagcccttaaatagttttttttaacaaaagtataagtattacaaaaatactacaatatgtggccggcctgatcgaaaatcttcgtatgcatgcatgcatgatactaatgaaagtttgtgcaggaatttgatgctgtagttggtgatgtagcaatagtagcaaatcgatatgaatatgctgaattcacacttccatacacacaaagtggattggtgatgattgttcctgttcgatcaaaaacatcaaatagggcatggttatttctaaagccttttacaatgtcaatgtggcttcttatagtacttgtcaatatctacaatggttttgttgtatggctcattgaacgaaaccattgccctcaaatcaaaaactcttcaattcctgatcaaattggaaccctattttggttggccttctctactcttttctccttacatggtaagtaataatatatacatatatatatatatatgcttatatatgatggataatttatgtggaaatcataattcaaataacttgttttgggtacatcctataaaaagtaaaagattcatgcatggaagtttctgtacataaatcttgattttggtagcttaatatttgttttagaagtcgctcaaatttataatttttaaaaagtctacgaattattataaaagattaaaaaaaaagatcatgtggtacagatcacttcaccacccactacaaatgatagctactatatattagtgataattttttagtcataatatatataaaatttttgtgaataattgtgaataaatgtgaataaatgtaaaatgtaatttttaatttttagtcacaataaaaagttacttgtgactgtaacatagtgtttagatacaagttgtcactaatnnnnnnnnnnnnncaacaagtattgtgactaaaaacgtttagtgatcacaataaattgtaacttttttgactaatacttttagtcttagtcacaacatatataggaatgtgaatttataattagtcacaaattttttacttttaatcgcaagatttattgtgactaaaagtaagattttttgtagtgatcactcctttagtagcttcagggacggaggcagagatgggatttaaaggagccaaaaaaaaacaaaaaaaaaagtaaggggtataataaattatggaaaaaataaagaacatacaacaaaatctaaataatcaggggaggggggctta

SEQ ID NO: 68467 - DNA, 947 bp, Cannabis sativa
  modified_base (459)..(468): a, c, t, g, unknown or other
ttttcgaattcaagtgtgctggccgacctgaacggaaatgctcgcgctagatggatgccctaatcacattattgcaacacagatgagtgactcgctaaatcacttttcgggaactccaactagaaactaaaagtttccctaacgataaacaacatggcaataccctaaatatctcaaaattgggaaaaattagggttccaaaaatttccccaaccggcagaccggtcccaaccggaagtctatttctggaacaccaaccggtcgaccggttggtacaggtcccctagaaccggtcgaccggttctgtgctgggaacacaaaaaccaacccccttcactcaactcaatcccaaactttcctaaaacttccagggtacctatacaatgcataaacaaaatatttccaaccagaatttcacagaacaaaccatcaatactcaagttgccattaaagctcaannnnnnnnnntcaaaactcaagcttgcttaaaactatcaccaagcatcaaaatcaactaccaggacctctaatcaactaaaattgagcataaactgaaccctaaacatatgaaaacctaacagccactaaaacttaatttcacataatcacactaaagaaataaggttaaaacttgtaactaatggtctagggttttaccttttgttgattcctccctgaattctagctaaatcctagaaaaatgaaagggaaaaactgatccttgcccttgctttgtcccagccgaaagaaagagagagagagttcaagaaataactcaaatttccaatttccttcttttcttgatttttcttcaaatgagaaaaagaattgtaattaatcctttgctgaaagttagcttgatagatgtcacatactcatggcagccacctatcactcaactaaaccaaaagacaaaattgccctttaacccaatactaaggtttttc

SEQ ID NO: 68468 - DNA, 843 bp, Cannabis sativa
tgaatatatatatgcctaaaaggctgaagctccttaacctagtcgactcgaccgacccatactcgtaaaattcgaaaaaatgagttaaatttttatttgggcgagttcggtatatggttatgcaaaacccgaaactcaaatctaggcaaactcgaacgttgtacacccgtctgtaattaacattttcaacggaaatatcaatctttggcaacttgaagattttttaactaatgttaaggtttttagaaattatgtttttattgtatttttaagtttattttcagaactttaaattttttaaacagatttggggagctagacttgatttgtattccccttgtgttctgtaatgatcattcttggtctccttaatttgattccttcaatcaaattcaaagaaaatctatacaattatatatatttatatggttatttggtaaagaaaaaaataatttctttttttatgtagtgatctaaattaacgatgcatatatataatcatcagtagaatcttctcgaaccaggataattcattgtctactcgaaaggctttgccaaactatgagctgcaaagttcttatccgccacataggacaaaattgtccccagaaatttagacaataaaattataatattctcaataaatatgaaagatgacaaaaacaacatgtattaaaaaaagtaatctttgaactaaaaattaataagctaaaaagagatttaaacacacaacttaagtaaattcaaactcaacaaaattaaacaaaataaaattaaaatcccaaccaaaacttaagaaatttagctagaagtgttatcctttaactagaagcaacgttctaa

SEQ ID NO: 68469 - DNA, 736 bp, Cannabis sativa
taagttgaggaggggtgtacttttttttaagggatggagtgtaatattttttctaaataatataacatgttgaaaattaatacaaacttgtattgcattttatagtattaaatagtttaaagtacatctaaaaaaaaaatagtttaaagtaaaaaaaaaaaagtgacaataaaatattgagtaaggtattaaatacaaattttattggtaaagatttcaaaaaataactttgaatattaaaaagtagacatgtttttgttgagagttgaacccataactttcattatgtgtgcaaaataacaaccattataccaaagtttatattatactcataaatatcacttttaattattaatatatgttataaataatttaaaaaatatatacattttttcttgatttttttaggggcagtatgtgggtctaggcatatcaaaaagatccttttagttggatcaggttggagctccgattcgacagatcacttctgattcgaaacattcgtatacttattgaatttcagattagattcgcttcgccctatctgattttttttttggatcaaatccgtttcaatatattaaaaaaaacttagtacaagactcggacccagacctagacccggacccggacccccacctaagacccaaacccggacccaaaaccagaccaggattgggacttgggacccaaactcaaacccgaacccttatccaagatttagactcaggatcct

SEQ ID NO: 68470 - DNA, 713 bp, Cannabis sativa
tcggggtattatattcaatttggcgagtttcccttagaatatagggttttgtgggacctctagtttcaaaatgaataatttgagaaattaaattttgacaacccttgataatttatttgacatgtaaggcttactttgggaacagattctttctgcctatgctattgcactcttctaggaagaaatatgaaatgaaaaatgaagaaaaattaatgtaattggaactataggtttgtaaaggaacctaggtgacataattcaaaagttaaaattacttttaatggcttcaaaaactgtattgttcagttcaatggcatgtttgatgacttaatgccaatatcaattggaaaatgcattaacatatggtaattcctgacattggtgaatggaaagatcctgacgttggtaattcctgacattggtgcattaacatatagtattctttttagatctgtgtagagagtgaacacttctttagacatttttatcattttaggtgctgttttattagcccctaaggagaatttttatctgtatttttctttttgcttttcctttttgaactataattgctactgtcaccacggttttcttttgcgacaagtgagggtttctatacattatggggggaggtcagtcagaggcctctttctcttttcaaaaaaataaaaaataaaaataaataaaagaatggaaagaatctcttttactgt

SEQ ID NO: 68471 - DNA, 502 bp, Cannabis sativa
agcgcctctaggaggagtgggatttgttcgatcattagccatctttgctaattcaaaatcagcaattttggctacaaaaaagttatcatcttctcgctctttgaccaatagtatattgtcgggtttgagatcacaatgaacaatacctttcttatgaatgtactcgactcctttcaaaattgactttatgtgctgcttgatttctttggactcgttgtacgaaggtgaattattgataaaattatccaaggtcccaccagacgcatattccaagaagacattataaaatacaaatttattaccatcatcatcaaaatcgatagttgtatcgtctccataacattgaataatgtatggacaatcagtaaaaagatcgagaatcttcttctcattgagtaagtcatagttttcggaagcataagttgtttttacaaccataacagggtggtaaccattgattcgaggcccatgtgtgggccgtcgaatcattttagccatgtaa

SEQ ID NO: 68472 - DNA, 601 bp, Cannabis sativa
ggaatgtcaagtatgatgattttgagactgtgtaagtatacaactacacagttcatgaagatgacttaaatggattgatgtgtactatttatatcaacaatgtgcatcttattttttagtaatctatcacgaaaaaaactccacaatcaagtatgaataattttaagatggacaatctcttaaaaaattttcctaaaaaaaatgtgaatggagacaaagcacttatcgtttgtgccttttaatgaaatataaaagaagctaactaaaaattcttaatataaagaggatcgcagatgcctctaatattcttattaactagatgcttagaagacaaatataatggcccttcaatggaactatatatactaattatgttaataacactttgattattaaataatcgtgttaaggctcaatatgaccttattccttaatacatgtgactcgaaaaacatatgcacgtccgggacttctaattaaaacgacaattgtttttcacctaataatccttctttaagaggaaaatttaacaccgaatctgtatataaataatataatatgtatatatttgactagctagctagtgtgtcacaaacacata

SEQ ID NO: 68473 - DNA, 650 bp, Cannabis sativa
gctgtgataaagagaaatatacacttgtgagattacaaggttcccaagtattcttcttggcagtagataattattccacccgaggactaggcctgagatcacttggcccaagcgcagtaccttcaaagaaatgcccctcaggttatcggtgaaggagcatcccgaggtaatcaatgtggttggtctcctactatacttagggctgagcgtaatacattaatttttatacttggaattcccttctcgtggattgcattgctcataagtttgatagttggtatcctagattccacgtccagattaactgtcacgagtcatttttgggtatagccgagcaatacggtactatggaagatagggcaggtcacatagatgcgcactgggacttagaaccaatcgagccttttgatatattcaaaattacaggttgtagggattttagcaaatattatggtccttctactccttcatctagtgatagctcgccttctagttattttggtaaatcccttatgtggaaaaatatacttctcccctttttaatctgcctttataatgattgtaacgccttgtcttgttttgcagacatgggttatgaagacatcctggaccgtaaggggaagaaaaggacatccaaccctggagtccct

SEQ ID NO: 68474 - DNA, 592 bp, Cannabis sativa
agttgttgatttagtatatgaaattagtttggcttagaagagagggttgtatgagaaagtagtaaacttttattgatagtttagaactatttgactttttggtgttacactagctcctcaacccaagcttggtatctatagggaactaaggttgatactgcaactttctagatttttcttattttaaattacaattttactttctaagaaattctagaattttctaagtttcttaatttgcaaatatagtttctaggtaattctagttttctctaattttattaactttgtatggttaatactagaattaatttctaaataagaaagatgtaaaaatgtgtagcacttttcatcaaaatattatagcaaataataagaatccaaataaagtaataacaagctaaaataaataataactttaactattgcatcgaagcaaacttaataattaaaacacaatttcacaatataaataatgtaacataaattgctactaaacaaagccatgatgaactgccacaaaactcggcactatataagtccatgaactaacacatatcctataattgtcatgtgtatatatatgtttgaa

SEQ ID NO: 68475 - DNA, 1424 bp, Cannabis sativa
acaaatataaatataaacagagacatagaagaaaattaacagacagaggcgtacaccaagagagcttcttgtagggcaatctttgcattgaatacagttgacccacataatatcacttccagtatctacttgaacataatagtcctttggaggagttccaatcccaattttagcatagtaaagcctacaaaaaaagaaaaaaaaacaattttctaatttctactcagaactccgaatcaattcgaaaccaatcaatcattatgcacgctaacacacacatgcaacacaagcacacacggaaatagaaagagagggaaagagagaaacccgacagcatcgggacggccggagccgcccaagggaagatcaacgccggcgagaattcggagctggcggcgatcatcgtgtgctttgagagcagtgagagagggttcttggccggcgtacttgtacttgacgctgaaaacggcatggttaagagaagaagcggcggcggcgttggcggcagtggaaatgagaaggagaaagaaaatgaggggcgatgagggagagaaagtgaaagaggttgtgagagtaggcatgaccgtcgtggccctccttctcctccgggggatcgagttgagttgggagatgacttttggaggagagagggcaaaaggaaagacgacttatgctctgctaatgtgctctttgttatttcccaattcccagaccaatcacctcccaacacaactcctctatgtcaaatgtccctgcctaactttttttttttttaataaaaagattagagttattttgaaaaaattatacattattttttttgttttttttgaataatgattagcttcattaactcaaatcatccaaaactaaggatgcaattatagaagctaaggtatccccactgaaagtacggtcagcctcacaaagagaagatcgcgccaaagcatgcgcaacctcattagcagaccgcttaacaaaattaaaagaaacatcaacaaaaccagcaatcaaattcttacaatcataaagaatatggccataaggagaaaccatatgtttaaacttttgcaaatcattaataactcttatataatccgacccaatgaccaccttaggccatctattcgctttactccaagatagcgcctccttgatgccaatagcttcgaccacatgaggctgcaaagagccacttttggaaataactctcgctgccaacaccaaacaagcagtagtccgtgcagcaaaccccacaccataacgcccctgagtagtaaagagtgtgccatcaacattgactttaacataagggagatcaggagtagtccaatggtcaccactttggacattcaggccatcaacgagtgcagtagtaacactgtgttgttgatgttggaatttattttatcaggatcttagat

SEQ ID NO: 68476 - DNA, 1554 bp, Cannabis sativa
atgtactgatgcaccctctatttaagatatcttataaaattttgagaaatttggaataatttataatagggctgaacatcgggcgggtttaccgggtttcgggttgccaggtttcgggttcacgggtttcaaacagtctattttacacacgtataaaataaaatagtcacgcgtgcaacacattgcttgaacgcaattttcagtgtgttaaacttttccgaatttcttaaaattttacagaatgtcttaaataaccataatttacatgaccatgaaaaaaaaattgactaaaaaattatttcggatactaaaacagatagagatgtatcgatatacttcttttaagggggtacattatagaatttccctaaggtttttacccttcgtactgaaattgtcaatttttttacttttttttttaattgtgggacattttttttttcaaaaatactgtgtaaattttatactgcgtactgtgttaagttatgacagttattccacggttgtttttaattattccattaatgttttaattgttctatttattgttttacggttattttataaaaagacagtattttttgtaaaaaaaattgtgtaacagtaaaattataaacttttgcctaacatttaatattttttgtaaaaaaccccgttagaatatttataagtaatttttcataaaatttggtgggactactcaatgtatacgtgaaatatgtaacaataattttaaaacaataggatcattattaaattttgataattaactaaaaaatcaataaaaaaattaatacattaccaaactatatacttttcatttcttattatgttttatttcttataaaatactaattatgattactttatttaaaaaagtaacttaattataatttctaattgatttttactattaattattaaataaagttcttttgtaattgatacatttttttttccgcattcaaattattaatatatttacaataaaattccctaataattttaaaaatttagacatatgaccttaaaataaaaaaaaaaataaagacaatacaaaatttagatcaactacaagatctttatattacgactagtcataacatttttgtattacaacaaaccacaaaatataacatttttgtattacaacaaaccacaaaatatttgtattatgaccagccacaaaatctttgtattaccactagtcaaatgtacactaaaagctaatagaaaaattctattttaaaattggtttcgcatttttggaaataacaaaaaatttaataagaaaactctaatttataaaatattacttttaaaaaatatatatatattttcaatttatatgcttaaaaaaatagtgcgaatttcatgatctaatgaaataagagccttattactctttaaaaaggcttatttggtacatcgtgttatattgtatagtatagtattgtattggattatattatattgtattaatattatttaatacaataatatgtttagtattgacttgtatttatagtttgtgcaaaattatattatctttac

SEQ ID NO: 68477 - DNA, 3460 bp, Cannabis sativa
gtacaaaaatgtacacataaataacttatagttacaattaacccaatgataatttaaatttactactaatatattagtttaaaaatttttatcctaaaatttaaatttataaagttaaatacatgtgaaataacaattagaaggatttaccgcaaaaaaaaactctatttttttttaatgaaaaggttacctttattaaatttattgactgaaacttgcctattattatatttacttcaacaccaagaaagcgataggtgccatctgcgatgagcgattcgggaaggttcgagtgacacgtgtcaaaagttacggcatacgaaacgccacgcctaactggagggagccacgtcattgttgtcctcaatattttaatgtaaaataaagagataatgaaaatatcagaaatatctagagaaggctataaatatctatcagagttcactcgcgatatctggattctttcaaaagctataaactactttctctatatctctcttctaataaaccggaaaaaaaaggaaaaagaaaaacccaaaaaccaaaacgacactaacaaaatccagaaaagaaaaaaactcacaaaatcgaaagccaaggaataagcggctctagtttgaatcgcataagggtttttttctctcgcatgtcgtctgagaagatacagaggttagtttgatcctttccttttaatatagttttcttttaggatttagggttcttcggttttgtatttcatgaatttgtgatttgcgctctgaaagatctgatcttttttttttttctttttgtttttataaatgctattgatgaagactgtaggtagaatagaggaaactaattcattttctttttcttttttattttgccttattaaaattatataaattgtttttgtcgtgcttttctggtttttttaaaattcttttgcttagtttgcaagtaaatctcagttataatctagtcagggtttcacccagtttcagtatttattattccctttaagaatccttggactccaaggaaagtttggtcataagagttttcttttgtatatgtattttcttaattgatagggtagcttataaattgtatgggtatttgcttggattgcaatgagtgtattttggccaataataaaacattggttcattattttactgcagattctgaaagtcgagagtttattatatatttaagcctgattgttattgagattggaagaacaccatttttctttgccgtatttgttcattgttgattgagaggtggttgctgtgaaaattactctgaaaatttcattttaagacattttgcaagaaatgggtgtttatgatcaaggttttaatatgaaatctcttcccttaaattctcccaggaagagaaagacgcggagtagacgtgaaggtaattcagttgcggatactctagcgaagtggaaggaatacaacagtagtattgaatctacaaatgatgatggtaagccaactcgcagaattccagccaagggttctaagaaaggatgtatgaaaggtaaagggggtcctgataattcaagatgtaactacagaggtgttaggcagagaacttggggcaagtgggttgccgaaattcgggagcctaataggggaaataggctctggttaggtacttttccaactgcattagaagctgctcttgcctatgatgaagctgccagggcaatgtatggcccctgtgctcgccttaatcttcccaatataacggactacaaatcatgcaagacgtcttctaaagtttcttcttcattggctactccatcaggttcttcttcagtgaccactccagcaggctcggaatctactacaacatcgaattcgatcctgtctgaggtctgtgcggatgaggaatctaaggtaaagagcattgcttctggtgggaagaatgaagttattcagtcgagagtaaatcctcagcctcttcttgtggctgaagtagctacacctttaagtgcggtgaagtcagaagtgaagctagaagaagcgagcccgaagcctgttaaacaagaggctaaagaggacaccatggaagctgagtatcaaacttgggacaagttaggtgacacggaggagaatttactgcagagcttctcaatggatgagatgtttgacgttgaagaactattgggaatcatggacggtaatgcaggctcagtggaagatatttgctgtaatgctcttcaatgggacaatgaagatattcagaccaacgaaccatctaatttatcttatcagttggagaaccctgatgccaagctactaggtagtttgcgtcatatggagcacccttcatcagggctcgattacagctttgatttcttgaagccaggaaggatcgaggataataatatttgcttggacgatcaggcctacacttgggattatccaattacgagttttgagatggaggggatgtctggctgaaggaggaatggtgcatcctcaagatggactctgcgacattagattagcgatcacaggtcacaagaaggccagaacaatgagtttctacagttgcatttagaatccgacaggctcttggacttggatacaggcagcttgatgatagtttggccaagcaaactttgtagattgctatacgaactaggaaaaatatacataatatactatttttctttttcccattttcctgggactgacttgttcgtttccctttgggactaacccgttaatggcctgattctctatagcttttagattgggggattcggctaatattacataatgtttctttgattcgtttttcaccttacttttgtgtccgtttcctggtcgttaccgggagatgggcagagggtctacatatacacgtttcccccgtctcttttcatacgataaaatttctttgatcagttttcacgttaactgatattctttgttgtagatataagatgtactagattataatgactttgttcatcatatttgtgtgtagaaaacaaatcctggaaagccattattcaaaatatatattgaaggtttcaaataaaatctataatatttgtgtacattgtgtgtctttgttactttgctgcaaatcatgagtttttcttgtttgaatatagaatctgggacttattgtctgatatcgtggtcaccactgttgacacttcagctgggaaattagaaaaacgtcattgttacctttcattaaaacatgaatgtgttgtggtgatagttattagcttacagtgcgttattaaggatgcaaacagatcccggcaaaactacaaatttctttgtgtgtcttgttcagatgtttactaattagtgtgtagtttttggtttcaagtactgcagtgttcctcagtatttctcacatttgggatagtatcttattaatgctccatcattaataagtctttcaaagaacaacgataatcagtgacggactcagaatt

SEQ ID NO: 68478 - DNA, 824 bp, Cannabis sativa
ttcactttttcctttttctcaataatacttatgccttacattgtatatgagagttttatatttgggttgtatttatttatatattgtgtacttaatatatatatatatatatatgtatatgatctgagataaaaaaaaaatcatagaaatataactacctcaacataaatgtccaaaaaataatatcagtgtttttttttcaatgaattaatgttattttttgaaaaaatattaataatttaacataaaaaaaaaaaaaagtaaccgatcaaaaataaccaatccaatccacactattgtgaattggattggattggattttaactgttatgtggattggatcggattcaaaatatgaaatccgcacttagtgcagattgaatgttgtttgaccaaaatagtgcagattagatcggatgaacagccctaagaccaattatggttaaaaagttaaagggtaaacatctagagttaaaaaaaaatagtgagaagattgctaaggatgttatagaaagtgttaacactaattttttaaaagagataaaagattctataagagtaatttcaaacaagcaaaagacaattattaactctagagatgtcaataaaattattggggagaagcttgtagagtttgagaaatcaataaaatcttacattaactttaagattgatgatggattcaaggtttacttaaatattaaatttgaagtttcaatcgtgaaaatagtatatcacgttataaagataataacgtgtcacgacatattcttccatcccatttatactcgttatttttgtaaattatttactaatatagtata

SEQ ID NO: 68479 - DNA, 671 bp, Cannabis sativa
taataatattataaaattaatatagaatattctattaagtaatattatattttgttaaagttaacataagaaatcaaaaaatacagttaaattaaaaattctattacatatccacattttatatagtatagatatatattgaaaaaaaaaatagttaaggataaccaattcttatactattttttaaaaaaaaaattatattttttacaaatttatactttaacacctagaaaaataaaacacaaatagtggtcatatagtgttttgtttgccaccaaattttctaaatgagaacactatgtctaaacacaatctaataaaaaaactattttacaatttcgccaaacaccctgaataacttgtgagagagcttttaattttggttctttcacatgaattcgcataccaccaaaaaaaaaaatagttttctctaaattttcttaatcatgtgcaaatgtccaaccatatatacatgaattaggagaattatcccatatattgtttttttttaattttttttcttcaaatttacggtttgagtttctaaagtggttgcaccgctagttgtaatacgcgtttctatacgaattttgttgcaatttaggttgcagcgctatttataacaaaagtttctatgtagaattctattaaaatactaaaaaaaaaaaaaa

SEQ ID NO: 68480 - DNA, 1974 bp, Cannabis sativa
  modified_base (1469)..(1471): a, c, t, g, unknown or other
aatgatgaaaagacaaataaatatgataaatattaattttttaataacattctcattatgtttcttatcttcctccaaaatcctgatttggttacgcaatccaggtgtagcatctgtggattttttaacttgagatttatcgatccaacaaaagtaatcacatcctcggctttcatcattctcttgaattgaaaataacctacttagcttattgtggaagcctaatttacgtaaatatataaaaagtacatttgaatctaagaagtcaaaactcttacatagtgtggacatccaaaattgacgaccaagatttgctctactactagtagtccaaacataagctagatcactacgatagcaatgggggtgtccctgaagtgaatttttccatcacagaccatcctccttgaacccgtatgagtcttttccaccaccagccactatgtgcaatatcaattatgtactataatttgtgaggtttaaaaaatggtttttgagttattctaaaaatggtggagatagtgtgtattattgattttgcaacaaggaaagtggggactagcttatatataggctatgaattagtggggggaaattaatttttttttttgaagacttttgactttgaaatttaagttgataaatctttttgccaaaagaatgcgtatttcatagccttatgttctatgcctataaacttatagtacgtgcgatataatggggcatggctgatggcttgcttgggaagtgtatattgtcatatcaaaagtagtcttttattttaaaataatattttagtgtgatatcattttaaaagtacaataaataaatagggttcgcccaaagatacactgggtccatctaaaaatttaatattttaatgtgaatttccataatcacgttttattgttaggtagtaataaatgttttgtaattaaatttatataatggtacacgtgtcaaccaagaaacaaacttacaggacaaatattttcattagtgacacaaatgaagtgatatttagagtcttagtactccttctcgtatcgaaatcactaatcgatagtggtgcagatatacaaactcgaaagtgagataatcactacagtgtagctagttgttccagaaacatagtcgctaatatagtgatatttagtaggggtgttcgcggtgcgggtggtgcggtttttgatcattttttcaaaccaacccgcacatgctgtttttctaatttcccaaaccacactcgcaccacgaagctaaaaacccgcagataccgcaccgtaaaaaatagtgcagtgcagtgtagtttttgcagtttctggagtttggactatcactaaataattaaactatcacaaatacaacaaaccttgagcaaaacttgtcaaaataccataaggcttgaaataaatataagaataaaattaagtgtcaacaatacaataattagtggactttgagttgannnttcacatattggacttaaataaatataaaaattagtatttttataatgtgtggtgcagtgcagtttgaaccacatattattaattcaaaatcgcaaaccaaaccgcactgcgcagtttagaaaaaattcaaaccacaaccgaaccgcaaagaatttcaaatcacatttttttgcagcgtggtgcgatgcgggcggtttgagcggtttgatgaacaaccctaatatttagagtcgcattactccttctcatattaaaatcacgatatcgcattagtggtgcaaatatacacactcgatagtgacacaatcactatagtgtagttagtggtttcgggaaacatagtctgtaatctagtgatatttagagtctcagtactcctttctcatatcgaaatcactaatgggatagtggtgcagatatacaaactcgaaagtgacacaatcactacagtgtagttagtggctccggaaaacatagttgcctaatctagtgatatttaaag

SEQ ID NO: 68481 - DNA, 809 bp, Cannabis sativa
  modified_base (35)..(40): a, c, t, g, unknown or other
  modified_base (227)..(236): a, c, t, g, unknown or other
ggtaaaggttcaaaccccactaactacactttatnnnnnntttttaaatttatttacgccccccctcactttaaattttgggtccgccactgatgtacgtagaatgcaaagtatgaggttttcatcgccacataatcctcattttaattttaacgatgtacaaaaacatacagaagaaataaaaaaaggaacactaaaagaactaaggggagcagtgaataaaatgnnnnnnnnnntctttaagggtaaaaaaaaaagtaagaggaaacaacatttttagaagcctggtccaaatccagaagcggtggatgagtccacgagtgacggttatcactcgtattattattctaatgatcttatatatgatgtagcaatatatgaagaaaataattatcataattttgaatttactcctaaggaatttttattccttgttggtgatctagacaaccaaaatggtgatctagataaccaagatgaaagaaaatcattttggtactgaacgtgtaattaaaattttgttataatatacaatatttttcaagtgttcttttaaatttttttaatagtcttagctttttttgttgtgtaattttgttcaaaatagtaggggtgtacaacaaaccgctcaaaccgcccgcaccgcaataaatgcggtttgaaattcttcgcggtgcagttgcagtttgaatttttcccaaaccgcgcggtgcggtgcggtttgaggttttgaattattaaaccgcgattcaaaccgcactgcactacatgttttaaaatttctgttttaaaatttcaatttttatatt

SEQ ID NO: 68482 - DNA, 868 bp, Cannabis sativa
  modified_base (418)..(436): a, c, t, g, unknown or other
agtttgtatccatttattaattaatattatctgcattactcatttcacaataaaattaaataaaatataataagaaaactatgttactgtaaaatttatttttcgatgaatattcactacaagaaatgtcacttttgccagtacatttttgtgatgacaaaagttggtattacgctagtaaaatagaatttacctatgatgtgttggcaaaaggaagttggcaaatcaatgttggtattagaacttttgccaacataaaatgaaaaacgctggcaaaaaagacttttcccagcgcgtaaatgtactggtaaaagttagattttaaccactgcaaatgtacgctggtaaaactttgatctatttgtcagcacaatttgcgaaatgcgctggtaaaaattacttttaccagcgcagtagnnnnnnnnnnnnnnnnnnntgacatttcttgtagtgattattaatgagtcgtacatatactataaatgagataatttagtagcataaaaaatttagaggcaaaaatattaattattctaataataataataactctttgaaattgatttatggtggatcatgtataaaataaaaggagtgttatataactttttaatttattacaatcttttaattaattttcatgtttaaaaatagatattggaatatttattttcaattttttatggtatattccttatagttatactacatatcatttctttaaacttttaaatatttttaatagtttacaatgctaaaaataaaattgaaactttttacatatacgtcgtaaattggaatatcaggaactctattaattttagtactataaaattaactaaaaaatattgtaacttataatgaatac

SEQ ID NO: 68483 - DNA, 726 bp, Cannabis sativa
ctaaataaatataaaaattggtatttttataatgtgtggtgcgatgcggtttaaaccgcatattaacaattcaaaaccgcaaactgcactgcaccgcgcgttttaccgtaaaaaaattcaaatcgcatttttttttgcggtgcggtgtggtgcgaataatttgagcggttcggtgaacacctctacccaaaattaaagttgagagggcaaacttttttttattttgtgagaggggacaaaaagtaatctaaatattaaaaataaagatatttttagtaagactagaacccttaacgtttataatataggtaagataactcaactatcatgctaaaactaatttatatttattttcatcacctttaattacaaatatatgttataactaatcaaaataatatatatttgtttcccaatttatttttgcctctatttgagttcgtccataccttccattatctatggtcaagaaagaaaggactccaagcaccactaaccaccacaaccaccacaaaggagaggcaaagtaacccaaaaacatcgtcacccatagtagcggctagcagaggcaccaccaaccccacttccaagcaacctaccaaaaaaatcgtcccctcacccttgcgcctagggctgaacatcgggcgggtataccgggttttgtgttggcgggtttcaggttcaaaaaattgaaaccgaacccggacccgaatagggcacgggttg

SEQ ID NO: 68484 - DNA, 1167 bp, Cannabis sativa
gggggcaaaaatcataattaacctatcttttatcttttcctttgaaaacttaaaattttcatgtatttctcatggcattaggattaattagaatcctactcctctttggatatgacattcgaattatagaagaaaaaaaaaagaataagagaaaagatttttgatctttttcttttttaactttaaattcaccttaatcttattggcattaggaattgtttaattttttaaatttagaattattattctcataggaattttgaaattcattaagaaaaatgaagaagcaatgattattgattttttcttattatttatcttttccttttaagcttaaattttaaaagactcccaattgccttagaattaagggatttagctccactataaataagagagctttcaatcaaaattttctcacattccacattgcttcccactcccaagcctttttgagagtctttgatttttatcttcatcaattcttcaagttttgtttatccgctcaagtagaaaacttctattttttttaacatcatcaatttttttggaaattttttccttcttcttcctttgttgagcttgttccaaggattctagaactctcttgaaataattgaattccatattgaagactttcaaaagttcaaaacacttgaatctatcttttgaagaccaagaataacttttcttcagttgtaagtaatcaaaattttgaagtcaccatccctcgaatgaagaaaaattgaagaatgcttgatgaatctgatccacatgtgtctcagttcattagattcaagcttattatgccaaaatctagaaacttagacaaggcacgtggtggaaaagtgagtgcagctgagcttcttaaagctcccattgaaagtgattacccaagagattgggcttttaagttgagacattttgtattcaataccatccctgaacatcaagttcaattgattagagataattatcttcttcctgaaatagtcattcggaaaccacgatctggatgtcccaatagtttctagaatccttattgtagtgctttgttgaagttcgatatgaatgtgggtgcttacttacctttacacctaaagtttatattaatagtagatttctttggacttagtccctaccaaataaattcaaatagttacagaa

SEQ ID NO: 68485 - DNA, 1260 bp, Cannabis sativa
tggttcttctttgttctttaatggctcgccatcgaatcgttgttagtggttgaaaataataagttctttgcgactaaagggtttgttagtaatgtagttaggtaacttacacaatagttgagagcttaaactccggggttgaatgaacctgttgtaacagtttctactattgtatcttttgattttattttaatttttttatcaaacgatctaaaaattagacgggtgattatttgattcgtttttttaattttaatcatgatcatgtcttaaatgagagagatgtccccattagagattgcacgttattattatagttaatttttattaataaatttattttacaaattgtagagagtatttatttaagtcaacaaattttttatttttctaatttttaattaaaattttaaaatattgagcgcctaatatttatataatcacaaaacttatattattgagcgcgtaatatttggattttagtgcctaaataatgttttgtacatattattttatttatttatgaaaaagggaagaaaaaaaattaaatcaagaatgctatcactttgtcttgtcattttgtatgatatttcccttagttttggagtcatttagttgttgtggctcattgtatgtgggcaaaatctgtgtctcttcttgctaagattaatgtattgttaggtttatttggttttggtcagtcattgtaattagttgcaattaggagtgataaatcgtgttgtgttattgtgttttgtttgatatttgttttcgtattagtcgtattaatctatttttaactcgattttaattaacaaaaatttatgttgtattcgagtcgtgatattatatttgttgatcgagattttcggcaaccaattaaataatgtataaaaaaaactgtaaagagtttaatgcatgagatttttacgtagttgaggcattaatgagccttagtccatgagtctttttttattaatgagagtatttattgagaatgttcttggtagatttttctccgattttctctctttgatttcttaaaaccaaaaacttttcgaccccttttcagtttgtttgtagggtatttatagtgtttatgggtgatccctaggaatgaatcacttgtctttctgtgttagcttcgtagaggcgcatattcccaacagatacacaataggatgtacatgacctataccgtaggtatcttaggggttaggtggatataatcttttatcccattttgactgatgtgatccc

SEQ ID NO: 68486 - DNA, 738 bp, Cannabis sativa
  modified_base (697)..(705): a, c, t, g, unknown or other
ttttttaatttacggtttgagtttctaaagcggttgcagtgctagttgcaataatgatttctgtacgattttttgttacaatttaggttgcaacgctagttgcaataggagtttttatgtaaatataagaaaatttgagtttctatgcttaaatcatgagataatatataatccccttaaaatacataaaatatttaaaaaaaaattacggtgaagttcttcaaaaaattaattttgatgcagataagtttcaacctcgataaatagctgcaatagtcacaagctcaatattatggtaagtctgttagtcctctttttaactgatccgttaatttctctctaaaatattatgtgttaatattaaagtgcggtaagtccccaaaaaatttattttaatgcaaataagtccccaaaaagtttactttgatgcaaataagtgctaatctcgaaaaattgtagttatattccttaagctcgacattctcgttagtccgtaggtgcccaatttaatagctctatttgtaattcttaaaatttccacgagtcgaaagtttattggttcacaatataaaaattatttattaaataataaaaatattattaaaaaaaaaaaaattgattttttttttcattttttatgggatattggcgacaaaaccactcaagctttatattttttgttatattattttatatnnnnnnnnntttagattaaataattaagtgtgacaaagtatt

SEQ ID NO: 68487 - DNA, 1405 bp, Cannabis sativa
  modified_base (37)..(51): a, c, t, g, unknown or other
gctcttccgatctttaaacaacatacttgtgagtagnnnnnnnnnnnnnnnaaaataatttccaacaccaagtccttagaaacaaggcccagcgcctaagtagacatggtgatgggcctagcgctcaggctgacaataaaccttggatgctaccttcaatttctcaaatgcaaaatctgattcaaccattgaattcagaatggtcagaaatggtggaggattcccttccctcaagttgagaagcctatgaattattaaaaatagaaccctaggagctcagtttaaggggcacaacatccaggtcaacaaatggccttgtttgttggattctgtttatccgaatcagatgtcgttttgatcgtccatctagttttcgacaaattcaatgatctatgaaattagaacattcaaattcacaacttcaatttttttggcaaaatgacttactcagaaatatgaagtttcgagtcttccgtttcaacgaaaaagtaatatctccgagaactaatgacaatcttcgccaaaacatataaatggactaagttgtgtcaaactatcacttgtgcatcttataggacaccccttggatgttttaatacttttacaatgtgcaagttaatgtcagatgtcaacctgtgcactgggatgtcaacgagggcgctggatgtcaacctaggcactgggacatgaactgtcttcaggaaaatagccataactcacttaattgtcatatgattgattcaattcaatatgagttttgaagacatttaaatgcgctatcaagttgagtctcacaccctgtcgtaattctgaagctattgtcatgtaaattcatccccaagggaattacaaaaattagctctaagtaacttgcaacgggacccatcgggaaccaaaaattagctatcaccaccagaagctaatttttaccattagatcatcatcaatttaggaaaacaacttattgtaatttttcttatatttttgtgggtctccttaacctataaaaagagagctcctttagctcatttttcacatttagaaaactgtccacaaggttagagcttctctctctagactttctctctgtataatttggccatttctgacacttagtttaatgttgcaattacaatctcatgagaaataaaaactcaaagttgacgtagccccattactattgacggtgagaactcgtcaactaacttgtgaccgaaaaacaacattccgcttcaagttctgaaatgagatgaaaatgatgatgaaatataatctcaaattgctatcttgaaatggagagaataatggagaaatttctattactttcaatatcgttttacaagtatgattttctaaccccttatcacattacagacaagggtattttataggctctaatgtcctg

SEQ ID NO: 68488 - DNA, 569 bp, Cannabis sativa
aacatgggctactccactcatagccaattagttttgagatggaacccatgattctcaacagagagtgaagttctttgataagaactttggggtgtacttggggtttggggaagtgaattgagattgttcctcctatgagtgagttatgtgagattcgagtgttctgtgccattgatgatcacacaagttctgattgttcatagtggatttcaatatgatgatgctcagttggaatatggccagggattgaattgatcctaaggactggaacaggaaaaaattcttgcgttgttcttttgtaaatttctgttcttaatttcttgctgattcaaattagtttaaactttattacttttgtttttgatttatttgttagatgaatcagtttcaagtagaattatcattcgatcaaaatcaaaatggtatacttacaatttcaaaagaacccaaatcgataacaattgaaggtcccgagttgtttgagccaattttgcaagagaaaatctataatctatttcattaaattcactcaccgaaacgatatcgagcggcttcggcgcgtctctgtc

SEQ ID NO: 68489 - DNA, 517 bp, Cannabis sativa
catgtatcttgtggcaattatattcccaattggtgtggtaatgaccagggggtcgttgtgtgggaaactgtcttgggtaggatcttctttttgagaaagagattgtgggctctccaagcattggtttcttagagcatcattctttgcctaccaggaagtcacttttgggctcgtgatggagtgtccgagtatagcactttttggatttgttggtctcgcttgcaatatggggtccgtcaataatgacccctaagtgacccaccactggaggtggcatagggtctccattttaggcaccttgtgcctaagtctggtaattttacacccaatgacgtagatcgggattattcttcctaataaggaatttgatctccctcttcacatttttacactcaattggtgtcatggcagaagtcgttatgaaaccgacataactttaacatgtccctcttgctcaactctcttttgatgggagggggcttcttttatgggatagtttcttgagtggccatgaaga

SEQ ID NO: 68490 - DNA, 677 bp, Cannabis sativa
ccagaatatttgtctccaaagtcatagggttaatactcccgacagtgtttgtgagtcgagcccattttgcaacgttgtgggcaataaaattgcaggctcttggagtgtggatgagatcccagctcctaagattactgcaataattggtgaatcgatcctttgctgtctccagtttgaagtgagacgctgctgctgcccgaggttgcatcacattggtgacagtcaaattatcacattgaaaaaatgcctgctcataccccaaagagttcacaagctcagccgccatgcaaagggccaaggcttcaccaatatccgggtctgtaaccacacttttaccagttttaatggcacacacttcccccttatcattccggatcactgctgccaagaaggaactgtccttagagatcgctacatccgagttgctgcagacccatccaactgggggcggcttccaagcagtcagctccctcaaaccatttgtggttaccatctcatgatccaccacttttctgcggatctgctcattgagttgaactaatggtgttgtagaagtgccatatatctttttattcctttccttccaaatcgtttccagaatacaaagagttgttgtcatgaattcgtcaaaggatacatcatgtggtcgattcccatccatgagaaaccagagttcc

SEQ ID NO: 68491 - DNA, 507 bp, Cannabis sativa
aatccttaccgtacgatggtgcctaatcgacactgcctcgtatcttaaatagtctataaaagccaacactttctccaactgggtaattttcaccaccctttactttctagattatcaaacccattcgataaaatttcagacgcctctaactttcttctgctctttctctgctgctgtcaggcaaagtattaccaccaggcctcgtcggcctctgccttgccgtctttatgtaagttttttgttcatacatttcttttacctattagggcaagtagtgatgataaaatgtgttttcatttgacttacttggtttcctcgaaacggcagtgacgcccccttcgtcaggcgtccgatgacctatgccctttatacattttattttatttactattttcattgtgtatgcgttgtttctctcttttcttagaaaaaggttgaaaatgagggtttttcgtgtgcccttttcaggttgttcgaagtgattttcgtactcccacatttcctttc

SEQ ID NO: 68492 - DNA, 759 bp, Cannabis sativa
tgaaattactatcttaccccttccacacacacaaactaaaaataaaacttgagggcactatggtcatttcaacttaacattcgtacttcccaacattttaacctaatccggtattattccaattcaattcatcttttattgtcgtgacatttctgaccttcctgtcaagttccacagtttcctggtctaaaaatattttacttcagaaatagtatccacgatacccacatattccaatatagtctccgtaattaataaattacgctttattaaccactattaaatttttcactaattatcacacaataagcccaagtaagatcataatcttaccccaacatcaatacaatcacatatttaataaaatatgcccaattaattatcagaataatttttttgggatattacattcagcgtgcatcgtgtctgaacgtgcatcatcaacgagcttcaaacatgatttgtctgagctctgcgcacggacaaggtttgtccgagtacctggtgcgtgtgagcaccatctcgacacaccttggacccgaatttttcaaacctccctaactttctcattttttatcagaattaagttccgtaaaaacaaaagatgcttaatttatcacaaggaatccaaataaaataattttagaatgaaaataaaactatttttatggaaattttttgtaattcacatacattcatcaaataacacatagatcaacatgaatgcatccaaatcaacacaattaacatattcatcgt

SEQ ID NO: 68493 - DNA, 523 bp, Cannabis sativa
tcctgaagtgagtgatcaactgtcgggggcaaacaatgagctgtctttggaactggtcttaaaaggagtcttgaaggaggctacacaggtaaatatttccttctttgttttattctatttttgtagctcgaattttaacatttttccgtaaagatcaatttgaagatgacctacgtctattcccgagccaagtctaatgctatcaagaaccttgccaccaccaacacaatgtagagggaggttgatgtagctacaaaggaggttcaagacgtgaggaagaagctgagggaggtgaacaagtggagatggagatgggtctgattggttttttttattttgttttttgtttttttttttgtttttttttttataaaaaaaatatatccaagtgttatttctacaaatctcaattgtatttctatttctttatccttttatttttgagtcaggtagatagagatgaaaagaatcaggaattatgttggaaataactttttcatgtttttgtttaaaaatatattac

SEQ ID NO: 68494 - DNA, 587 bp, Cannabis sativa
aaattaaggtcaacaaaacacctcaaagaaataaagtcttcggccaatgattcttgattggaaatgaccaactccaacatagatttcagcaattcaatgtcttctgaattagactttttagaagatgaaccactcccgaatatttgcttagatgtaccgtgatcatcaatagattcatctaaaaataaacctttcaattgcaacttctgcctctcctcattagtaggacgaatgtttttaaacttcaactgaaaaacataatcaaaataacaaaacatgaagaaaaaaacaattaaaaatacaaatgttaattaatcagcacaaaacaataataaaacagtaaagaaaccgaaaatcaccttattcaacggcaaatcaaaaatcttgcccttcaagtctctaaaagttggatttttggtcacaacattattggtccaattcagaattcttgtcatcctggatgaaactcttttgcaaaatgtgtttaccatcgcatgacaacattcataaaaccaaacaatagacactcaaggacaacccaacgctctataccaaccatcatactgacctcccttctcctctttttt

SEQ ID NO: 68495 - DNA, 515 bp, Cannabis sativa
tttgaatagtttacagtgccgaaaatacgtttgaagttttttgagcgcgcgcagtaaactgaaatatcagaaattctgttttcaatactgtaaactatttggaatttttcaaaaatttacaggaatgatactcgaataccgttataaaaaaaatacatgtgattttggacgtggaggttgaataagagattgtaataggaggttataattaaccctcctatatatatacatatcaacaaatggaatattttaaataacttaaaacactaattacactataaaacattattaaaaaaacgttaggaaaattatatttaaaaatatagtaaatagaggttaatgaatgaatgagaaattgtgaaaacaagtgaattaatgtgaaaaaatctcacaagatttgtgaaattaatcataatatttaccattaatttttgaaaattaattggaatatttactattattttggacagagtaaattgcggcataaataattcagattttatacatttaaatac

SEQ ID NO: 68496 - DNA, 886 bp, Cannabis sativa
ttccttgatgatctcgtttgcttttgtgggaagaacacattgaggagaggcattgaatagcctcttctatacaattttccctctactatcgtgtagcgaggcactgaatacaggacttttcatgccttgttcttgtcagttgaaagttgtccgttgagtagatagttggttatgggagtcatccatgtgggcgagctatctatcatctcgacattttccttttcacatatacttggctcatttagcattttcaccggaaccaagtttagttcatccgaaacattttgcgaggccagtttttctaaggcatcgacgttagagttttatgctcttgggatttgctcgatttttaaaataatcaaacttttccaagttttttcgaactgtctctagatacttggccattttcaagcccttagcctggtattccctgagaacctgatttactatcaattgtgaatcactgtgacatatgagttttttaagtttcaatgcttcagctatcctaaaacgagcgatcaaggcttcatactcatcctccttatttgatgcgtcggattaaaatctcaaggcataatgaagcttaaagccttctggaaaaattaatatcacccctgcacttgagccctgctcattcgatgcaccatccacgaataatttccaagtatccgcttcttgctgaacaagcgaattttttttctggagttattccttctatcaagaaatctaccaaggcttggcccaattcaattgaccattttattaatcttccagaagaccctggttttgataaaacttgtctcaggggttcattagttaacaccttaatcggatgtgtctcgaagtaaggttgtagctttccagatgcgtggattaggcataaggc

SEQ ID NO: 68497 - DNA, 1767 bp, Cannabis sativa
tgggactacacagttgaagagagcttaactggattgattggtactatcaacaaggagcgtcttgttttctggtagcccatcacgaaagaactctacagttaagcgtgcttgacttggagtaatttcaagatgggtgacctctacagtattgacctggggtaatttcaggatggatgacctcctgggaagttttctcaggaagtgtgcgagtgaggacaaagcacacactggaaacactcgtattggtttgtagggtcagtcatcagtccatgaagcaaccagagtgatgtactcgtgtataagaactattattccgtgggtgtaagtgcccaataaaaatttgaaacggggacgttacagtatcacctgtccaaattttaaaatactccatatattactcagataaacgccacgtcactctgtgtggaatttgagataacaatatgctttaaataattgactccttttttatgggaattaatcaagctacctaaagttatataaaataatctaattagctgtcaaagagtatgaaaaatgtctcttcaataaagcatatatatttatatagttcaattaattaaatgaaacaaggtgtataatcatgcagtggatgtttgttttcatatgtaggattttgcagcaatttgtagagatggaaataatgctatatccaacatgtgaggagaagggacaaagatgttttgtactattttaatatatatgacttattattctatatagctatgctttatatcagagatatatatttgtctgactaatatttaataatttattttcaaatgttttttttggttttggtttttacgtaccatatggagaagtgatttttgtgtgtttatttttttaataaaaaatgtagcccgtgaactcttttaacttggctaatatatgtcatatataaagtctcacatcacaacagagacacatccaacttatatatatacataatatacatatatatatatatatattatcacttgttgtctttctctccttttgaccctacaataactcattataattgatcccattatatatattgtactattttattaattaagactttaattacttgttatatatatatatataatttaccttacattttcataagcaattcaaagccatttgtattaggcaaggtagctggttttgatgccaaccgagtagtttggaatagttagcaatttttcgtattatttattaaaataatttagaagtttttctatttttacactttaaaatagttcttattttttttttttgtacttttacagaattctatatagaaactcttattgcaactaacgttgcaacctaaattgcaacaaaaaatcgtatagaaacccctatcgcaaccagcactacaaccaataatttagaaacacaaactgtaaatttgaaaaaaaaaaaaaatttaaaaaatagtatatagaataataatttataggatccaatattaaaattcaacaataataattgttatggtagtttgataccttaaaatgtcctgctaataattaactttcaaaataaaagagaatatagtataaatttataggaatagtgaacgtatagcaattattaactcccctcccatacttatatgacaaaattaattagattgaaaaatatatgtacataatacgtacttacatgcatgtaccctttggtcatgattgtatatatatatcatgcaatacgtaagtacagaagtataaaatgtactatagtaccatgtat

SEQ ID NO: 68498 - DNA, 787 bp, Cannabis sativa
acctccattagcccaaacacaaggttatcatccgaaaataaataagtgaggaacctgtggtcccgatctagaacacctaaactccatcagttcagatctggcctttgcaagagagaacaacgaggataacaatttcgcataaaagaggaataaataaggagataaaggacatccctaccgtaaccctcttgtcggaatcactcgacctttataaccaccgttgattaaaaaagtatactctggggtcttcacacaatccataagaaccctaatccagccaccatcacaactgaactattgcatcatactggccaagaacctccattccacccagttatatgctttactcatgtctagcttgagtgccataaattctcttctactgttatttcttttaaacaatgaatgaattagctcaaagctaaccataatgttgtcatgtatcgagcgctctggataaatgcactttggaaagatgagatgagggggccaaggacatttttcatccttattgataaatcttttccaacaattttatacagtacattacacaaagcaataggtcgataatctttaacaaatcttggtttttgtacttttggtattaacaccacatttgacttattaaactattgcatcgaagcactgtcatttaagattgcaaggcatacttggctggccctttcacccacaatatcccaaaatatctgaaaaaaataaagcacgatatccgtctgcacctagagcttcagtggcattaatggccataacaacctggtaaatatcc

SEQ ID NO: 68499 - DNA, 1289 bp, Cannabis sativa
tttccaaattaatcacaaccatttaatagtaatccaatgttaaaaaaaaatgtaaccatgatggttacaaaaaaaatgtaaccattgaaacctctttctaaatgctataatcgaaaaaataaatatcaagtttggaatctaaatatgatgcatgagcacatttaaaacataaaaaataatttaaaaatttcatgataagattatctaaagattaaagtttcgccttagggtcagtcaaattaatatcaaataatctacatgacttgtttttatctttattaatagtaactagaataactcttattttctttacataataaagtatcgtttgtttggtcaagttatgtcccctagcttcaaagacaggggcattactttgtgagtgtaactcattatttcagattctatgacttaacttagtaacgccgcttaggatcagtatcacactaaaatacattactttgtcctatcctaaagaggaagccaaccttgacaatgtatggttcaacaccttctttaggaggacgaaaataaagttgtctcgagaccctccccacaccctcagtgttggactaatgatggagatcacagacttcataatagatgacaactctctcccactcactattttaatgcatgtatttttcttaattaaaattattctgaaaagattttgatttctaattttaatctttgtaatacattaattaaagtactaaatatagtcctaaacataatttaattagtaccatattacataataattttcaaattttttttagaatataagttggttataaaatagtgactagatttagaagttaatcactggggtaaattaccaagttacttaaactatttaaagcaacctagcattttatgtgtattagcattttatgtgtattcatttcactaaatacaatatttcactaaatacaatacacataaattatataggacaatcctaaataattatttttctagaatgatatgcatgattatcaaaatagcaaactgtgtgaaattttatgtatgtcatacaaaatgcatgtactaatcaactattagtaaacaagtatttaacaacaataactaaatgaaatgtgagccgagtaaattttgagtatttttaaaattataacctttaaaataaaaagaataagatacactagaatatcactactctttaagagctcttcttgttctctctcttgactctcttgctgtccatccatgtagttttagaaatttcacaccatattctttttaccaccaccatataattagaa

SEQ ID NO: 68500 - DNA, 1169 bp, Cannabis sativa
  modified_base (27)..(68): a, c, t, g, unknown or other
  modified_base (1106)..(1109): a, c, t, g, unknown or other
acataaaaatgttatttctgatctttnnnnnnnnnnnnnnnnnnnnnnnnnnnnnnnnnnnnnnnnnnggcataaaacccaacagatagtcccaccaatcattttgctaaatatacaccgaattgatccacttgacctaaagattatcttttttattctcaatttcccaaacatgttttccaatagcgcaaagattccaaacggctatatctttaaaaccaaggcctccttcttttttatctctacaaatctcggtccaagcaacatgtcccgagccgtttgacatttcactccctttcaaaagataagctcgacaaatttgattaattttgttggtgattgactttggaaaaatcaccatttgtgaccaataaacatttattgttcttcttcttttgcagacttgaatacagattcaagacaatttaaaatacatataaacagagtaagagacaaatactctcttctctacaaaacaaagacactcttttttctgaagaaataaatataatttaaagtgtacgaaagagatacatgacatagctggtataaggtgtatttataatcaatatacatcttattgacagctacacacgttctgaacaagacctcaatttactagacaattccctaaaaaagatcttcaatcagcccaaaaatttctgtttttgtacctacataattgtataaaaggaaagtcttacttcggttttcttcacaagtctaattaaatatattaagaaactcacacaagatcaaatatacacagctggatatatagaaaaaggataagtcatccaacttaccatttatgccttattttccataaatagaatagctaaacttatttttctttcatatataaatcaatcaatacaaaaaaatatgaaaactaaataaatacctcagccaaatttaatcaataaataataaaatatttttgttaaaattaaaaatgtcaaaatagaattaacatacctaaagtaattattaatattataattaaatgattggcataatataaatcataatagtttgctatttgataatgggataaggtctaggtaaaggtacttgttggttgttttgttgtgttttgtgccctnnnnaaaactcatttcaatataatcatgtttacctaattaataaaagatcagaaatcattttat

SEQ ID NO: 68501 - DNA, 1095 bp, Cannabis sativa
  modified_base (144)..(145): a, c, t, g, unknown or other
  modified_base (294)..(305): a, c, t, g, unknown or other
cttctattttattaaatgacaaaacggaccttatattttctaaatttgtaaaattaagactctgagcttaattttcaataattttatttttaataatataatcaactttaagacaatttataacacgaacagatacagaaaatnnaaccagttttgtcataacatctctagatcagattataattaagttttattttgacaaaaaatcagttcagggtcctatttgtgcaattttaaaaaatacagggttcattttgttatttaacaacacagagggtccaattggtaactttnnnnnnnnnnnnggtccaaaataatatttacccaaagtttaatgtaattaaaatctagttaggagaggaagaaaagcatactgatctttcataagcatgaacatgtccagcaaagatgacatcgactctgtattcaacgaaccaactctcgaagacacttctcatgctttcgccttccatgaagtgtgcgctgttgctgttatagattggaacgtgcataagaacaatcagccacggtgtcttctccctatcaacctttccaagttcttctctcaaccacgtccattgaggcgtgtatttcacttcatatgagaacagattatagaatgagatatcaaaaagaatgagtagtgtgtgctaagttctaacaaagcaaagaaagaaaaaaagagatataactgaacaaggaaggggaacaaacatttgatggagtgtttactgaccaagtaggaattataatgaaaatcaaagaggtaggataaagaattaagagattcataccaaatggagaataactggagaggacaattatatgagcagatgcgcgtctgattgcataccaaagagggctgctacttttgcatgccttataaggagtagtgtatcgttcgaggtaggatttgaaaggagtaacttcttcctacaaatgtttatacatatatacttgttaagcatttgaatgagaggaaaggctaatattgcataatagaacttaaaacaataattctgtaaggtattcttaatcttttttaaagactcttaggttgagcaaaacagacagaagtgaacatgacaactattg

SEQ ID NO: 68502 - DNA, 586 bp, Cannabis sativa
gagaagcaacaataaaaatatgtggatgaacaaaacaaataaatttactcttacataaaaaagatggaaagtagaaaaaacaattacaaaaataattgatgttaaactgtatcatattacatgaaaacgtagagcaataataattgcattggcatttcttctaatgaaattctcatttttcagaaaaataatgaatgaaaaatgaagccacccccaaagcaacacagccctaaaacaagacctatactctaaatttcacatattccaaggcaaaatagaagagtggactcaaagcttcattgcattcctaacatggaaacttgaaattctaacatggagaatcaattaaagaaaaaaataataatgaaagaaagaaagagataagaactgtagacactaattttatttgaaaattaatccgtaaaagaaattccgcacgtaccttagcaattcgcttggtgctgcgttgcctcatcatgtgactccatccagccattaacaaaatccccaagatcatccccatgaaaatccccgaaatcaaacccattttctcagattccaaacgcaaccttcccccaaaccaaaa

SEQ ID NO: 68503 - DNA, 774 bp, Cannabis sativa
ttgagattcaatattttctccactaaaactggtggccagaggtataaccaccacaaccactatctctaccttcagtttacatttaaaaactagaaaaaaaatgtgatcttttcgagcatatagttttgggtatgtaaaatagatgatttttctttttttaaaaaaaaaaatgagttgaaatggtgaaaaaatggtgaaatggggagtgattaacgtggtggtgggcggagaaggtttggggtttttctagtttaggggtttctgggttggctgattaaatgaggaagacgaagggctgggaagggttataaaccccttatggcgtcgattatttggaaataaccgatgacataggggcacactctatggcatcggttatttccaaaaaactgacatcataaggggttcataacccttcagcagattaacaaccctatgtcgttccttattttaatttttagcaaaaaaatattaaggcctctaaagcccattgttgtaatattatttttttgttatttgaaagctaattagttattgtataagagcttttcctactctctattttttagctaaaatagttaaaaaaagttaaaatagagagttatttttatgattgttgctccaattatggcccttactttagttagtatttgataattttaataatattttataatttaaatttgtcaactataaattaattttataaaataatggaagagtatcagttcttttgattaaaatactattaaaaaagtttagcaaaaaagtaag

SEQ ID NO: 68504 - DNA, 1088 bp, Cannabis sativa
ttgattctattacaatacctattacaataaactaaacataccataaaagacattttaaggtatcaaacatcacaagagaatgcaaactgttattagggatggagattgcactcgttttggtatggggccctgttggtacccgcccgtaatagtcgagaattgctcgcctaaatggggaatgatccccatttaattgttttatttattttataatattattttaaattattatatatatctttatgtgttctgtagtttattattagtaatttttaaatatttttattttattttaaataattcattgtctattttaaattattaacatgtataatattttaaattttatgcagtattagtgtaatattgctcgccccagcaaggattttctgctctgtctttgctggggaatatgcagggatggagacggagatgggtattcaaatattgtttacgagaatgggaacgggggaacattccctgcctatactcatctaatttctatctctaactttattgatacaatttagtatcgtgtctcccagtgacggacgcacatgtattaatgtgggggctatagccccactaacaaaaatattatcttttaaaatttaaatttattttttttaatttaaaaattataggttaaaatagtagaaaagccccaacaaaattaaataaatataataagagtgattataatataggtataaatatttttcattgataaataagcccccacaaaataaaaattctgagtccgtcactggtgtctcccacattttaatttaataattaatgtagaatactaataaccactcacaacatatcatatataagtagagtgtacaagtcgagcattattatgggataccaatgtgtctaacactactatgaagtgtcactttataattggttgaaaattctctgtaatctttattaaaataaaatatgtagaactcaatatttaattgcatcagatgtcacgttatattttagttcaataataataatctataaatatataaatgagaattataaggaggtcatgtgacatcctctccttcaacaatccatgttttctaatt

SEQ ID NO: 68505 - DNA, 692 bp, Cannabis sativa
atctgcttggattttagaagaatatgtcccatgttcgtgatttaggttctgaccctaaagctcctctaagagttgtggagattgctggtctgccatctcaacaaaaaagggagttgttgtttttaagtttattttatgttgtataatagttgtttaactgttttgttttcctttctaggtaatagtgattgcggagcatttgtggctgcatttgccgagttcttcatccatgggaaagatgttcctagtgattttaacattgaagtttatcgcactcaacatgctgccctcttcttctcgtacagtcaaaggaaaaatgttgaaagtgttgacagcggggatgagaagcaaagcaagtcttccaaggcttctaaattgaaaaagtagggtcatttttagggaaactttattgttcttggttgattttcatttcagacaatttttaattttttttatgtttgtaggtactctatgcgttttatattctggaactggttataaacttttaagatatttgacattaaccattataatatgtttattttttttaatattttaacaacaatagtgttatgattttatatttaatcatgtttgtttttttaaagtcgtccaactatagataaactattatgcaactgtatacaaactatttttagtattcaacatacttgttattttatttgtgacat

SEQ ID NO: 68506 - DNA, 626 bp, Cannabis sativa
tcccacagtcacaaataccatctttttcttaaaatctatgcaatccatggtatctcccattttagagagctgattaaattttcaaaatgaaaattattaatgactactctactcttgagtaattaaagataataacattaattgacagagatgagttaataaaaaattgaacatttggtacaaaaaattaaattagccaactttaatttaaggcaacatttgcataccaatggagcaaaagcaatagataaacccaaaactcatttgataaggaaccaagactataaatgattgaaaagaaactgtctttattgaaactagcaatttaaaagcatagccaattcagaaaatggaatcaaacagaatcccagaaatataaagtgttaaagtaaattaaaggattcttaaattgagaaatagagaaaaccttagattcagccaaaaaccatcaatgtattatgtttgcttacacagtagattatagagtgttgaacttggagaaaagaaaggaaggtgagaaagttttgaggtttggacgagattttgacttggaaagaaagaagggaagtaaaggaagcaaaggtagttgtgaacatttttggtgacaggaaaaatgtttatgaagt

SEQ ID NO: 68507 - DNA, 1395 bp, Cannabis sativa
gatagcttcagaattatgctatgaccatgagacaagtttagatccgtcttgaaaagagctttaaatttaaagttgacccaagttttttggataaatattgagagttctgcatgtgtttactgaaagattgtaagtacatttcaactccaaattcgacttgtgccacgtcatcatgccaaaaagtggcagtggtcagtcgtgcatgttctcggacactttcgagtgtgttttaacttttttttttatgttgaatcatatttttcaagttttggggtcccgaaacctcatctcgatgtccgaaacactaattggagacctttgccatctttcggtgccaaaagatggcagtgctaggccaaggttgttgggaagaatttgatagtgccaactagtaataaatatgagcacgacctaaacttgattgggataggagtcaactaagcttggaaggggctagggaacagcagcatcgaacatcgtattttgttaagcaacttcaatttgcaaccaaggtggagatttgttggttatggttacaagtttcgtcttttagaaagctagatcttggaagctagttgttcttctaaaattcagttctgcgaagctagctgtccctctgaaaaagagttacgggaagcttggtgatctttcgaataagcttgttccaaaaagcttgtggccattccgaatggtcattcaggatagcttgtcattattctgaaacatccttttggagtgcttgtcgttagtatggaacgctcgtttgcaaagcttgtacccatctggatcgtccgtatgggacacttgtttacttacgaagagcgtgttgttgaagctgacgtggagacttaaaggtaatgttagttaagtaatttagcgccaatataagtctacatattgctatcatctttgtaatcaagagtggtgagttgagttagagcttaagagtgaaatcaatgctgtgaaaggttaaagagagagagtgtcgtaaaagtagagagaaatttcatcttgtaatcgatgacacagtttgtaagactcttgtaaccttgtaagcaattatcaataaaaaaataatggttgttgttgttccaaccgagatgctaaacattgcacatgactcgaactcgttaaatcccgatgttatcttctccttgttttactaatttaatccattatatggttcttgtgattatctattatagtaatttaatattgttcttgaatgagtgtctattgatttggtgttctttcatcgtaagccattgattaattcacaacatcagagtatgcttctactcttattccttatccaaaactgttagaatttaggaataagatgaatgaggttccatctcaaaaccaattggctttatttccacacattagcaatgt

SEQ ID NO: 68508 - DNA, 752 bp, Cannabis sativa
gtaagtttcgttccattagaatcctactaaaataaaagtgtcatacagcacacttcttagtcttgataaatggttttttttgttttcttacttagttttagagtgtattatatatcattcttttgtatcagtcaataagttactcaatttttttttttctttgctttataagaaacctgaaaattttcattaaagaaacggaaacaaagttgagatacaaagtaatcagcccaatataaaaggtaaggaaccattccaaaattactcactgtctaatcctaagtcagccttagcatgactatagactaacttattgctatctcgtggtacataaattataagcaagttaggactaaacaacaatgaattcctaatgcaattaataatgtcactaagaacaattgtattacaataagagctattaattttgtccaccacatttttacaatctaaagcaataattgaaactggcaacttggctgcttgaatccaagatatagctgctaggattgctttgccttcagctaccttagaaggaatcacacttgtaaaaggggctataaacactgcctttagattatcaccagcatccctagccacaactccataattgtgcctcttggaaacaaattcaatggcagcatcagtgtggactatccattgcccaagagcgagtcgaggtacctggttatttatagcatgcatgtgtgctaacaatttaatttgttcacaatgtgcattaacataatcat

SEQ ID NO: 68509 - DNA, 617 bp, Cannabis sativa
atctcaatgcaactctatgtacacctcactaataccatgatatgatattctgatggcaactgacaggtgctggtttttagcgtccatatcagagttaaaaaaaatggaagcagatttgataaaaatattttatccaatgtgaactacaagctcaaggatctcaacataaaatatagattaaaactagactaatgaatagagaggcaataccttttgtagcctatcagggaatcctcgctatcttttagtataattatgatcatccaatgcaagaacttttactgaagagttcacaacacaatcttctaagccagcctcaatactcaagaatagagtaggctattagattttataagatggacaaatttatgtattatagtgtattctcagcacacgagactctataattgagataggattgatcacaatcttacaccacattatattgtatgtagcgtgtgagactgaggagagagagatagagagagagagagaggcgtgagagagagagagagaattagagtgaaaaatcaatttctattttatctacttgttacactctgagttgtgggtttattttaatatatatcatatatatatataatgttataaataaa

SEQ ID NO: 68510 - DNA, 737 bp, Cannabis sativa
agattaaaagttaaaccgtggtgtctaacttttcaaaataataatttttatatgtaaaaaacatatatttttcaaagaaaatgacaaaattaaatgtaacttattagcttttttttttctatttagtaaacaaaaaacaaataattaacctaagtaaaatttaatataccaactaatttattatttatatatatatatattctaactctttttctctcttcataataatttttttaaacaaaaatactttgtttaaatcttttagttactatttggttaaaatatttttttttatgatgaaaaaaattcacatattaaaataatatattcaaaagtaaattatgatagtattatttttgagccaaaataattaccggtaatcaaaattcttaattttttttcatgaatattttttttaaaagattattgagtgagagaaatgtataattcttttttagaaaaaaaaagcacaaaaaggaaaaaagtaaaaaagtaaaaaagtaaaaaagacatctaatggtttctcaattaaaaaaaataaaaaaggtaaacatttaatgcatatgtttctaggttttttattgtcaggcactaataattaaagataggtatttttttgttgatgtggcacgttaaagattgttaattgtgtgtgtaaggttattattgtaaataattttctaattatgtatattagtgaaaaaatccctaataacaatgcttttactaaataatta

SEQ ID NO: 68511 - DNA, 548 bp, Cannabis sativa
gttttctattaaggaaggtattcttaaaataaaattgttgtagttaccaatcttagttttcttctaagcggaggaggatgctccctcaagctgaagaataaatgttaattatgcctagcttgttacagataatcaacccaaaactcattcaaagccatagtgaaaatagttcctaattgttctcctagcttcacatatcctatggagagattaggccttgttgaattttctcacaaaaaaaatgataatcgatctcaatgtgcttagttcactatgaagagtagcttgattatgacaccgtaattttgctagaagagaagccttgaactcgagttcagtcaaaagttaataaatccatattacctcacacacgaactgtgccatagctctatattctgattcaacactggatctagacacacattttgtttcttactcttccaagagattagattatccccaacaaatacacaatatcctgaaatggatcgtctctctaccttggagcctgcccaatttacattagagaaacacttaatatgggtatg

SEQ ID NO: 68512 - DNA, 951 bp, Cannabis sativa
cctaagtttcccactcatgtgtgtaagttgaacaaagctatatatgggttaaagcaagcaccaagggcttggaatgataaattgaaaaagactttgttcagttggggtttcaaggaatctaaatcagatacatcattgtatatctatgggaaaggagacactcaaataattttgctagtatatgtagatgatattctactaactggacccgattcaattctcattcaacaattcattgacaagctccataatcggttttctttgaaagacatgggggaggttcactacttccttggtgtagagattcatcgaaacaccacaggtatgtacttatctcaaagcaagtacatctcggatttattggtcaaactccatttggatggcataaaaccgtgcaccagtcctactagcagtacacacaaactgtctttaacagaggggcttccttttgaggataaaactctctatagaagtactttgggtgcccttcagtatttgacacttacaaggcctgatgtagcctttataatcaacaaattatcacagtttattcatgctcctacaactgtgcactgggaggcttgcaaaagattgctgaggtacttgaaaggcactatttctgatggtctatttctttcacctgccactcacttctctgttgaagcttactcagacgctgattgggcaagttgccctgatgaccgtaaatctacaggtggatatgctgttttccttggcccaaatttgctctcttggtctgcaaagaagcaacatgttgttgcacggtcttcaactgagtcagagtttcgtgctcttgccaatactgcagctgaattaaaatggttaaactcactctttactgaacttcaactacactttgctgcaactcccataatttgggttgataatcaaggggctgctgcacttgctgccaaccctgtgtttcatgct

SEQ ID NO: 68513 - DNA, 1013 bp, Cannabis sativa
  modified_base (529)..(544): a, c, t, g, unknown or other
tttagactattgaagaagttttaattagttcgtctccactttccaaatctttgcaagctatcttcaatggctggaggtcatgatatggtataaaaatatcatctaaaatgaaatgatactaattcaactaaatgctaatatatactatgattgatgagagtacaccaaaaactgaaatcatatatatccatatatgtctatacccatatatgtctgaaatgtcatgataccaagagcaaaatatatcgagagtaactttgagaaattacacatgctgaataagaagaagagaatttggcttgctgaagagttacttcgagaattggaaatgcttgtttgaatgagaatatactgttgttgggcctataaatatgtttggttgtaaaaataacagctcaaagttaataagtgcctatattgcttttttaataatattataaggctaattatgaattttttttcccgaacttggacatgtaccaagttatgtccttgataaaaatgtcccttgaactattaagattgttgnnnnnnnnnnnnnnnntccaattttagtaaaaaaaatttaacatgaatgaaagttcaagaagcataatttagtacatatcaatgttagaggggtatgatttggtagatatcaaagtctgaggagtatgatttattacataaacaattactgaaacgataaaattgaatgaaattagacaaaagtctttaaatctaacaatttcactagttcaaggggaatttttaacagtcaaaaaaattcaggaggcatgatttggtacatgttaaagtttagggagtaaaattcctaattagccatattataacgatgtattatcaaaacttattagagaaaattgtgtcatttaggacaaacttttgataagaggaacaatcaatatgcgagcaagaatggcaagtttaaagcttccattctctacaacagtatgtttcatcataatcaggttgcttatcaaaaaacagtttggtgtcgattaagcttaccg

SEQ ID NO: 68514 - DNA, 963 bp, Cannabis sativa
aaatatgatatataatcaaatttagtataatactatacaatacaatatgacctaatacgatgtcccaaacgagccccaagtgtattatttatgtcatatgtaaatatttataattttcatgatttgtgctcggtaatgatggaaaaagtgatggatggccattaaatcacatgagtaagtttagaacctaattctttgtggggcaaacataagtgatgattggaatatcagaattaggcgatgttattgtagtggaacattttacccctaagctatttaatttgttaagcttaacaaaatggtaagttagtcatttatgcttggttattaagtggattaaccctttgtttgatacaactgaccatttttatgtagagataaacttagaatttatgataaacttagaatttatctcttaggttaaggaaaataattaagatatacatagaaagaaaagacaaaatacaaaacaaacctattcaatctctctttccctttttcggctgaagcaaaaccatgaggaaccaactgctaacttctttttttgagaatatagaaaggattctaggtggtttttgtggagggaagccctaaaaatgattactctttaagtttttaagcttttacttggataatattatgcaatttctagcttgaggtactgtttgagttgggtttggttttagttcaatatctggtttatatttaagttgaatcaggttaggttctgctagtttgttggtttgaggagtggttgagcaagtttgagtttgaaaactcaaacttggttcaacaatagaactttgagttttatttgtgttttttttttcttactgttgttgcttgggaattgttcttggatgatattacaggtgttctttggttgaatgtaggggaaaattggttgagttttaaagttgttagagttatcttctatgaaccgatgaactggttctatagatt

SEQ ID NO: 68515 - DNA, 583 bp, Cannabis sativa
  modified_base (45)..(51): a, c, t, g, unknown or other
tttctttattgatatttaaaagataaagattacattgaaatagannnnnnnttagggcataaaactcaacataaagatattgggtttgaaccttgagatgcaataggagtttggccattgaggcctgtagggtcggaagtgggggtgtgtatagacaactctattggcaaaaatttgataccatgaagaaacaaagtttaaatggtaaagacctgtaatggtagcaaccaagaaaagaagagaaaaatagagaaagagaaagtttgcaatggaatcttgacttcccaattagagagttatttattatttatagagttagtttacagtaaaactgattagcaagagtcaaactaattaatcttgatagttaatttaacagaaaaaaccaattcaataaaactaataacagaattgtatttattgatgagcatatatgtatcaaaatgaataataacacaaaccaaaaaagaagttgtatacaccatacaatggaagtaactcagtaaaatatttgaagtgacaaccaagaggaggatctttcatataacaaccatagtgagaggagcatataatttgttgattg

SEQ ID NO: 68516 - DNA, 709 bp, Cannabis sativa
tcagctcttactacttgacttcagaatttcctctacaacttcaacccacaataatagagtttcttaatgttagtacccgcaatgaaacacaaagacaaagaataagaagaaagaaacgaatctctaatcttcgatcaagaaggttagtcaaaaaagtaacaataaaaaatatttatacccagttaaataaagaaattcgaagtagacagttaggcaattaaacacccaaaaatatttttgctgacgtggacaacactaataacacaaactgtacacatcaaccattccagacgcaactcaaccttatttgtcactacagaaaatactggttcttatattttgtatttggagaagtcttcctaaaatttttgtaaattaatttaacatattttataaattattttgggttttaataattatttttgtatagggatatgtatgtatatattaatattatatatttttaataaataaaatataataaaattttaaaaaagtaagattttggtgatatattttaaaaaaaatatgatgtattatgtgatgtaaaagtgtagtactgtaaaatagaaaaaataaaatttttataatgtattttaaaggataaaataaaaaaattgttgggagtattctaagtctatacactatatacagttacctataagtaattatagttataattagtggatatataattagacataagaaa

SEQ ID NO: 68517 - DNA, 1008 bp, Cannabis sativa
tttacatctctcattggagatggtctaagaaagaggaatagtaattagcattaacaattgaataattaaaactacatgatttattttcctaatttctcatccttgattaaatactcttattgcttaattttattttattctatttcttatttttactaccataataattattatttactaaatagaaatataaatttaatttagtggcattcacttaaattgtttgtggaattgacatgacctgtgtgagtactatttgcacgcataacatttctttttctataaaataaaaactaacggagagttaattttttccgttagctagacattaatgattaaaggagaaagaaaaaaaatccacgactgaaattcaatctcaactttataaccaaaatatctcaaaaagaaaataaagtaaaatatatcatctccttctttgcgattgaggggtgagggattttttttttgtgtgattgaggtaatcccaatagaattgaatgtgattgatagaggtagaaacaaattatataatttatcaatcccaatttctacaattgaattgagggaggaagaaaaataattgctatttgtaaaaaaatttattggcatattttataaaatagataaaaataatatttgtggcatttttaaaattatttttattttttgttaattattttcgaaaatataatttcattttcttgtgtgaaaagactttcaaaatcagatttcattcccttttgactttgtgttaattaaataggagtttttaatatttgattttatctattcttaatcatattttattctttttatttaatttcttgactaagaaattgtatataattatgtgtgttaatgtagtcaaagttgtcttaattatttatggaaactttgttgaaaaattgtccaggttcaatgtacctatttgaacggactgactgtctgttaaaatagattttcactttcctattttggaaaatttttcatttattgacttgattattt

SEQ ID NO: 68518 - DNA, 1336 bp, Cannabis sativa
gggtgtatttttggggttttgaaaaaaaaggaatagtttttttaggttttaaatttttggtttagggaaatttttttttgattttctaagtatagaaaatcaaatttccctttacaaaatataatatccaaaataacatttactcataataatattagtaataaacaattcatgagttgtgtaggttgaagctaagcatatatatgtgtgaacaaatccccaactaattcatgctctagagtcaactttaaagagactttgatagagagtttttttctatttatttggtaggtagatcaattaattaattagaaaactaatatatacaaaatcaagacaaaatagttgtattaacattccaaattgaaagattatacatgttaaagtaagttctcactttttttgaagttttccactttgtttttattaaaaaatcattatagtaaagtatagctaactcctttttaagtcaaaacaacagattaataagtgcctaatgtcgtctttgtaggatactaattatttttcttcttctttgaaaatggaatattaatcttaattctgactactttaattagactgtttttgtcttcatttataatctttttttttttctttttttcaatatatgtgttccaacttaaaaatcataagcattagcaaagtggcaagtgaagaatattaatggttaccttccccacttaaacaagaaaaaaacgttaccagttagtggtcaaaaaatcaaatcatgatcatggagctggacatatatgtatatatatttattacataagaattttttttatatatatagtcattacagataattattgaattttcaaatatattaatactattttcatagataattaaatatatttgaaaaatgtttaattaacgataatttttttgtgccgtgagcaaagcttgataaataataaattttaaagtattgtgaattgttaagattttattataataattataatgttataatctaatttattataatcacaaatatatatatatataaaaatatgttatataaaatttatataatttatatatatttttaattattttttatagtataaattcgtattcatttgataaaaattatttataatatttttaaattataattttattacttgtaatggttattattataaatcattatgtaatatttcaatgaaatttggagatgtattttgaaaatgatctacaccttatttaacatgtaataattaaaataaatataaatttatttattttttcatttgaaattatacatccttattttgttaatgtgaaatctattttttcgttacaaata

SEQ ID NO: 68519 - DNA, 1033 bp, Cannabis sativa
tttttttttttggtaatttaaacagtgatatatttttagatagtcatattattttttgaggaatgctaaggagactctcttttgtactctcttttgcactctctttataatttagtgacaaatgtcattctttgagattattttatttgactttaataactaaacataatattattaatttattacaactatgccatcacaataaaattatcctactaatttttttcttagggcaactctaatgccaaaacttaattttagtgttaaatcaaactaaaagagtactattttagcactattttttttttccaattccaaccacaacactaaaaattacattaaaatctatattctttattataatgttattttattaatataataaaaatatttacttcataaataaaatatttaattaaataaaaaaagaaaattaaagaattttattggaaaaattacactaaatataagtttttaattaaagtgtaattggaaatggctttaaacttgaataaatattaaaataaaatctctaaaacaaaatcataacacatgtttacaattatttagcaaaatgaatagtcacaacaatatatgtgatcattattttatttattgaaaaaaatatgtccaactaatatagactaagagataattaagcatttatttttactttttatacatacatatataaatatatatatatacatttgtaatatgacctaaaaaaattttagcaaaaaaacaaaaagagaagatgtaataatttgtccaattaattgtttagaaaaaaaataaattagttttatttattatgttctatttatattatttttcctaaaaaaattaaaaagattttcaattggcggattaatagttgtcataatgttattattatattttttttatttttatccgtttaattcatcaatttttttttactttatctaattattatatttttctatttatatctgtttactttgtctaattaaataaatttttttatcaaaccaattattataaatttaaa

SEQ ID NO: 68520 - DNA, 660 bp, Cannabis sativa
aagtggtttacctgcttaagtcaaattaggtgctacatgttgtaaatattaagtaattttttacctctacagtttgtccctcactctccaacgagaattcattttagttggggagttgataatatcaaattaggtgctactgttgaataacctgggtgttggccaagtagtttacctgcttaagtcaagcggtgtatgcgtgtcttgctgtttgagataagaaaattgcatgaatggttcaagcatggcgattgagtagtccttgccgcatgcgggtatgtggctatcttggctgagtaatatttgtgtgaataattagttcttcaaagggtcttttttttaaactaagtcatcttgttggtctaatcagttagacagacgcttggatataaattgcttataaaagtcatacattgggccaaataaaaatatttggctgtctatttcgaaatacgagatgagaggagtagatagacgtacatatatatgaggtgtaaggaaatagacatttggttacgtaaagagatagatatatatatatatatatatatatacatatgttgtaaggagataaacacatatatatgtcgtaaggagatggacatatatatatgttgtaaggagatagatatgttgggtaggggtgttcaataaaattta

SEQ ID NO: 68521 - DNA, 980 bp, Cannabis sativa
ttatatcatttcgggatggaatgttagcaatagtcatctgcgccactcaatttcatagaagaaaatagaatgacatcataagcatatgatttataagccatctatccaatgtgttataaccgaaattcaaccagcacatcagaggaggacacgtgtcaaactaaagagaatatggatcaatgcatgaaacagtaattatatttgaaaatgaaataactcattaaatgcagaagtgacagagtatagttacaacttgcggactataaggtcttacgtaagataacgatatacaaactgttgcctcgtgtattaacgagaaaccatacagcattagatacgagaggcgagacctcaacctcgttatgtatgagtagacgtaagtgagatataatgactgtgaaaacacttagcgtataatatacaatatacaaactaagtataattaactgcctgactatgtaattataaataaaggcaagttagattgaaaaagggacgaggcaagttagactgaaaaagggacgaaatttcataagagaaaaagcccaagaatagtattagaaatctaataagattgactcgtggactatgtagaattttaattgcaaaaccacgtaaaaaaccttcgtgttcgccattttctttttatctctttactgtttttatttttctatgcaagtttatcactatttaggctcaaatttggttaacaaaaatctacgttaacactttggtgctttcattgagagcctttgtataaaagctcagaaaaaaccctccttacatataaaaaatcatgcccttcatggctgaaaacatagagaatgttagcacgccacatgaagaaactcatcactgtcttggaaaggagcccatgggctccagaaggccttccaactcacagtctaaatggaccactctatctagaaggacccaacctgagggtggccctaacactcagaccactcgttccaggagga

SEQ ID NO: 68522 - DNA, 557 bp, Cannabis sativa
atctaacatacagtttggatctatggatagaaaatgaatattaacaatttgtgaaagttgtagtgtccaatgtattatggaaactgaaattaaattctatttagaatctaaaatttaaagtcagagacataaatttataccaaatatttaataagtaattattctagcttggacctccattaaaatactagttcatctctaagttaaagttgtctttactaagcatatataagtatgatatttttctaagatcgaagatttatatcattacgagatagaagatctggaatatggtcatctgtgccactcatttttataaaagaaagtagagtgacatcattagtaaatgatttgtaaaccttcttgtccaatgatatatattaagcaatttcttaatgaaaaagctaagagaaaaactaaaaaaaagatctattaaaataagaatataatgatgtcccagtaggtgagagtcaaggttatcttattttataaattctttattgtttcagctttgtaaatactagtctaagttttcatcgttagaatgagtcaactag

SEQ ID NO: 68523 - DNA, 1103 bp, Cannabis sativa
atcaggactgaaacctgcgactcgtgacccaaactcacactgggacccggactgggacctatacccggacccagactaggacccaaacccagaccttaaaccagacccggacttcgatgtagacccgtaccaagaccaagacccagacccaggacctgaacctcgaccgaggctagaaccttgaccgagacatagacccggacccagacccaggtccaaattgagacctagactcggacctagaccggaccgagactcggacccgaaccgggattcagaaaagcatcaggacctaagacttggacctggatgggggacatagactcgagaccctggccccagaacccagacacggatcggaactcgggacctagacccaaacctggacccgagaccaaaacccaaacccaaactcggacaaagagtaggatcgaaacccagatctgaacccgaactcaaacatgggcctagactcgaacgttgacatggactcagacccaaacatggaccaagacccagacgcaaacttggaacgaaattgggattcgaacacggactcagacaaggactcagaacccaacctggacccaaacccgaacccagacccagaatcaaaatcgcaccaggacatgggactagaaccataaaaaaaccctgatcaggtgctgtacccgattcgagacatgggacctaggaactgaacccagaccatgacctggactcagacccagatcgggaccaaagacttgggatccagactgggacctagacccagacctaaaacttgaccgagtaaaagaatcgaaacctggacccagactagtgcaaaacctatacccaaactcgaacacaaaatgacaaccaaactcgggacctacactgagacccagactctgaccgggacccagactgggatccagaccaagaaccagacctgaatccagacctatacccagacccaaagccaaaccaagattggagcctgagacttggacctggagcaagactaagacccagaccgagattagaactcaggactcgaacccaaactcggactcggacttggactcagacccgggcctagacctagacttggtacccaa

SEQ ID NO: 68524 - DNA, 613 bp, Cannabis sativa
tgtacgaactctgaaaaacagagtaatggagcagagagagaaaggtagaagaagagaaaaagatggaaaggaatgaatgaaatggatgctcaatcagaacagattggcattactgttatttatactgtaataggaattacaagactggtttgttacaaagcaagagaggaaagaaaatatctgtaacaaccaaactgttacaccagaaaaacagttaggatacaattaatcttaacaacatttaactacctattacagttatacaattccaacagcccccctcaagttatactggtctagaccatgtattaacttgtcatgtagatactggaaagatatagcaggaagcggctttgtaaaaaggtcagcaagctgatttgaagtgtcaacatatctcacatcaagctgatttgctagaactttgtcacgaacgaagtgcaagtcgacttctatatgcttggtgcgtgcgtgaaagacagggtttgaggctaaagaaccagctccaagattgtcacaccatagtataggagccagaggaatagggatgctgatctcagaaagaatcgattgaatccacataatttctgatgtagccaaagcaatggctcgatac

SEQ ID NO: 68525 - DNA, 2298 bp, Cannabis sativa
acttaaatattttttttatatgaacatattttttatatagtgtaaaaaaaatattttttgatattttctttaattaagtagttaaattaattataaaaattcaaattttttattatttgttattgagttagaatttaatattttattatttttgaaattaatattcataattaaatttatttaataataaataattctcattaaacaaaaaaagttccatatatatacatatatgtttcctaaagccttaccctagtaaaatgagcattatgtatgccatttaacatttctctactaaaatacatgttacaatgattattataagaagaaaaaaaaatgtagagaattattaaaagagatttcccattaattctatccacacatactagacctctatgattttaatatgtattgttagaatttgaggataagatgaggttccatctcaaaattaattggcgataggaggagtagctcattcatcttatataccacaatttatttccacacattagcaatatggactgactcttaatatatataattaaaatttatcataagctattattatatgatttatttgtaatcaaccatcatatcaaccattacgatgggtaaccactgaattctatcaaatttactataaactaatagaacattatcactaaaaacttacatcaacactcgaaacatttgcattaacaagtcaacatattctcactcaagtttaaatcattaaataaaataatgttagacacatacttaaattttacacatttattttattttattttataaaataatatgagctttggcaaatcaaagaatcgatttcattttcggtacaattttttctgaagaatgtatatattctttgataaattatttcttctttatagtgcatcttcaaatttgatgaataaatatcactagaaaatattaaatgataattgacattgtatgtttgtaaataaattttatacatataattaataatactctagttgtaaactgcattaaattaatttcgaaatgggatagaatcaataatttatagaaaaaatataactaactaaattgtcgagactcgatcgatcattatattttaaaattattactttttaaggaaaaattaacggttctttttccataataaaacctaaagttcttctaagttctataattattcttgctataatatattatttcataatctttaattcttacataaatatcttacattttcgtagctactttattttgttaatatttattagatggatcaagcataattgtcataattagcttgttagaatttgagattaaaggtgcattggtttcaaatcaaataactataagggtcaattcatcttatttttcttttccacatatatcattgtgtgactaactctaatacaccttctttacgtttgggtctgaaaagtgtgggtataacagaaccgaacatgacatttaaaattattacacaagtctaaattggaaattaaatttgtgagtgtacacgtatagaaatttgtaaattttttgaaacatgtcaaagatcccaacactaaaaactggcacacattggcgaaaaggtccaaatagaggttaaaggcagagactacagaagattttgtctggctctaataccatgttaaaattataaataaggtgcatgtggttccatctcaaaaccaattagctataaaaaaagtaactcaatcatcttatatgcagtattttcttttcacataaaatagactctaacaaggccaaccctgaaatttagtgggtcataggaaaaaaaattatttttaggtccttattaaaaaaaaatatgatatttttcaaaataagtaaaatatatatataattttcaaagggggaaatattattttgggcccctagactagacggaccctaggcacaggcctaaaccgtctatgcctagggccgggtctggactgtaacatctccctcaaaatggtatagctattttttgctcacaaatcttaggcggtttgaccacaagtgacattattggctaacaatgaattatacaaacgactttttttttttggctctttttttggaccgataatactttgaactcacaacagattacaaagtaattattttatggctcatctttttagaccagtaacacaattgactcatatctcattacaaacgacattcggatcggatgattgttataatttttttttgattaatttatcatcaaaaatttaatcaaatgaaaaagagtacatataccatatatataatagtagt

SEQ ID NO: 68526 - DNA, 597 bp, Cannabis sativa
tgaaataaatggtgaaaagctcttcttttaattattttcttcaacgtgaaaatcagaaaatggcagtagtgtacactaacataagtgcctaaaatattatcatatatatataaaaaaaaaatagaaaattatctcccagatttttcaatattataacagatttaaattttttttcttataaaaatacagattgttattttttaattacgttagtttgcacagcaacaatataatatgttgttttcacgaactattttttttaataataacaaatggacattatacttctcctcgggcaaacacaaactgttgcaacttatttcatactattatttatcatgtatatctctgacaattttaattagttatttaaaaagaaaaatcctaaaattaatccaaaaaaaaaaaaagatcataagaaaatgttttattttattccctttcattttttttttttttttttgaggaaattttattccctttcattaatttgcagcattcattaatttatgattacttaatatttagtgagatatttcattctaaacttgcaaatgagatatatagaatttgtaaagcttctttacattttttttt

SEQ ID NO: 68527 - DNA, 662 bp, Cannabis sativa
ttaaggtcattaaaaataccccttgaactattgagattgttggatttaaagacttttgtctaattttagtaaaaaagtctaacatggatgaaaatttaaaggatatgatattgatttagtacatttcaaagttcgaggggcatgatttagtgtatcaatgtctgaggagcatggtttagtatataaacaatcactgaatagtaaaaatgaatgaaattagacaaaagtccttaaatctaacaatctcgatagttcaggggcatttttaacgatctgaaaaatttaaagggtatgatttattagtacatgtcaaagttcagggggcaaaaaccataattaaccttatttaaatatctgatgagaagttttagtaaataaaaagtcaaattaataataaatttaaataaaacaaaatattaagattcttcattttcaaaggaaaaatatgacgtttataaaaaaaaaaattatatgacaattctttatgcttattcacactataataattttacataaataaatataaaaatagtgtatagaaaaatagatgtgaaccgttattcattttcacaaatacaatacaataaaattaaatttattaattaataaatatatttttttacaaataataattttattttatttataattaacttaaaaga

SEQ ID NO: 68528 - DNA, 1307 bp, Cannabis sativa
tctaccaggaacatatatgattttggctctatagacatacgaccaaactgtataccaaatcacatagtttctccaatccaattgcaccactatatttgtagacacaaataaatggcaaataccaagtcccatcccattccaaataatattgaggatatttacaaaaatgccactaccgtacaaactaagcatcagcatgcacaccaacatgcgccaccacttggccaacttgtggtaatcacctagcttgtacgtgccatcttggcacgcacattacacccgactgcgtggttgctgcagaatccatcatgtacttcagataaaagccgtacaactttttcttgtgtgacacatctatgtagcagcatggagaatccccttctatacaagactccttctatgatgatcatataccatgcagccttctttctcatctttcgagcttcatttctatcatttagaagttctctagtattgaggtaggctgctatcagtgtcatcaaattcggagctgcgttaatcatttcaattttttccgcacaggtgatgcaaggttcttcaaggaattaaattgggattaaattagccttatcagctatgttggtgctcgcaagtcgagctaaggcgttagtagttgtgtttccttctcttggaattttcctgagagcatagctcttgaattgtgcgagcagatcatgtattttgcttatataagctatcatttttctctcgggcctcgtactctcctgatacatgatttaccactaattgtgagtcactatagatctcaatgtgttcagcatacaattctcgagcaattttcaaaccagcaatgaggagggtttcttcatactactctacttcttcatttgttggaagctttgaatccaaatttgaccaccccatgcaagtgttacctcccaggtgtgacaaggaaatccctgcaccagacagttgatgtgtagctgacccgtccactgtaatatccaagtaggtctgtcttcattattgttcggctgggattcttgtactggctctgggttgtcttttgaaatgctttctcctttgcctgtgcactcaactacaaagtctgctaaggcctgtcctttgacaactcttcggggtaaaagattatttcatattgacccaattccactacccatttgagtaaccatccagaagcatcgagtttttgtaatacttagcgtagtgcttggtcagtgtatactcgaacaggatgagcttggaagtaggtgtttgaaatattttacaaggatctagagttactaacaagtatgtttcattaa

SEQ ID NO: 68529 - DNA, 840 bp, Cannabis sativa
tttattttatgttatttttatttttttcctttctttttttctctgaaacctctcatcttccacaaaccacacaccaaaaccctagcatctttttctctttgtgtggcatccttcctcagctcctcgaagctaccgccgacaatcctcagcccgtacgggccacacccgagaaactcgaacccccatttacactctccatctcatgtcctatctctctgcccaattcacatttttttctcatctctctctttctcttcgacacgtcttctcctttgttgggatttgtctttttttttctttcttgcaggtcgatggaggttggagcttcagccaggcttttgtcgacggtgatgagggcttcgccttgtgccttcgtccgtcgtaaagagagaaaagagagtgatggcagcatggccgaccatgtacccgtggaagaagtgctaatgcacagggcccaaaaattaaaaaggcccaatatgatttttcaaaattatttttagcccaaccttccattatgccaaataaaaaaaatgttttttctttgatttttttccttatttaatgccttttaatttttttttctataatatttgatattagcttgaagttgtattaaaaataataacaattttaataaaattatttgggtttttaggtgcttaattatgtaaaatatatttttgtaatatgataatatttaaaaatactatttacaaattataatttttttttgttagggcctattttttaaaattagaacagggcttctaaaatatttgagacggccctagatggaggtttctagacagcgccgccgcacaatagagagagagagagaga

SEQ ID NO: 68530 - DNA, 584 bp, Cannabis sativa
caaaaggttcaacctttaaaagtacaggcatggaataacagtctagcaaaaatgtatggtgaggtgcacgcactaccataatctggctcatggatctgattctgtgtcagaaaaaatataaccgtcgttgggcgatccgagatgcatccaaggtagacgtctgcgaaactcttaagcggtcagtgtccgcaatgggcccttcgagtactcgtccaggtatcagttgggtagactctgagtttggaccactccgggtcctgaagagacaataggaagagtggaagttaagataaagaaagagagacttccgcttatctcttagtcttaaactgtttccagatttgtgaatcttctctgtgacaagattttagtataagattttaattagtaagattctaaaattatctcttcccacggatatcaaatataatagtaacctttttaatagtcattcattataatatgtggtattaaaacatcaattttatgaagaatttttctctcgtttttttttttttggctgaaaaagaatcttattagtcattactgaagagattgaccattaccaatgtgatatttctacc

SEQ ID NO: 68531 - DNA, 866 bp, Cannabis sativa
aatatacaaatatttgtggttgtaagggtgaatgtttttatattattaaacaactataaaaatggtaatactctcaacatggattaacaatctctcgcacataacgaaacaaaaaatggtcagaaagagtgttttagagtgagattttatattcttgcatttactaatattatatggctctcttttttatttatcgaagagtcttatatcatatgctatatatttgttatgacaatattttaaataaaattcagacatacatatattcctgcttatatatttaatatatatatatataaaaaaaaaaaaaaaaaacatgtttgtcaataaatatatattttatgctcaactaattttagcatagtggggcatatatattgggattgctagaatcatatctctattaaaatatcctatatgattaccctacaatcatgggattatatattttgatatcacaacaattgacttataacatttttttttttgaaaaaattcatcatctttattaattgccatccatagtgattacatgattaaaatctggagtaatatccatactcttgataacacgatcaacaactaaataggatgctcgagctaagaaatgagcaacactatttgcagaacgtctaataaaattgatataaacatctcgcaagtcatttaacaacatcttacaatcagaaataataatactcccaaagtatgaaaccataagagtagagctacgtaatgcttgcaccgcagtagactatcagtttcaatgacaaccttcctccaatctttccgtttaacccaactcagtgcctccttaacacccaaagcttccaccattttgagttgcaacacccctgaccgatagc

SEQ ID NO: 68532 - DNA, 882 bp, Cannabis sativa
attattggtaccatttgagcatgatgagtttgttagaggaggtccacaaagtccaaggttccctgtatagctagaagcttcaaaactttgtagctgagtgcctgtggggatttttccaaacaatttgttgtttgacaacttcaagaagctcaaaaaagatattgttgctaagcttgaaggaatttgaccagagagattgttgttagacaaatcaagtgattgtagagtactcaatttccctatctcctttgggatgcctccatccaaattgttccatgataagttgagttgattcaattgaacaagatgtgttagagtttctggaatttctccactcaattgattgcttgaaagatcaatgagtcttaacgattcaaaaatcttttgattctcatagtacactcctttccacataatcactaatgattctaactccatgggtctcaaaccattttcatcaacaggtacatccactctaaatttactgcttccagtttgtaattgatggtgatctcttttttcaaccatagaagtaaagttttcaaggcatggtggaatattcccaaatatactattcgttgataagtccaacatctcaatagcatgaagattgcatagattggatggcatacgattattgaacttattagattttagagacagaaagatcaaatttttcagattttgaccaatccacaatggtacttttccttccaatgaattatctccaacatcaaaaacttgaagttgctcacacatttgtaaggagggtagatttcctgagaagttgttgtgcctcaattgcaaaactcgaatttcttgtaatgaacccgttgattttggaataagtccagataaattattgttacctaaattgagaaa

SEQ ID NO: 68533 - DNA, 685 bp, Cannabis sativa
ttgggaagcctcatgttgctgtgactggtcctgttgactacttgggtgttgagattctaagatacagaagtactgatgtaccaaagtaagatacatatctggtttgcatacccatatacccttttgagaaattggtgttgtcttgttttttgttcttgttactgttcgtgaattgaaattgatagtcatcattgagttcctgattttattctgctgttcatgttttacactttcttgaatactcccaatgcaaatcaatggaagaaagcaaaaacaacagacagaacaaaagagctatagtatttattaaaataagtcttttgttgatgcaagcaatttattcttttaataagttgggcaaataaggttatcagcaaaagaggtttttgggggtgtattttggaactccaggaatatggtagctaagtagtatctattacaactccattcaagttccagagattgttgttatttgttgtttaattatcggtgtaacaccatgcatgtcgataagcatgagtggtgtaaacacatgctcgaataagaacccctatgaaatctgagttgaaaagggtgaaactttttcgatcttttgccattggcagcgctttgcaagcgcattctttctgctgctcctaccatcatctgtttcttgctttccacagtaaaatttcaattaacagaa

SEQ ID NO: 68534 - DNA, 938 bp, Cannabis sativa
tattaattagtaaatctcattataatgaaatgggttttatttagggcacaaaatccaaccgtttctaccaaaaatattggtcaattgttgggcaggatgttatcaaccaggtctagaatttctttgatcattgctccattccttttgctttaaatcatactgatattatgctaatccctaagaagaaacaacccactacgatgggtgatctctgccaaatttcactttgtaatgtgctttataaagtgatctctaaagtgcttgcaaataggctacagatggtgcttccccacatcatctcagagaatcaatcagcctttatcccgtgtcgccttatctctaataatatcataattgcttttgaggtcatgcaatatctcaaacgcaagagaaaaggtaaagatgggtgtatggcgttgaaacttgacttaaggaaagcttatgatcaaattgaatggggctttcttcgagccatgtttgcttcgtatatgggctttgctaatcaatttgtagatttggttcttctcactgttacaattaactgtggagtacaatgtggttcatggtggtaagagtcttaggccaattattccacaacgaggtatctgccaaggcgaccccttgtctccgtatctatttctaattgatgcaaaaggattctcatctttattgaaacaatttgagagactcagtcatctaaaaggttgtaaaatgactaatggggctcctgttatttcacatatgctatttgctgatgatcgctatatctaccgtcatgttaatgaaagagaggcatctaatgtgatgagacttctacagttgtttgagatagcttcggggaagaattcaattttaataagtcctctattttctttagtgccaataccacagacacagtcaaacctagaatttttgctttgcttcatatggagattgca

SEQ ID NO: 68535 - DNA, 521 bp, Cannabis sativa
aatgtgtttgtctctcttgtggcttcttagttccttgaagttggtcactgttccactgttgtcatagtagagcaccagtggtttttctacttctggaactacttctagaatagtgtagaatttcttcaaccaaacctcttccttagccgattcacaaattgctatatattcggcttctacagttgaatctgcaattaatactagtttgcttaatcttggaccagggttattgatttggattggctcaattctttttggaccagtaagaactggttgttagaatttaaaagtgtggttaaaaaaatagggtaaagtgtgttagaatattttgtatatggtaacaaattaaataaaatatttgatttgatttataaaaatataattaattaaaatattctaattgtagtcatatttaattacttaatatttaagttatctaatttaattttcagaattaattgtcaaaatattttgacaattaattgtggcagagaccttggaaggtttcacctatataaata

SEQ ID NO: 68536 - DNA, 609 bp, Cannabis sativa
atacataaatttctattaatttaagccatgactgcataaaggatattagcaagtaagcctttaattagcctttacccggaaaaaaattgttgagaatggctcttcgaggcctactcacacacaacacatgacagggcaattgagattcaaaatggcaacattcctttgacctaagatatctctagtaacaagatgttcatgaatagcctactcacaccacacatgacacagcttcaccataatccaacaccttctctttgatgaaaatgccccttattagttttatgagttttttttctttttttctaatatcaactaatatcaaacttagactcataaaaccaaaaatcttggcgcccttcgagtagtagatgttattaatctatttcacccacaaaacatcttgcttagaagctatagccaaaatgtacctagccattgaggccttatttcattgaataccatctcagaatctcagccctccatagcacttggtatgcaaattaagtaacaggaagaaacatcacaaaactataaaattgtaaataaaaaataatcataaaaatatttaaaaaaaaaaaaatcaatttttaattatgttgtgtgaat

SEQ ID NO: 68537 - DNA, 1148 bp, Cannabis sativa
gggtcacaaaacctaaaaaatattgaccagacatttataataaaattataatactaggtgagaaaaattctttttgaacaaaagaagaattttattcagaagacaagcaataaatacaaacaaaagccaactgcacaaaacaaccgctccaagaaaagaaaactaccagctattttattttttacaatgaataaattcattaaaaatataataatgtcatataggttagttatgaatactacacttcatcaaataaatactatttttgtcaggataatcaaaataatactatacacccaacaaaaaataaggatattcatatctagctaaacaagttaattacattccatatacaaatctttcactttcaaattgtttaagcaaaggctaagaaaccgatattttatagcaagtttaatttccctgctcacagaagcaggaacattgcagtacaatttaaaactacaacagtttatattctgccacaggaagtaaatgacaacagtcattatagaattcataagtttgtcctgcaatctgttcatagaatttgaacacaaatccttccattgtgtgaaatcaatcggccagtaagtcagaccaaaccagttgctaatttcaaccatcacctttttggcaaacaaatccaaacaacaacaatactagaaagaaagaatgaaaaataataatataagagtaaagaaagtctaacttcgatacgaaaagagtttaccttgtattaggatacaagggatagttagttaggagatagtcagttagacagttattactgttttctgttgtttctgttattgatttctttcttcttctcttgtattcctactcaattgtacatatataaatagtagagcctcaacgccaatcactttgattgagcttttccactttttcacttgtccatcttctctctactgctctttctttaactctatttttcacagagtctttcatggtattagagccatgtctgaaccaccaagacccaccccacctgaaccagaaagaagacaacaacaacaaccaaatgtccaagcacagattgccttccccaacaacaatctgcttccattaaacctgaggttggatcgcactaattacacaatatggaggtctctcgtattggcagg

SEQ ID NO: 68538 - DNA, 590 bp, Cannabis sativa
aaaaatatttctatacaattcaaagaattaatattcaatatttatatataaatgagagacataaaacagtgacatgacactctaaaatctctctaaatagttttatttattctctctttaaatttcttatttttttttaaaattttttattaggtaagaaaaatatttatatacaattcaaaaaatcatattagctatataaataaattaacaaaatattccaaacctaaaaccatatttataattgcttgtttactcatatatatagctttaattgtataaaagttgcttatatttaattaactttgtttagggtggaaaaagagtttaccttcttattttctttctcttctcttctatgttcattaatttttggttttctctaggtaattagtagatcttattttattttaatgatatttccttccattatattatttctacatttcattgatattatttttatattatagttataagaaaattctacaaaaagaacacttcatttgtccccatatgatagtgacattttattagccattgattatgttaacttttgaatattttaactatcaatatatatatatata

SEQ ID NO: 68539 - DNA, 905 bp, Cannabis sativa
caaacaaatacattgttattaatttattgaaatttttgtaacaattaatacacattaaataagtttaaataagtaccttagtgataaataatgtagaagctacctagctagggagatcttaaaatggctctcgccgaaaaattgaccggcccgattccggcaatggttgttgatggaggaaagagctctctttagtgattgaggtgtttgggaattgagagagaattaaggttttatttttaattttttgggtttattggcttgtatgagaattgtgtgccattttatttttgaaggttttaggttgtggttggtgcctaacaccaaacccaacggccgttacatttatatatttaataaaagagaatattagttacaatggactaaacggctaacgtaagcaaaaacaatgcccataacatcaccgttagagattctagtttcaaatgaccaaaacaccccttgtgtcatttttttctttttggattatttcataaatatacaaaaatgataaaaattttacatttttacgaatctattgttttttttatatatatttatagttttctttatataaaattacggagtgttttttttttattgtttttgaaagaatattattcgttactgctacaggaaagtaacgtgatttatttttacaatagttcagagtgtttttactgttattttagaataatgttattttgaggttatcgttacgagaaagttacgtgaaagtaatatttttctttgagaaaaaaaataagtgaaaatttataaaaaaaaataataaaatgtaaaaaaatctgtaaaatataaaagaattatgtttttaagtgtatcgtgtaaaatttccattttttttttatagatttaaacacatttcattgtattttgttttagtg

SEQ ID NO: 68540 - DNA, 1123 bp, Cannabis sativa
gatttcccttttgatgactcacgcgatggaagctgaatttgctaagtgttggcatgctgcgcggattgcttactgctcggtctagaagactttgtccgagcgaatgtacgaggtgccttgttcagcctgtgtcttgggagcaggtacccagagtcgattccacgtgtcaccatcgtgtgatgccacgtctgagttcaaaaattgtgataacatttgcccccaagtctgtacgggatttccgaagttgcatgtagacttcatttgagctatctttgcatttggatgggtgacacgtgtcaggtgtctcttcagttttcggctaataaatgctctgacgcaattaatgcttcaaaatctgattttctctcaccacgtttgaaggttgcacttgattgcttttgatttccaatattcacttttggggggaaccgaggcgtccgagggtttttgaaatgattacccctttttcgtttttggcctataaatacggctaatcattgttcacaaacttattttcaccaaccttctttgttaagcaagtttagagcgaaaaagagaggtttttagcttcaagtttgttgaaatttttttacaaaaactgttcgttcagctttgcgtagactgaatccagtcgtcgatccttgagtaagttctcgatttcttttacttttactttgcacatttactttctgaatgcgactttaactttgctgtagaagatacgtagaaagccctaggttcagaaactttgcgattttcccttgcaatgatttatgcgacttcaccattcatgatgcttgctttctgactgcacaatgtctgtctttcatcttgcttattcaaagcttcatgaaatttttgccccgaaaatttcaagcttttgagttttgacttttcgtcgaatatttctattctttaatctgttgagtactcctggtcgccatatttgcatgtttactattcgatatcccgaccaaacactcatctcgcgtgttgtcttttgtagatgaacccaggtgagttttggagaatagaacaccgaatcgaccaggacttgcttcaactcttgcacgaggatcaccctcgtctttgttctagtccgccctcttcaagcgacggacat

SEQ ID NO: 68541 - DNA, 1206 bp, Cannabis sativa
ttccttgattattgctcagtgaacttgcaggattacttgctttaatttacttgttgtaagaattttaattctctaacttttggttgaaataaatccaaatgctgactgctagggttgattcagcccgtattgaatccttatgtgtataacctttttatcgcaatcttttgtactgttacctaaagcttttagggttttcctctatcatgcaccctaaaatccctcttttttagaaattcgaccaagaattaggttttaaaactaaaaatataaatgatttttaatcaaagacaatatgtcatctgttttttcttaataaccgacaatataacagactacgacgttggttattaaaaacagctgatgccttatagtctttgatttctaccaagactctcctgtgtcgtcgattaatatgaccacctacaacatctttttgaatagtgacgataccaatttttaccaaaattgatgccaaatgctccaaaaaattacctttaaagttcttttttgcagtagtgaaatcttattctggctgatgttatgcataaatgaattctcttagctctcggtccctttgagatcttcgctttttagtgatgtctctgagggtgttttcttaaaagaagaataagaaaaagaataaaaaaaaatcctattttattgcatgtaagtgagtttatatcgcttttgagaacaattagttgtcttttaaatattatgtcaagttggcaactttataaagttgtttttttcaaaaaataaaaatggggatccccaaagtttgaaagtgttaatgttatgttttaagttattattttattttgatagtaaatatttaattaaatcacattttttttattaaattataattaattattataaattaatttacaaaattatgtatgtagagtctctatgggttaaagtgttacactttatttacctcttaaggtaacaagttttgcttggagattatcctctagttggatccctcccataatcaatctttaaagatatggcctccttaatgacaatatttgcccaatgtgctccactgatttgaaaataactcatcatgctctttgagatagccaacgtgtgacagttcgacattttttctctttcagtcttggtgatccagttgccattgtgagtgacattcataatttcatttgcatttttattgaacatcttccttgcatg

SEQ ID NO: 68542 - DNA, 867 bp, Cannabis sativa
  modified_base (61)..(64): a, c, t, g, unknown or other
agaaactcctattgcaactagtgctgcaatcactttagaaactcaaactgtaaatttaaannnnaaaaattaaaaaacagtatatggagtaattctcttattttatatatgtttataagattggtttagatttatttaatatttcaaatccaatatatttttttggattgtattagatatattcattgtttaagatcaaattttattggactggattctaataaaaaaaatgtaaaataagatttaaagttgaaaataagattcaaatattttattgtacacgtactatatttttttatacacgtggtaaatgaataattgtataaattttattttcgatattataaattatttataatttttaaaaaatttatagataatcataataataactataatatatgtgattataaataaaaaaaaaaattatactaaaaaaaattattctaaaaagatattctggatgaaaaacaaatggagatgtataccaaaatattactttgaagtgtactacaaaattttcttaaaatttaactatattaaatgaataatagccaaaaatgctttcaaaagataataacgaaaattgatagggaaaagggtgttgtgtcttcatatccatacctaccttgagtggaggtggtttggagggtggtgcatcaatttttgtaaaatttgttgggcctaaaagaattgtatataggattgatttcatctcaaaattaattaacctttttttttttttaatagatgtgtctttaaattgtatttttacgttgcattgttaataagctagctttaagtggttcactcaaaactaattagtaatgaatgaagtaatctatattcttatatatatgggataaa

SEQ ID NO: 68543 - DNA, 1063 bp, Cannabis sativa
aacattcctccaaaccaaaccattcattaaaaaaaaaaagtgaatcagacttataaagactcatcacaagagatgagaaacgagaggaatgtgtttagatattacccagtttataaattgcaacaactgcccatttaagagatttttacttttctttaatatacatgaaaaaaaaatgaggaaaagggaacatttttgttatatataccttgcaaacaacgggccttttgcacttttagtaagccatttctagtttggtgagtacctccactctaatataaagaagaaagaaattgataaacaaattagtagcaaaattacggatattttgttgataataaataaaatcaattctatagttattatgtcttgcatatagatgaaattacatgtaactacaacattgcaaatgaaacacaacactgcagaaccacaaagaacgagaaaaaaaaaagattattatccacaaactaacccaatagcaaaaatttctaaaaatgaaagtacatattgaactttgactaatggaaattgaatttggaaccgatatcaaactatactcacaagtcacaactactcattgaaattgaagttattaggtgtaggttaggttatatgtatactgttgcaactattataaaagggtgcaatactcaaatggagacttttttgattcgttagttttttaatttttgttgttgttttgtcgttaaaactaagagaatgcgcaacaaaatttgttaaaccatacgatattactgtttaaaccatatgaataggtgcttattgtgaatagttgtgtgggaggatgcaactcttaaaatatgctattagtaattttatttttgttaaaattaactatttattagggaatattctgttaaaaaatatgccaatctgttaaatgcacaacaaaaatagttagataggcatttatataataggtaagatatggggttcatttatttttatactttaaattattattattatttttttatttttacaaaaatttccataaatatctattctatataaaatgtgcttatataacagaattctt

SEQ ID NO: 68544 - DNA, 716 bp, Cannabis sativa
aatttttgcgggtttttaatgggcggtttccatacgggcggattctaatgggttaggcggttcccacggtttagcggtttttatgttcaggcctagtggagccaactgagggtactctggctggctccaacactttttggtttatatttgaaaatggctcggtcagtaaacggattttggagcatggttcgtggtgcgtcaaaggtgaaatgctggtgctcctatcgtggtcattgggctttggagtcaaggaactagcttttaactcgatccggatccaaattcatttcctgcctcttgactactactcgagagtgaatgcaaaggtattgggggctttagcgggtaaagttgtgttcattgagcttgatgaaaccaagccggtcacttggaaacattggattcgggtgcaggtggaggtggatgttaacaggcccctctgctgtgattgttattttaaacttgccaatggagataataagtggattcaactcaagtatgaaaagctgggaggtttttgctacatgtgtggtatgctcggtcaccaatgcagggattgtagccttgcatctcccgtcacggtgcttaatgacagaggaactccgttccctctatttggaccatggctgaatacccattcaaactatgccagttgtttttctggtaaagtgggaggctcggctggggctgtggaagagtgttggaattattttacc

SEQ ID NO: 68545 - DNA, 590 bp, Cannabis sativa
accaaccctgtatgacctaaaagcggtgacaaccatctacgacctttgtctgaaattcacatcaaggcatggagtaggatgtttgaggggagaccaatagtctgcccatcattgttacaacttggccttgtgcaaagccaagaatgagaagatgcttgccaagagctatgaagaaaagcccagcaaagggcagttaagtccagcccaaagtagggacacaaccatagatcttcactttagggatcctacacatagctttagacttgtaaaagagctggaggaagtggaggttaatcccacttctctagcaagaagactaaagatgagggaaggtttaacaccagaaataaaattagcactgataaaatttctaagggcaaacctgaacctctttgcattgtcacatgtagacatggcctgaatagacccttatgttattactcatgccctcaacattgatcgaaacttctgactcgtacaacaaaaaaggaggttgttttacaaggaacatgcccaagtgctcaaagatgaggtcgaaaggctacattattgtgatttcatcaccaaggcattctatccactttgggtat

SEQ ID NO: 68546 - DNA, 606 bp, Cannabis sativa
gtcaaatgtgatggtggaaactgattgtgtcaatgtggtgcatgctatcaagagcaaagttcgtatgtattctccatacggcattgtaatccacaaatcaaaacttattttatcaaaattgtttaatgttttagttcattttgtaaagcaatctgcgaataatgtgacccacttcttagctagggactcttactctaaagctgattgcatgattagtgaggagtttgttcctgctaatttattgtcattacttttgaaaaacctttaattaatggaagcttctattttcgttcaaaaaaaaataaataaataagatatcatccataacatcccgtcttaattgaaaaatttattctaatatatgaacaaattaaaaccacaacataaagacaattcctttttaaagtaagatttcttctcctcttttgttcctttatttctttatttagctgatttattttgttttgtattattttgttttctttttcatttttttattttaataatggtgttgatgagggaggatagagatggaaattggtcggttaatgtacggggaatgcaatctccgcccccatccccgctacctatttctacccccatccc

SEQ ID NO: 68547 - DNA, 623 bp, Cannabis sativa
ttttttttttataagtgagggggcaaaaaaataaacctgaaaagaaaaaaaatgcatttaatgggattagaaccctagtcctccaacctatatgctaagtagtccattacaccaaagttaatattatatttataaatatcatcttttattagaaatacatgttgtaactaattaaattgcatatatatttttttcccgatttttttttcaaggcggcgactgccccgcctcggttatatgtgggtccgcctctgaatacaacaacaaatttttaattaataaaaaaactaaaaagcaccaaacaccacttgagatgtcatatcgttattaataaaattaaatatcagatcttacttaatttaatttaataattattatataatattattaactatttacgagacgtcatcttataatgatagtgttagacactaatactcaataacaaaattcttttaattaattgatgtaccaaaatttaggcatctacttgttaaataacgaagaaaaaaaataggcattacaaccccaagtcaaaaaatactaaagtcaacaattatattattattactagttactatttatattattattcaggagtattattattaattttttattat

SEQ ID NO: 68548 - DNA, 541 bp, Cannabis sativa
gaggttaaagatttaatatgtattgatgtaatatatataattaccatgtgcattattgcattgttttaatttattgtattattagataaaaaaattccaataatatataaacaaagtttctggattatataaattattattaaactttcaagactggaaaaaaaaaatatatgcaacaattcacacaaccataattaatttttacaacaagatcaacaatattcatttaatttttaattaggtgatgttaagtattaatatgtttaatttttataattaagtattatatagtttttgagatttttgaaatagggtttgagattttgattttttaaattttttttagctattattatattggtgtgtcgtttgaatgtgattacatatatgtatttcttaaatttaattttttttaattaggtaatatatttgataatggatatattataatttactatatgggttggattcgtaaatttgatataaatatttaattcaaagttaaactaataaatttaaaatatgattaaaaatatttata

SEQ ID NO: 68549 - DNA, 590 bp, Cannabis sativa
aatacaaataataatagatctaaatatatttcaaaagtactttaatataaaaaactataaatcatatcttatagagcctttgctagatcaaaaaagaagaacatatctaaacatattttaaaagtgcttcaatataaaaagttctaaatcttattttataaaacctttgctagatcaaaaaagaaaaatagagctaaatatatttcaaaagtgatttaatataaaaagttctaaatcatattttatagaacctttgctagataaaaaaaaaaagaatatgataataagatgagcaaagcactaactattttctctgatagggaaggagagaatcataaaccctagtgtttcttgaccactacttatttatagactcatcttaaaaatgagttttgagtatttataatttagcctttcgacaaattataaattaacttatggtatctacacattatttttcatgataatttagtatctttttgatacccataacataatttgtctcttaaatttgtattacactttataataatatatacattatacatatgtattcacaataaaaattttaatccagagtgagaaaggaa

SEQ ID NO: 68550 - DNA, 514 bp, Cannabis sativa
tgacattattattccaatttttcccacatgacgtgacatattcacgtgggcaagattgatgccatgtggagtatagcttatcaccaagaaggtcaagtcatcatgaacaacacatcaattgacgaggagttcaaatacttaagcgagataaagagataataaactagccaacttaaggagtctagccgaaccccctggctggccctattaccagcataggccagccaacctccagcaaaggaagggttggccagcttttccctttgcaagcagtttttgtgccttacagttttcagtctggacaatacttccagttacgtattaggcttcaaaaactcaagaaaataggagataaacttcagctatttaaatattcttgaggactaattaacatgttatttatttattactttaatatttaataaataggtgatatttcttcattttatgggatatcaacctatcatctcttgtaagctctcctatataaagagcactaaactaaacctaatct

SEQ ID NO: 68551 - DNA, 569 bp, Cannabis sativa
  modified_base (101)..(102): a, c, t, g, unknown or other
ccccagtcagcatctattcccagcacttcacagcctcaggaactaatatcttctaccatatttgcaagattggagcgtgttgagagggaacaacttgcttnnaagcaaggccagactgatattctgaaagggaaaacagagattatgggttacttgaagacccttttggcactcatgggagatccaagaaggcccaatgcagaggcagacccacatccagttcccgtctctctaagagatgagttcattcttcctaatgattacagacattatgatgtggaagatgtactccatacacctcagaatatgtcaatcacgtccattggagatacgcaagattcagaagtataagttttagagaccgttccaacaccggtggagaagagaccgaagaagaggcagaggtggtttgacgagtacaccgaaatgaagaagaagatgaatccatcgatagctcatgtgaatatttacccacttcggccctatgatgagaagctactgcatagtttcaaaattggttagtgagaaccatcggaaacaagtatccgagggacgtcttcaccagtgta

SEQ ID NO: 68552 - DNA, 1146 bp, Cannabis sativa
  modified_base (693)..(694): a, c, t, g, unknown or other
aaataagaaaaataaactctattaccacacaatataaagaaaaaaaggtaatgtgaaggaacgatggtaaataaatcccccttaatttataaggagttaaaaagatttgaaatacttatctgttataagtgaaaggtcgttgaagtagaaatcatgagcacaaaatgtatcacttctcttgcccattaaccataaaacaaaactaccctaaacaaatagggacaagctataataaatggcacaaaacgccataaaagacacataaactgtaaaaggcatcaaaactattaaaaaatagtgcaaaaacctgtgaggtctcacaaatactttaaacatataataataaaaatactatcataaatacttcaaaaacaatcaatataacatatgagggaaacaaattaaatgtactttgtgaaatttaaaattaatgctatcagcgaaacaaaatataagaaaagatttcacagtaagactaaataaattataaaaaaaatgtctttaataatatatataataaaatagaagttataaaatttgatataagacataaaattaaacaaaataggtataaaataagtagaaaaaatagaattaaggtaacttaattcttaaaagaaaaaaaaatgctaataaaagaaattatgaaataaatttacattaatacctaaatataattaaaataaaggctgnnataaattaatatataactaaaaagaaaaaaccataaataaaatacttaaatcataaagaataaaaattactaaaaaatgagctggcagaattaaataaggcctaaaaattgcataacaaaatgttatactttcaattaaaataataattctaagcatgcctaataattatactaaattataagaaatagattcagacatttcaaaaaattaatactaaatgaatatataaaaataataggaccaatgtccttataagctcaaaaactaataggatgaatatataaatatataatgctagtaaaatattaaataaaataaagaaaccctccaaaaaattatttgactttaccacactattaatacattatataattgatacgtggtattggtctctggatctgcatggtgtttacactgtaagggaggcctatcgcttgctacatcaggctga

SEQ ID NO: 68553 - DNA, 2029 bp, Cannabis sativa
agcaaagtcgcagatgaatctaccactccaactgcccctattgctcccaatgtttagcttctacacaactctttccaagattccagacttcgaattctcgatcctttgggcggaggcggttgagatggatgaggcttttcgagccatgtcacccacgcagactcaaggaggtggaggaaatcttttccccgagaatgctgatactgcgaacactgaagaagtcgtggacgaggctgccagcaaagtcgcagatgaatctaccactccaactgcccctattgctcccaatgcttagcttttactttaatattacttttgccaaactttcttaagcggtacaagggtactcgcaatttgtacttagacaaatttatgtttattttccttttgagcaacatatatcccctcggggatatttacttatataacttcttcgtagtacacgggtactcacattttttgtttatttatcatttcgattgcggtttaattactgcttggtgtaataaatactaaggtataaaaattttaaaacctcgaaaaaattcataactctttaatagattaagcaacagtacaaagtgagtgggttatatacaccctatacttagaatatttatgtagataaattgactaagtataaatacacagcgagtacaaacgatacaatacgagtactattgataatcaaattttaagctttcgccactccaggctcttcgaattacaattccatcgagttctgcaaatcggtatgttgcgttaccaattttttctgcgatgaggtatggttcttcccaattgtctccgaaaaccccatgtgctgggtttttcgtgtttggcattactttcaaagaaccaaatcgcctactcgcagaattctctccttgaccttacagttgaaatacagcgcggttcgctgctgataagccgcatttttcaggtgagcctgattgcatttttcttctaagaggtcgaggtgaaatgactatatctcttcgttctgtacaatgttaaaaacatctcttcctagggaaatttttccaacctcgactggtatcatggcctcgcatccatagaagtgcaagaaaggagtctcaccagtcgtggatcggggggtcgtgttgtatgaacataaaacttgtgaaaggtcttctagccatacccccttacattttcctttgatggtatgtttgattatcttgttgactgcttctatttgctcgttactctgcgggtaggcgactgctgagaatgcctttttaattcctaagtcatcgcacaactgtcgcatttccttacaatcaaatttctttccgttgtccgaaatgagcttgtaagggatgccaaatcgacagattatggaggtatagacaaactcgtgcagtttagctgctgtgatggtcgctagtgcctttccttcggcccatttggtaaagtagtcgaccgtgactatagcatatttgactctgcttttcccttcagcgattctcctatcaggttgatgccccagaccgcaaagggccaagggctcgtgatagaatgcaagtcactcggaggtttgttaacatacgtggctattcggtgacacttgttgcatttctttgcgaagttgaaggcatctttccgcagtgtgggccagtaatacccttgccgcatgatttttaaggcaagagaattaccaccagtatgattcccacagatacccccatgtacctcgcggagtatatagtcgcattcttccccgtcaatgcatttgagtagcggttgactgaaacttctgcgatataatcttccatcataaatgacatatcgggcagctggatgtcgcagttttcttgcttctattttgtcatcgagcaagatatccttttccaagtaagtgattatcagagtcatccaagtaacttttctagaaacatctatctccatcacttcatctcgactcaccgtcgggtgagttaacacatcaacatgaatcacatcgagcagttcagcttctctagttgaggctgttggaaattatttt

SEQ ID NO: 68554 - DNA, 1616 bp, Cannabis sativa
tgtatcatagtgcatgttacaaaattttatcgcctaacgactatacaaaataagccccgttatcccaaagaccgtacgctccaggcctaaccaccccaacgtgtacaatctccatttgctcgctctcacgagatcattccaacacgttcaactctttccttccacatcctctaagcaaagccttccaatattgatagtggaggattggctaccaaaacataacacacaattgaaggcttccgaaattcgattttatcttggatatcatcagtagtaattttaactttactagttgatgttgatgacttcgaaaatgaagttttcaggttgtgtttcacattaccaaaacgtaaaatgggggttggatatgttaccttaagctaacttctcagagcaacgattactggcttccacaaaatggacaaaatctttcctgatatcctcttgctgtttgatagatcgaagagacgacctaggcgagagaggctcagggaagaaattgaaaattgagtttttgctaatgttaataattattacaggaaaacaatcaaaaattaattgtaatagtctgtagctgcaagatgtaattccattactgcagaacacagttttacagaaataaaccagaactagaacaataaattcagcaaaaataaaaataaaagaaaaaaattaaatcacttgacacaagagatttatttatggtatcagtgttctttcgaacactcctagtccacggggccacgcctagagaaagaaatcaatcaggaaagtttcaaaaattacaaagacaattgacttatacaagtttagactctctctaaatctttgccgcaatcttttgtaacacacttcacgaatttgatttctaaataatcaccatcaagcagcgaactcccatcatcttttaggtgtgagttcttacttgctcccaatgtaaggcttgaacaagtattctctcgaagacctttctcttgttcaatcaagttgttcaaactaaccctaagaccaatataagaacaaatatacaaaaaaaaaaacctagatgaacaactaggttttcacaaaagaactctctcttcacaactgaaaatatgacaaaaaaaaaaagagctagaagagttgaaccgattagctactctataggttctatttattaaacataggaaccctagagacaaccacaaaattgattccatagctgttcatactttcctaaaagaaaattctgttttgcagcatcagaattagcttctgtagcaacaaactagactagaaaaggaaacttgccaaaaaggtgtctgatcattaactttgacttgatacctactaaaaacaatgagcttgatctaattttgtaaagacacaatcgaccacattaaagagaaatagcaatggtcaaagttttcatacaaaacaaactttccataaaagaatttcttctcttacaagaagtttcctaaataagaaaatggatagctaaaaattgattctttcctttgatagaaaagagtaataacacaatattaaggtgataaaatcggtttaattacacaaagaaatcacaccataaataataaatattttgacacctaaatttccaaaaaaggacttta

SEQ ID NO: 68555 - DNA, 602 bp, Cannabis sativa
tgttattattttgatatttaccagtatatatttaagcaaaagttttaattactcataattttcaataaactcgatgattagcaacgagctaaacaattaatacaaaatcacgatgacacgcctaaactagtagggtgttacagtcttactgagcacatccatggattctatcatcatgagattatcgaggctcatctcctttgtttggcattgtaaggattcattcacatggctaatttttggattcagctctaatattacatgttagaaatttatatgaatatgaaatatatgaacgattatagaaaatgcaaaatgaatcgaacatatatgcaatacgaagaaggaatcaaaatacctccaaccattgattctttgaaatttgatcccatgcaagctttgaatctataaaagaaaagaaaatttagttagtgtgggtattcgagctttcaagctctctctaactctcttagatgaatttattgtgtttcaaagaatgagtagtgagcttgtggaccggtaccctatatataggtgagatactctatctgtatctgtaccacaattaattgtcagaatattttgacaattaattaaaaaaa

SEQ ID NO: 68556 - DNA, 650 bp, Cannabis sativa
tcagcaaataaggtctcgatggtctcctcaagacggtcagaaacctcgagatccttagttagctcaattatcttcttctaggcagcaaacaacttcttgttggcttcacctaactccaaccgaacagcttcgagttctgccatggcgtcctcagcatccttcctgaccaagtccgcctccgcccttatagtgtcagacaaagccgtgttcctggaagcggcagacttagcccggttcatgtaatgggctagcatctccttccccttcttggcctctggaagcaccgggaaaggtggagtaggtgcccgcacccattcaggttcactcctaacaagctcatacccaacttttggtggtcaagacctgtccaagcttcctccgcgagaatccttggacttagcagtttttcgggtagtggggtttgtagcagttaactccttggaaagatcaatgaccaccccagtaggcctcatttccttagaagaggacccctcaccgcatttagacttcttggccagaggagaggcgctagagcttctgcccattctcttcttcgaagcgtcaagcatttgccgagacatgtctgtacagaaagaaaaacaacatggttagagataacagacatcaaaaacataaggcataaaagtcaa

SEQ ID NO: 68557 - DNA, 964 bp, Cannabis sativa
acgattcaaggcacgtgcaattgaacgaccaatgctggttttgcccaccccaggtggaccagagagacatatgattttccctgtgattgtcacaaattgaaaacacaaagcttaaaacaagttaagactggctcaaaaaaaaaaaacaatctaatccataacacgtggcctgtgggtgcaatgccattagaaaatcacatcaaccttgtgaggttcctctgagttttccaacagcaatgaattctaatattctttcttttacatcagtcaatccgtaatgatcttcatcaagaatcttttgtgcatgaaggacatcaaaattctcatcactgcaataaaaagtggtaaggcttaaaagaccattgaaaataaaaattgctacatacattaaaaagaaaaaacaataagcaaacccattatagatgtataaagcattacacttgacaattcatattttatcaaattttgatttagttcttatcaattttagtgcagacaaaacatgatacaagtaagaaattaaagcgcagtcaacagaactaattgagtgataagcagacctgaagtttccccaagggagtgcagtcaaccaatccaaatagttacgagtcacgttgaattcacttgaacttgcctctaacaactgtagttttgtaagctcttcttcaataacttgcaagacatgaggtgggcatttttccctgtttggttcaagcctttctctaaactttgctgcagcataatcgacaaaaaagtgtgaacgaaaatatctataaataatccatagccttactgggataaatgttttcaacttaaaaactaaagcacactgtaacagaaaattataatataatatatacacactagaaactgatatgaagtgaagaatagcatcatctattagcaatttatcaactttgccatgtttttcttccagacgtaggatgacaaacaaattactatg

SEQ ID NO: 68558 - DNA, 704 bp, Cannabis sativa
tttttttactaaaattagacaaatattcttaaatataataatttcaataatttaagaagaatttttaaagacaaaaaaaattaagagagcatgatatagacatgtcaaagtttagaggaaaaaattctaattaacttttttttttttaaagaacaaaaaaggaattgaaatgaaatgagtgacagctgatacgtgaagagagctcctatgtattgttttgagacccttcttgggctaaaaggctgaagcaagctcaacaaggctaaaaaagtgtgttgagaaactcaataaaactttccacagtgtttggttccccacgttttcctctaggcaatgaataaaaaggtactttagggtgttatgttaagatctttgtttagctttttgcatagagattccagctgggtttaattatcgtttttgacattacaaaaaaggcgagtatagaagaaaaagtagagggtacagactgtctaaggtttactacattacacaccctactactcactacactttaaaataaataaataaataaataaataatttaataaaaacaagcttcactttccttgtcatcatcaaaacaacacaagtagaaggcacaaggttcatcaaatctacaaaaggacaaccaaaataaaaatatcctattctgcttctttttcatatgttaatatattcattttccacattctcttgtcctt

SEQ ID NO: 68559 - DNA, 657 bp, Cannabis sativa
ttcaatacaaaattaaagacgttatttttaaattatagcgtcattttggatcatctctttagataattatgtagagtaaaaatcactttatggttatctggtaatttagaaattatatatatttgatagggaagccaaattaagattataattattggtagttaatttgtgtatatataatattaattgagagattatttatctattttcttttaggtttgtcttattattttttttatatggtcaaaaataattttaaaagttttgttataatttgtatgagttcacaagttttgttataattttttatacggtcaaaactggtttcacaaagtttgaaattgatttttacacttatattttatttttagatttttattgtgcattgtgtattgttttaattatatttgtgagtatttttgtgtgtgtgtgtgtgtttttttttttcatttggctgactaataaaattagtttctgttattatttatgttttgttatgatttttataagatcgaaactggtttcatagggtttatcagtttgaaaatagtttcacaggattcacagattttgaaagttttgtaatggggttttatttacttgctttacataattggtttttgagttcattttcaaaggcatataataaatgagggt

SEQ ID NO: 68560 - DNA, 738 bp, Cannabis sativa
tgacgaacaatttatgctgtattttgttccccacctcccttgttggagcagcgagtagctggtttaacaagtttactcatcgttcaataacttctggggagcagctgtctaggaatttcaagaacagttccaagctgctagggatagacgacacaaaatggcctcgctatccaatataaagtactagcccggtgaaacacttaaggcgtacttaagtcgttttagcacggctgcggctagggttaggaatctggataatagcgcgcaacttacagcccttcacgcggggatctctactgatccattagccgcaaggggggagttgtgtgatgactcacaaggacgtccagtgagaagcatcactgagttcaacaaaagggctcaggtgttcgttcggaaagaagaagcccgaaaggaaatgaatctgttgaaaacaagctcaggaagcaaacccagtaatgtttcaacaggtactgtttccacaagaagtgataactcggaggcttttagttcgaatggaaaggatagagttaaggagccatcgaaggataaaaagaaacagaagaagcatgataagtatgtgctggtgtatactatttataccgagcttagtgaaactcgagagaatatttacctcacacgtgagcagaaggtagccttcggcaagcccgagcccatgaggaattcgaggagcaagaaagatcctaacaaatgttataaattccataaggatattgg

SEQ ID NO: 68561 - DNA, 2110 bp, Cannabis sativa
caaagcatttggtaaaaataaaactaacacagtagcacgatgaataaatagaggatgaaattcattaaagataacaaaagcacgtaaaatcaggattaaaggctgcccagtcagcctgttgtttgaaaaatgacaaataattccaagtttaaagaccgcttggccggtcactttgtcttaaaaaaggccttatcgccagacacatatatataaaaaaagaagcattcagacggctggagtcccaggctctttgtacgggtcttcagggccagcaggagctagaggatctgttgtctgagcgggggccatgtcaacgttcttgccagaggtagaagtggtcgcctcagattctccataagccacttgagaagcgcaatactcgagaaacatgtctttggaatcgcccaagtaattaaagtttgccttgggattagccttccagaaatcataaaaaacctcaagacctactgtctctaaggcatttaccttccctctgagccttgccacctcagctctctgtggctcgcctttgcctggtgctcctcaaccttagctctccgctactcggcctcagccttgtacttctcaacttccgctacaagctccacttccttggacttcttctctgcttccaacctgggaaaaatagttcgaagaacttccctttcttcttggagactgttcacttcttttgacaaggaggcaatggcagcttcaagttgatcaaaagcctagaggtctttagtcagctcggccaccttctttttggcagcaagaagttttttgttgacttcacctagctccattcggacggctccaagctgaaccttggtgtcattagcatcctttctagccaagtccacttctgccctcatggtgttggacatagcagcgttcttggaggcagccgacttagctcgggaataagcataagccatcttcagactggtctgcacaaagaaaaaacattagaatctaagccaagtaaagaaggataaaaggaaactatcaggaaagacttaccctcgtaaactccttcaagactcctcccatcactagcttcagagacatgtcattgtcagctccggccagttgctcattcacctcagggaccgatcaagtcatgtagtgggtgaccatatctttgcctctcatagtctctggatgcagtactggaggtggggtaggagcccggatctgctcagatccactcttgactagctcggattcgccctttgactgcttgggcttgtccgagctccctcctcaagagtctttggacttacttattttcggagcagaagggtccacgatggttggctcctcagaaagatcaataactgcttcggccggtgtgctctctctagacagagttgtctcaccgactctggacttcttggtcagaggagacaagctcgagctccctcccactctcttcttcagagattcgagcattttctgagacatgtctggatgaaataaaagcaacataattaaggaaaagcactagaagtatgaaagcataataataaggaaagataaaggcaagatgaagtatcttacactttgacagaagcatctgcccaagcaagacctgatgagtcatcatcatcagatgagtctctttgctcctccaggacgactttccccttttctactacaggagtggatggccaagcaggtagactgggctccctgatctaaattgtatgttcgataggcctttgctcggccgaaagtttcttcttccttttgagcggagtcacctgctcttcctcctaagcatactgcttggctccctcacctcccttcaacttagcttcacgcttgagttgaatgagttcattctcttgatgagctccctcaatccggccagtgctggatttcctcttcttctccttcacaggctggggaatgaaatccttcgggtagagcccgtactccacaaagttgtcctccaggtcaacaaaatgatattccaggcagcacccgatagctgagcgattctttaacctctatccctaagagcaagtgtgaagggtggacggtgatatatagggatctgctggaaccgagtgtaggtggtgcccatgccatccaccatgtaata

SEQ ID NO: 68562 - DNA, 777 bp, Cannabis sativa
ttaaaaatataaattttgtaaaaaaataatactttattcatttatttttgctttacttgactttgtgggtgaattattagctaattttcacgagaagaatacaaataaagaaaaatagtacaagtacgatgatatatagtcaattattattactaaaattaatatcatttaataattcattataacgtgttgtttggttggcattgttttattaaagttatagtctaataaaaaaattaaggttttcaaattcagcttggcctaataattcccatctccatattttatgataggctaccaattgcttaatagtccatcgctctattatattaagttactagtaagagcacaaaataaatcagacaataataatatttgaaatgtacacaaaataataaacatatttgagtttttcttaactgaaattgacgaatgcgtgttctccggcaaaattattgataaaaataccatccaattcaatctagataaaaactatattatgaaattcttcatcaagctagttagtatttaataaatttgtctcttgctataagatcaaaattttacaaagacttgcgtcaagtcaagagtcaactttaaaaatatagtcatagcaagtagttggagcttataatgttccttcactttcactttccgtacttatttcgtatatctttctaagaaaatttttaatttaacatcaatggaatggagttgtttgtacatatacatatacatatatatatagggatatgattttgtcccgtgatgtacttt

SEQ ID NO: 68563 - DNA, 598 bp, Cannabis sativa
attgggtaattaaagacctggaactgaaactggatagttttcagaggctccctgcgggagccagagagtggaggaaggaatgtgaaattaggaaatcgctgaatgaaatgttgacccgaaaagcgctttactggaagcagcgagctaggatcacttggctcaaggaaggtgatagatgctcgaaattctttttcctctcggcagcaataagaggaaggagaaatgccattgagagtattttgaacaagaacaatgtctggatcacatatagagatgctattggccttgaatttaccgagttcttcaagagtatctttgagggatcagacattgaccaaagcctggattgcaagaggttgtttcaggaaaggatttcccttgaggaccaagaggggtctcttctttgcccctctcgagatgaaataaagaatactttgtttgctatgaatattcataaggctccaggaccggatggaatgtcagtactctttttcaaacattactgggagtctgtgggagacgatttctgtgacgcagtttctgattcttcaggaatggttatatgcataaaggtataaatactacgaatgtagttctt

SEQ ID NO: 68564 - DNA, 2192 bp, Cannabis sativa
  modified_base (2153)..(2154): a, c, t, g, unknown or other
atgtggaccatgcaacataaaatgcagtttatgatctttattaattagtatatctgattatagtgaaatggattttatttagggcacaaaacccaacagggccctgtcatttacaagatgtttacgtgtcgttccaacggttggtaggccaacgaactgcactcaacattgacctgtgctcatgaactggagaagattgtcactattgcggggattaaaccctccggttcgagagtttaccatcgtcttcccagggatgaggagacgccaaaccccaactataacggcttcggggcatggagtcagactcacctgatgtctggagccatgctccctctccaggactatttcatcgactttttcatctttgtcagactttcaccttaccaattggttctgcaagcctatcgcctgttatcaatcttgtttattttttatgtagccaagaactggctctgcccagcctgtagaaatcttatacttttatgaacttctttcagtcccctaaaaggaggacaaatttaaagatggtttatataaacttcaagcccatctagctaatggaaccctggtaccctttaacttctaaaagaatgtaaaggagtatcgtaacaaatttttcttctcctccgggttcaaagtttttgagcgcccagacctgctgacgaactgggtcaggattccccccatgcaacgtatcgcccccacccaacttttcctgaaccacgcgcaagtgtttgctggttacaggaaggaagacttgaacgtgggagacctggtcatgacagttaactgtaggagggccgagttgatcttggagaatcaatctcttgatgacttcaacttgtccaaggtcctctgccccaacgtctggaaccctgggagtgagaaggcactcagggaagatattatcttgtccgcaaaggatagatacaacaggtacagatacaaaagagagcaagagctcacattcactcgggtgcaagctacctccagaagggtatcctgacaggaggcaagaaaaaagaaaactccagtccagcccaaatttccattcccagttcctaactctagagccctcggtgcaagtacctcctaagcctgtaagtctcattcgaacattcttttcgttccttctatccaagactatgctgacttaaggccagtggaatttgataaaagattatatagttttcggatgccccattctcggtgggatgataatgccaaaagtttttatttctctaatttaagtcattacttgggtcggtcccggatgggctctggtcctgctatactaattcttttggatcattcctcctatatgatttcgagttggttccttcctcggatagctttttaggggatgacgacaccaaccttttaatttgtaaatttgctacggcagaattagatcaccagggtaggactagtcttattgtactatacttgcatatgtgctttttgggtgtcattctgatttcttttttactttacacagagaaaccactggaagatcttttagatgcccttgccaaaactacagcctcgagctagatatgccgaagcaccccagggtaagtgtaactccgagggaacctactgtcgaagctctcgggaaccaggaggtggtccttatagacaaagaagaagaagtagtagttcttcatcttgacaggaagcgtaagggtgtcgtcaccgagccaaagccttcgaagaagatgaagagggttgacacccacggccttagcactgatttgaggattccttctaaagttgatgagtatcccgcgcctccccacattattctgactcctgctcacccggacgaagaaagggttcaactccgcattgccaagcataattatactgtgggggaattatccaggggagacactgaagcggaggccccgaagaagaggctgatggaggcccaatatgggccttttcaaggcgaatatgctggggacatttgggacttaaatttggatcccttgacggactggtttaaacgcttcgtggggactaatttggcttcgttagcctcagaaatggtgagtcatttttgctaatttgacccaacttctcaccaagagatatgcggcatgcgttgttggaaattattttaccaggatcatagatctactcacaannatgtttattaacatcctaaataaaaactttctaaaacg

SEQ ID NO: 68565 - DNA, 1436 bp, Cannabis sativa
ataatttttattttatgatattaaataataaattgtatcaaattttaattttattaatttttcatataattttatataaaaaaaatagtatacattttaaaggtcgtgaccaacaaagtcgataaacaagaattgtttgtgtctgaatagaatgtacgtaaatgtgaaaattatgtagctaagttattgttatcagtgatatttttgtttttaattatttattttaatttttaattaattaattaattaatatttataaacttaataaaaaaaaaattaaacatgagagaattgaagaaagaatagataaatgtatttaaaataattttatgatgttatgtcgtcgtcttatacctaaactttatatatatatatatatatatatatagatcttttgctaaactacaattaataataagataaataacatcataagtatatatatttaaaattttaagtttgaaagcactacaaatctaacatttatttttagcatcataagtattcattgtataaaattataatttttctcaattttcgttagactccattttgaatttattaaaataaaatttggaaatgtttctgtctagactcaatgatctaaaaatgtgtgccctatatgaaaagaagaaatattatatgtatacattaattattttaatatattttatttattttaaacatataatataaatatatttttacacatattcccatataaaagtaaaattaaaactctaaacaattaataaaatatatctagaataatattctataaatatagaacatgaatggtgaatttttttttttttaaaaaaaaaaactctaaaatatatgtttagagcatctcatgtagcatgtttttcgtttaattatttaaatattttaaaaattctctattttaaagcatttgatgtgagtgatctaacaaattaaaggcaaattagagttccattttcttagtaattacactagaacatatatttttatttatttatttttctttttataattaatttataagtattattgttattggataccaatggtgcttaacacttcacgattgattagcgatattttttaaaggttattttcttaagttatataagacaaaatacctataattacactagtacgtagcaatataataccgagaagggtacaagcaaccaataatactttttaacaattgtcttaatttattgtgctttctgttaaaattaatcacatcttttactgaataataattacatcattaattagagatgtgtcagatgtgtcgtagctttatccgtacgattagtgcatgttgcaaattatctcaaaacaaattattaataatgattaattaatattttttcttttaaaaaattatttaatttaaatgtttattaatttcttttttctttttgaaattaaactcttattaa

SEQ ID NO: 68566 - DNA, 1151 bp, Cannabis sativa
ttttttgaaaaccgtaaaaatataaaaaaaatattctttgaacgtaaaaatataaatattttacaaaaaatagtgcattatgtaattatttctttttaaaacatacagtgatttttaattatatacgtaaatctgtaaataagtatacaaataaccttagtttaataattccaataaataccactccttatgccgaaatcaaatgtttggctatttgaattttaagttttttttttttcgtctctttttgggtgagcaattctcaatgctctatctttttttttttctttaattcttttgtctgactcttatgtgtattcctctattttcttttataaaaattatttacctctttaatgatgtcttactctttgtcttgttattgttatattattttttttttttttaaaaaaaatatttatctactatcttaatttataaagaaaattttagctacttgcaagatgtctctaaattttataagaaatgtctctaaataaacttattttatgaaacaattttaatatatttttttaaactatttatacggatcttaatagtatcttaaatattatggaatcaattacataagaaaaatttgtctttaggtaacactatgttatcttttgttcaaaaaaaaaaaaaatgttttcttttgtttaagatgcttttacacatctttttttagcaatatttttgttaccttaaaaaattattagcttattaataaatttagtatatgtataataattttcaaaatgtaatcaattttatttatgtttagaatattatttggtaacttcttataatgtaacattctatgtgtttaaaatactatttggttattttataactttttaaccacattattttttttttaaatataccatttggtaactttaatgcaaaaacaaccaaaaattgaaactaatgtattctgttggtttgtatattagtttttctttaagttgaaaatttgtttccttttcttaacaaatattttttctaaaacaaaagcctaaatgacttttgatgaaagtagttataagatattttctagtaactcacaagattgattgctaactaaattttatttgagctacaagtttaatcatttttttttgtaataattagaaaagaaattaaaatat

SEQ ID NO: 68567 - DNA, 1597 bp, Cannabis sativa
tgagaaaaattttataacatcgctgtgagaacctcacatatggaggactttgtaaaactgactcaagggacaatgtctgtggtcgaatacactcgggagtttgattggctgtccaaatttgctggtgatctagtgcctacagatttcaccagaaaacaaaatatgtgagagaactgaatgccacaattagttgggacttgaaaattaccactactcatgatactttatacaagaaagtggtagagctagccttaattgcagaggaggctgagcaacatgtaacaaagggtcagactgcaaaggatgcctccacggcgttgaatcctcctataagtggtaatatcagtaaggggaccgatggtggtaaccctgatcacaaacagaaggctaatgctttcagaacattagggggtaatagaaagttatggggcaatataggtggtcgtcagggctacggatctttattgagatcttatcctaagtgtctgaaatgcaagaaacactaagacttgtttccagtgtgggatggtgggccactttatcagagattttcctcaagccaagaaagaggagccgaagaaaaatacttcttagaacccgggacaactttttaccatgactcaagctgacactgatgctagtccgtcagtggtgacaagtaagttatctatacatggttgttcctatactgtattgtttgacttgggagctactcattcctatgtgttgagagagtaattgaaagttttcataaccatgtgatgtatatgctttgggtttggtaccctgttaccttcaagagaccttatagtatccactaggtggattcggtctttgtctttctagattgacggttgtcaattaaccgccaatctaatagagctgcaactgtctaattttcatataatccttggaatggattttctgtcaaagtatgggtcaacgatcgactacaagcggaagatggtggtgtttgagcccgatagagctaacccgatagtgtttgtgggtaaagtttagggaacacgcataccaaggataacacttttgaaagctaaagatatgatgagtagagcttgtctgggattcatagtcactgcagtggataccagccaacctgtgacatctaggcctgagaatacaagattgttatgcgagttcattgacatttttctacaagatctactgggattgccacctacccgagagattgaatttgtgagttagttccgagagcggaaccagtatcaaaagcaccatatcggatggctccagcggaattgaaagagttaaagatcaagttgcaagagttgttgaagctggggttcattagaccaagttactctcttaggggtgcttcggttttgtttgtaaaaaaaaaaagatgggtcgctttgaataggtattgattaccgggagttaaacaagtttaccatcaagaacaagtatcttttgcctttaattgatgatctttttgatcaactgatgggggaagacggtcttctctaagattgatctttgctcattctatcatcaactgaaattttgagaggaagatatcccaaaaactgcattccgtactcggtatggacattat

SEQ ID NO: 68568 - DNA, 2058 bp, Cannabis sativa
tgcgctggtaaaagttagattttatccactccgaatgtacactggtaaaactatgaccttattgccagtgcagtttgcgaaatgtgcttgtaaaagttacttttaccagcacagtagcgaactgtgctggtaaaagtgacatttcagtgtgtaatttaattgaacatagtggtgcctaacactttttaaggttgttattccaagttggtagaactactctcatccaatcagtagttgtaagtatctctgtctgcatgtctactttctttctttttaagagtatctgtgacgatttggaccaggcaatgcggaagttctggtgggttggttgctctgataagactcgcttcctggctctggctagttgggatttgatctgcaagccgaaagaatttggggatcttggcatcaaaaaattctcgggccttactaatttaatttttttttcttgattttcttgcttgaaaaaataaaaattatttggtcataagccagcgcccaccgacctaagctagctaaataaatatataaatatatatggttgaaattaacatataaaatattagtaatttcgtatttgaaggaagatttatatgatcaattttttatattattttagactagaatttatatttttttagattaacataaataaaattatagccacaaattttttaataataaactatttgatgaaatactattatttcttccaaattctaaaaaataaaataggattttattagtgacactaacattataattagtatatataaaaatataaaaacttccttaaaatttgatgctataagaaattcatatgtctaatataatattcatcaattaatgccattctttagtatttgaaaagaaattaaatcaaaggaatagtccataatatacatcgatcctagctgtttaattaaggatggccatgtattaaaataatctatttatatatatgcattttctgatgaatcaatcatctttagaccgcatattttttctttttttaaaaaaatacttttacactttgtatttttttaataataccaaaaagttaaattagagttattgacccaatttttatcaaaaaatatatttttaaatatgattataatttttcgtctaactaaggttttggcacagtttttgaaaaagttaaagttgttttttaaaaaaattgtgataaaatgtgtttggtaaacagtcaaaaaatagttttttgaaattttttttagagaaaccacagctaataactaaactgcttaacccagcttttaaaaaaatctgttttgattaaatctcttatttttttaaaagaaaattaatttttattttattttaatattaacaaataacattaatttagaatttttcttatatacttggttttctaatttctttttgtacatttgataaaacataacataaaaatatatactataaattatttttatcaaatacatataaatttatatttaaaaaaattaaaaatatataaaaaataaaatattatataaaataaatttttatatatgtgtgattataataaattagattataattttattattatcattataataaatcttaacaactcacactactttaaaatttataatttattaaacactcagcttatctttttttacagttctgttgcagctgttttttttttcacagcacaattacaattattttttcccacaacacaactatgcacaactgaccctaaatgttcaagcttttcgatgatttctttcttaggggaataacacatgataatactcatcagatttagttatattttagaaaaaaaaaaaaatatgttcaaattaatgcatatatattttaattttttacaatttaaaaacttcaatattttttttttaaaatacaaaatatatataaacgagtaataatgatgcaaaacaaattaaatttttaaaattgtatataatgaaacccatttttttacataggaaataaaccaacaaatggggactaatttgatcacaatttttgcttcctttttttctttctttaatttgcttt

SEQ ID NO: 68569 - DNA, 522 bp, Cannabis sativa
ttgtgtattgctgagatgggggaggtgatggtggggggtcgggtccgcctggggtggtgtgcgaatggtggaggcggagttgaaatgggttcttcggacagaggcggtggtcgaatggggtgcggctgtggggtgcggtcggggttgtacggtggtgagcggatggtggaggccgaatggggttcgaatggggttcggtggtcgggttctggctgggacagaggcggctgggagttgtttctgggtagggtttcgaaggtgggggctgggcttcgaaggttttctgggttgggggggaaaggtcgggttagggaaatgttttgaaattaaatttttttttttttttgtaatactatataatataataaatataatattaataaaaaaaaaaataaattctgtttgttttttttttttttttttaatgcaaaaataaaatatatagtaaaataaaaacaatattaatatataattttgttttttttttttttttttataataggatagattaaaagaaaaata

SEQ ID NO: 68570 - DNA, 971 bp, Cannabis sativa
tggactacatgagatcactgctcacacacgtatggagattcaagtcttagtgatcccatgagtatcattgtggatgggtgtgctgaaatgatatgctgctcagggtgtgcatttttttaatactcagaggctttattgatgttcattgatcagttgttacctatttttttctaaatttttgagtatctctaagtgtatatttttttatctgatgtgtcaagtgtgggttgtgtgcatatattgttggcatatttaaaatttttcaggtcactatactactcttagtacctgatgactttgggtttgtttcgtattgtgtgccgtaatatgtgctggagttattcactttgggcgtgtacattttttttggcaaagatcaaataaaataaaaaactcatcattatttttctttgcttggtcagctggtgtcagggtgcctatacttaaggcctaaggaaagtgaatagtctagctctttcagtttactctcagaaaccctatgtcctgtaacattcacaactctctctctaaaatggagaataccactcccattgcagtaacccttgttgccatgttcgttccatcagtgtcaaatactgttgatcctgcagtcgaatatacagtcgagactaatatgtctaatctctgtcgtgatatcgtcctttaccaatcggaggttggtggttctacttgccattcgagtcctaagtcgagtccctctccggattcatcgccaatcattcagaaacctcgtacgtttcaaggtaagactcctcccctgtctaaaagggctagtccttctctgtcatcaccccctccgtttgtgtcaaaacgagtcactcgttcatcgtagagtctacagcctcaatccaaagccataggacctccttgtcctccatctaagggttccataccttcccaaaccagtgaaagggttcagtcaaaaggaaagtcctcacgtgataccacgt

SEQ ID NO: 68571 - DNA, 893 bp, Cannabis sativa
ctcatcaatcgcctaccaaccccggttttacaaaataaatccctatctgagtacctatttggtcaacctcctaattacaatattttaaaaccgtttggttgctcttgttttccccatttaaggtcttacaacaatcacaaaatggagttgagatcacaagagtgcatcattcttgggtattcttcaatgcacaaaggatatctttgtgaaaatcccgcgggcaggttgtttataagtcgacatgtggtctttaatgaaaacccaagtcatacatggccactaagcatccgttacctgaatcaacattgccaactgaaccaaagtcacttaaggctgctcttgctgatcctaaatggaatggtgcaatgaactcagaaattgttgctctacatcaagcaaatacctggaaattggtgcccctgcagataacatgaatataatcgcctgtaaatgggttcatcgagtaaagttaaacaaatatggttctctaaatcgatacaagtctcgacttgttgccaaaggatatctggaagaagctggaatagactttgatgaaacttttagtccagttgttaagccaacaactgttcgaactgttttgtccttggctgtttcaaacaattggaatgtttctcagtttgatgtcacaaatgcatttcttaatggtcctttaactgagacagtttacatgagccaacctccggggtttgaaggcaaggaccatcctacctatgtttgcaagttacaaaaggcaatttatggcctcaaacaagcgcctcgcgcttggaatgacaagctacggcagacacttgtctcatgggggtttcaaggatcacgtgcagacagatctctgtttgtatatggttccagagctaatcttgttatttttctgg

SEQ ID NO: 68572 - DNA, 1061 bp, Cannabis sativa
tatttagagaaagtttggaagaacttggaaagattcgattactttaaaatcaaacaaattctgagagaacaaaatccaacgccaacgccttagcagaactggcctcgcagaatgacaagtatatgtgaaactaaagacgtcaagatgatagatcacgctcctacatggatgactcctactgtaaattatttactcgatggaaaattccgaatgacaaaaacgaggcacaaaaactattgtattcagtgcctcgttacacatttatcgaaggcaaactatatagaagagggtattcaatgcccctacttcagtgtgttctgcctacataagcaaatgaaatcataaaagaaattcatgaaggcttctgtggggatcatgcgggctgcaaaagcctgtctaaaaaaaatcattagacaaagatattactggccaacgatcaataaggacacaaacgagtttgtcaagaaatgtgataggtgttagaggtttcacatatacctcgcataccgccaacagaacttagaatgatgacctcgccctacccatttgctatatggggtattgacttaattggggcattaccaactgggcgaggacgagctaagttgttgtagtagcagtcgacttcttcactaaatggacggaggtcgagcccctcgtttccctaacctgcaaaaaagtccttgagtttgtcgtcaagaaaattatatgaaggtttggaattcccatgaagatcgtatccgataatggaacccaatttgatgaggacttgttcactgaattctgcgagaggaataaaattatcaaaatcgtctcgtcagtatcagaggctcaggcaaatgaacaagtgtaagttgttaataaaaccttaaaaggatactatcaagaagaagctagacactgccaaaggcagatgggttgaagagctaccttaggtactctaggcccaccgaactaccgagaagacagctatgtgacacactccattctcgctagcattttgcttggaagcaatgctgcttgttaaagagaacatatcgactcacagaagagagttttat

SEQ ID NO: 68573 - DNA, 884 bp, Cannabis sativa
tcttcttcttcttctttttcttctgccattctcaccatgctcgtaaatcaccactgcctcttccacctccgaaatcccattcctattttcattttgctccaaaacatcatctgtggattcacgaccatacttctcttcgctcttctttatcgaaaaactcaccgacaagaagaacccacaactctccccacctctcaacccctcaaaacgcaccatttttcggtgatgaccacctcgataagcacaagaaaccgagacggagtccaaactcggatctaaatccgaatcaaaacgagtctttaacgtaatgaaggaaacgagggaaggaggaagagagtaagaagggtcgacgaataagccttctctagggaagaaacaatgggaggggtgaaagttgatcaagtgggaaaggagatgggtattctctgttgagtttggcattgtgaataaacaacgtcgtaattgagatataacggtaataggttatgagactgagacatgagaaggagaagggtatggttttttttttttttatgtagagagagaaagcttgaagagaaagagagaatggaataatattaattaaaaaaaaaagccaacaatgttttgagagtgactcaaggtagagacaagttgctcaatgaagatgaagatttgggttcctcatcttcttcttcttcctagctttcatcgccaagagaagagaagagaggcaaagaggtttctctctcttctgttttttattggtttcagtggtgatggtggtttcaggggtggatttagggattttggggttctgattgtagtaatggcagaagaagaagtagaagaaggggttctatcgagattcgagaagaaagagaaagaaaaagaaaaagagaaaa

SEQ ID NO: 68574 - DNA, 854 bp, Cannabis sativa
caaccagaagctcattgaattcgtatttgtttgagacattagatggtggtggagggtatgactttccagccaaaatgtgattatcgatgggttatcgatactttatcgatagtttatcaatggttttgtttttgtactgctatttttatgcgcaaataacctatcaataatctatcggcaacctatcgataaatgaggaggtccaaccggtcttgggcctctgggtttttgggtagatgaggaggttcagtggtggaggaacgaaagttcggtggtggtggttggagtttcggtgcctgggtctagttggtctcggtggtgcgaggaagaggaagagagaatgaggaagagaaaaagacagagagagaaggaaaacaaaaggaatggtattttggttaaaaattgaaaacaatagtatttaattgtataaattaattaatagtttaaattttgttaaaaagtatttttttaagcatttaaaataaaattttcctatgttatttgtatatgcacataatattactcaaaatttaaattaaaacttttgttaaaaccaatcaatctcattagttacccaacacatcatataaaatttgaaaaaaaaaataaataaacagcaaaaatccttacaatacgttattgaatttgaaagtaccaaaaatgtactagcaattataccaaaagtatccctagataagaatttatataatcatatcgtatataatcgtgctatcatgtcatgttgtgtgatgtattgattaatgaaatatttgcaccaataactattattattaaattatttaagaatttacccttagttattttaatacttaaaattcaggtaattctttttg

SEQ ID NO: 68575 - DNA, 1330 bp, Cannabis sativa
gaaggactaaatttctgcaaatgtaatattttagagagaatttttaacaaactgtatatttcaaaagacaaaattaatattgtcaaaagttcaactgaaagttatttagataacgacttcacaacacattttaaagtttgaggaaaaaaaaaaaagaagacaaaataacatcattcatattaatttgttttttttgttcttagaaaaataatcattgatattcctgtttagcaatattattgttactgatctcagtttatcttctgtacattattgcattattttttatctatttatcttgttaatatatgtgaaagctcatcacatgtgtataataataattgattatttaagatttgattgttctccaaattataatctatctattattgcagtacttataatttataaatttcttttcagtttgttaaaaataatcctggaattatttttgttttgttaagcattgtcataattgacataaaatgtaaacttaaatgttttaaaccattgaaggacatcccaagccaattggttgtcttaagccaaaaaaaaaaaaaaaaaataggggtaataacacttatttattagttttctgtttttataattaaataagtaaaaatattatccaaaaacatgttttataaaactatttttaatttttaattttttaattgggaatcaaaattataaaaattttgaaaaacaaattattttcataatttttttaaacaattttttttttcataaacaatgttttaaactctgatcccaacctagacctcggacccgaactccagcttcggccccagtcccaaactcagaccatgacctcgattccagatcgaacctaaactcgacttaaataaaattaaaaattaaaaataaaaataaaaattatagaacaaacttttgtagaattctatagaagaaagaattaaaaatagaacctcaaaacaaatgcttaagaaaagcttaagcattatgaggaagaaagtgttatttatatatatatgtaagcttgtataagataaaagatttctattataacagaagtagttacaagaaatagaaaatagaattagagcctaaattaactatttgttggttatcatccacctcaaaagaaaagagatgttaacaactttgagtttggtctaaaggtattgaaatttatccttcggtagaggctcagtaagaacatccataatctgatcaacatagagcacatatcgaacctagattttatgctgcagaatttcatcatgcacaaagtggagatcaatcttaatatgtttgcactttgtaacgtccccgcttcaagcctcca

SEQ ID NO: 68576 - DNA, 606 bp, Cannabis sativa
aaaaaaatccaaccaataaaacaaatttttagaatatatcctttttaatgtttaaaatctactcatacctaaaattaattaaataaataataattaattttttagttttaaaatttgaaataaaattctacaccaaaactctaccgaaaaatcaaaattaaaatccatgaaaaaagatgaaaaattaaaaaaaaaaaatgaaaatttttgcatgtggcacagacaatatgcattgcatactgtctgcgcgcgaatggggcctactggaccgagggagaaggctgcatgtagcatgttacaggcacatatggggattcaaacaaggacctatttgagaaacattggacacacttttttcgaaagtgtgtccagaccaaggttgatactatacctattagtgttaggttaaaatttaaatatgtattagaaaaaaagataaaatagctttaaattaaacccttgttgaaccctctagtaggccctacgggtttcaatttcgccactttattaaataacatatctttctttcactaatacaatactttaactataactttataaatgctaattttacctatttatgaattataattaattattaaataa

SEQ ID NO: 68577 - DNA, 935 bp, Cannabis sativa
gtggagttttctagtttaaatgggaaacgaagtaaggactaattattttttaaggataagttgaaaaatactcattttattaattaattaattaaatttatgtttaattttatattaaattgaaacgtacgtattgtacttaaaatactctgacataaaagagttgagcatcttgaagtgatagggacaaacttaaacgatatactaacactattatttattggcttgctcgagcatcgtgttgtattcctaatagtggttttaaagtggacaattgtctctttgaattgttgcctcacttggctatggctatagattgttccaaacagattggctttaaaacgtactaagtttgcagaattgcagttgcacttgtagataagataggataggataggaatgttttcactaagacctgaaacacatgaaagtcattaaattttgttacttcaaaaagaacaaagacaaaacgatcgaaaaagtttcttttttactatcataaaagccaccaatgacttcaaattcacaataaaaaaaataaaataaaacataaaaaaggttgaaattttgtatgtagaaatttaataacgtggaagattacaagaccctacaaaatttaatggtgtggtccctgagaatttttctactttttttcatgtagacaatacatccccccaatggaggacccaatatttaaattaaagtgacggggcgtaattctttttgtaagtgaagaggaaaaaatacgagttgttgtactccgtaaaattataaatacattttattattaaaaaaaataaacttaaatactttttaaaaattattcttaatattttcttaaaaatttttattaacattatttgatgttaatttcaatacttattttaattttttttttcttttaaatcatgtatatatattttttgtttttcttt

SEQ ID NO: 68578 - DNA, 738 bp, Cannabis sativa
gtacacgttcctcgaccctgaggacacccccatgaaataatttctggtaaaaacttttggtaactataatagattcctgtaagtagactagagcccacaaaccacaaaacacaattccatacaaagcacaagaaggccaaaataaatctggcataaaaaatgtataaaaggtaagaaaacagcatgctgcatacctaattgagtttgatcaatccgagccttgacttcagcaataattttgaagcagtaatcagtgcacacatggtagggattataggcgtttctgcaatctgggtgtactctcccttcctcagacattttcaacttttctcaagatcaaaatcaaccccctctctacagtagtacgaccctttaaattacctaaaatttaaacgaaataccgtaaatgaaaaagagaagtgttaaaagccttgaaatttcgtaattaagagaaacattgacggcttataacacataagatcaatatctaatcctaacgtttctttatccctaatcagagattcaaattttggctcaaacaaattcaacaattttaacctcttaattcatacctttcaaagatcataaggccgtccgaagctcaaacttgagtaaggagagagaggagactggcgacagctagggctagggcttgaagttgaagaagatgcccaaatttcactacacagaggagagcacttgccttggccgtatttatactttctttttttttttttt

SEQ ID NO: 68579 - DNA, 761 bp, Cannabis sativa
atattctatttgatgaaaaatgacataccaaaactctcattcaaatgatttagggatcatttcccactaataattttatgccagatcttaatacaacattttatataattgataataataggatgacccataccaatattttactattattatctctgttcagaaataccaatattctatttaaattgccaccatcaattgaaaaaaaaaatgaccaatcaaagctctcattcggaccattcaaggatcaattaccacccatcacaatgagtttataggtttgttcttctataagattgaagtggtttctagtttctagaacttggtgaattccctgaataacaaacatatggttcaagtagattcctaataatgttgataaattcatccgatgtaagtgcgaatattatattttggatccaattcaatctacataaaaaacttaaatctaatccaattctcaaaagtgtaaattggattgattactttttaatattaaattatttaatatttattattttttttttcacataactaacaacaaaatgaaataaattattgttattttatgtatcaaacaataaattaaaataaataaaataaaaataacaaaaaattttgaggaaaataaaaaaaaaatataacaaatttaagacaagacgaaaacaattatattaacattattttaaattatatttttcttgtaaataagaatagaatatatatttgatatattatatttttatattaaaatattaatt

SEQ ID NO: 68580 - DNA, 747 bp, Cannabis sativa
  modified_base (482)..(485): a, c, t, g, unknown or other
gtggatcgtctatttaccttggagcctgctcaatgtgcatcatagaaacaatcaatctatgtatgtccatgatccttgtaaactatacctagtcctagtgctcctttcaagtaacataaaatttgctctaatgctgcccaatgatgaattgttcgagaagacataaactgactaaagacactaactgggaatgcaatatctagacgagtcatagttagataattcaactttccaagcaatctgtaatttttcttaggatctgcaaatggttccccatcatgtgtatgatgcattactggattcattggagcgttataaggttttttgctcccaattttcctgcctcagttaacaaatcaaataaatattgcctttgagatagaaaaataccttgtttactccgagtaacttcaatacccaagaaatacttgagcacctctaaatacttcatgtaaaacttggtatgaataaaagacttaagnnnnatgagatgcctttagtatcatttctagtaataacgatgtcacaaacatacaccactaacaaaatgataccatcttttaaagaacgcaaagtggtttgacttacttttcaacaaactaaatttcttaataatctgactaaatttaccaaaccaggcatgagaactttgtttcaatccatataagatttgcaaagacgacaaactcgccctaacttcccccgtgcaacaaacccaagaggttcctccatatacacttgttcctc

SEQ ID NO: 68581 - DNA, 603 bp, Cannabis sativa
ctctgataccaactgtcacgggctcaccttttcaggcagcgaaacacccgtgcagcaccttgacttctctaagccaaggtcaaccttccaacaatttgagtaacagtgggctcatttttcgcgcgaccatgtgcctcgtgtacactttcgtctcttgaacaactcctgccaagtcttcctcacaagcatccatgagtgcatccatgcatcgaggttctctagccaagatactcgcactatccataagttcccgctatgataaggcaaatcccgaaactatctctcacctcatcactcgtgaccaaagtagcatatatggcaagaaaccaacactaagctgacatgccaacgcttttaatcatgccccattcgacacgctccgaacagtctccctcattgcccaagatctcccatatgtccatggtccaatcctcaaggcaccatgcccccacgcatgttggcaagccctcgagacaagccaccaaacagtagcataagttagacctctgtctttttctagcatggtacattcattccatgcgcgtatgcaaactagcccacgaatgactacccgtatcgtctcgtgttgagactcgtggccaa

SEQ ID NO: 68582 - DNA, 505 bp, Cannabis sativa
tatttaacatgtttctgtaatattattacatttcttcatacattaattacaccatatttttggcccaaatatatatatatatatatatacatgttcatttttaattcgatgagtctagctgagtagacaaatttgttaactaacaatacttttaatttggtgtatatttgtgcgcgcagagtgaagatggagatattattgactgcattgatgtgtacaagcagccagcatttgatcatccggctctacgtaatcacaccatccaggtacgtatgtaccttatttattaattaatctattttataattaataaataatttgggaatattatacatatttaatgatcatttgggagtccccattatattaatgttgaaatattgttaattcagatggcacccagctataataaggccgcagagagaaataatgatgatattaataatagggaaataagaataagtcaagtatggaaaagaaatggaatgagttgtccaaagggaac

SEQ ID NO: 68583 - DNA, 1014 bp, Cannabis sativa
tttgatctctgggaattttcttgacggtataatgcttaaatgttgcaatatttctctagatttttctacgtaattagccatattctccccttttgtttgatgttctctaaaaatcttgttaactacaaaccataaatcactatagagctcaatgttctcgtcttcaatttctttagctaactataggtcgtctatcattgccttgtgttcttgttcattgttggagtcttcaaactcaaaatagagtacactctgaagttaataattttatagagaaattagaatgatttggtctcaatcgatgctccatctacattatcttctagacactaagctctgggattggttctttagggttgttgtccattctagtgcattcaacaatgaattctgttagatcttggcctttgattgatattctaggttggtaaaggatgtcaaactggcttaagtctattgcccattttaagagtcttccaaatgactttggattttgcaacacttgatagaggggatggtttgttagtacctcaatggcatgggcttgaaaatatggtcttaacttttgtgatgaaattagcaagcttttcgatcattgggtacctggactcctcgcccatcaatcttttgcttacataagatacaagaagttgtacctttccttcttctcgcaataaagtggcacttatggcatgatttgacactaccaggtacaaaaataatggttccccttcgataggtttagaaaatattagagctttatgttctttaattaggcaatgtgatgtaatgaagatggttactttatgaggtaacatatacataatttatattataaaatgaatatgattcccattattggtataatgattttgtgttaccagatatctgtataccgatgcgtattcatggcagatgctagtagtgatttggattttctcttatgaataatgcgtaatggtttgattctgattgtgtataaatgattatattccaataataaactatatgatt

SEQ ID NO: 68584 - DNA, 543 bp, Cannabis sativa
gtctgtgtttggaacttgtccttgtcttcggtcttggcctggtccgggtcttgctcacagttcagttcttaagtcctaggtccgagtatcgggtctcgggtcctagtctcggtcccggtcccgtcccagtctaaattctagtcccagtccaggttcaggtctcggtcctagtccaggtctgggtcttggtcctgatcttggtttgggttcgagtctcgcgtttgagttcgaattctgttatgtgtctgggtctgtgtctgagtctgggtctatgtctgtgtctgggtctgggtctgggtttcagtttgtgtctgggtagaggtctttgtcttgttctgggtctgggttctagtctagttcccgagtcacgggtcctgggttcgggttatgggttgcaggtcctggcgcaagtctaggtatgggttcgggtatcgatcccggtctaggtccgggtccgtgttcggttctgcaactagctcttgtttttggttgaggtccaattcctatactagggtcctgatttcagttcttgttctaattttg

SEQ ID NO: 68585 - DNA, 1185 bp, Cannabis sativa
ttggaaagaatattattcctgagatttcaagtttgaatgacaaaccattatctgtcaatcataaattctttgaaactttcattactaaaattaataaaaaatttcctttaaaaaagaaaatcttagcattcataatccatacttctcattttctttatgagtttcagtcattcatttcaccataccaaaatttgatatttaataatgtcaagtcctcttgatcctctaccaaactatcctcttcatcgctttacgatgctgttgcgccgtctccaccaatgtaactggttggaggaccttcgttactcccaccctaatcatcgatatcgttcctccatttcttctcttcaagaacatgtttccctgactctgcaatacattcaatatcacagagtcctccctttggcacgtcgcgccagatcacctcgtcttaactgtgaactgttccatcgccgtcactatcagcttcacagagtctttcaaggtcacctcaacaatttgcgcatgcttttcatagttcttcacgaggacttgaggctcgtccgacgatttgtcttccaacaacagcatctagctcgttaccgtgcctgcattgagatcctctactgctacacaaatgtcctgtgaagccacctacctattccaataagaagcctctaccatatccatcaatccaagttatcaaaacttaagagttgtagtctatttaagtttatgaataagagtcagtgaagctttaggtgtgtgtaattgatgtttatctccatgggttgtaattacatacctctctgtcttaatctgtcactgtctgtgtctggtgtcttctttattagtgtaataatttcttactggtatcagtttttgtaacggttatagtgatggatgtaatgaacttctgtagtgcaaataaatcataaattgttgctatgaaatcttaatagaatagttgaaatctgtggttgttgattcaaatcttgcagaatagtcttttgccaagacactaatcttaacaccctcaattctagtcagcagattattgaagaagaaaaagaagaaaaaccaatacatcagcaaaaataatttacatcggtattatcactaaaagtattgttattcggcaccaatggtacctagcatctttagacatgtcgttttgcaataagctagcgatactccctaaaagtt

SEQ ID NO: 68586 - DNA, 621 bp, Cannabis sativa
ggaactaatacatagaatcaacctaatctttgagtaagaaggccacaaggcagacctcgaggttgaaggaccaggaggcaagaaacaaataaagaaaatccccaaaacaccatggaggagcaacctgggggaactagggatcttccaatggattaacaacagaataaccaagaacatcattgaaaagtacctcaaggatcctaaggatttacaaattaggggaatgagcgtaatgaagtgtcagaggcttctcgtaggaataagaacatgaggcaaccccaaagtagggaacaggcaaacccttgtaataacgagagaaatcctgggactcaacctagaacaattgggttaccactcagacacccccaacgtccttctcaatcggagaaggaagggcatacacatacctaaatagaaggtgtgtgtttaaccttttccgaaggagaaggcctatgcaagatgaggcaagttctagctcaagacactcgaggtgtcgagggcaaagtcgttcaagaaggcaaacgcaagaaggaagcagacctcagcgttatgctaatcaagaaagcatgagcaagagtcactcagatacgaaatttgtgaccaattatgaacaaagacagc

SEQ ID NO: 68587 - DNA, 609 bp, Cannabis sativa
tgcgaaaaagggtgtaatttgagtgtgtttataagatatagatcttctattattgtattatttgttgcatgtggtagcaatttcttaatttgtttgcgtgtttgaaaattaaaagtgtgtttggttataatgttttaattaattttttatttttaaaattagaaatataaaaatatttttaaaattatgttttataaaattattatcaatttttgatttttttaattgagaatcaaaattttaaaaataataataaaaaaatcacgttctaattttttttttaaaaagaattcttaattaatattttagactctgacttcaacctaaattttacaatctaaacgaaccttagccccgaccctgatctcgacctaaatctaacttaaattaaattaacaaatgaaaatgaaatttacagaatacacttttattttttgtttttaaaattaaaagacaaaaataattataaaacgtatttttatttttcaaaattaaaattttaaagataagtgattaaaaatttaaaaacaaaaatattaccgaaagagatctaaaataaaaatggtatagcactcttgtagagaagataaaaagtggtgaatttttgac

SEQ ID NO: 68588 - DNA, 886 bp, Cannabis sativa
gagaagcatatgctattacttttctagcttgcattaaaacgccacctaaacctagtcttgaggcatcacaatatacaacaaacttttccttatcagaaggaagagtcaaaattggagcagtaatcaactgttgctttaactcctggaagcttttcccacatcgatcaatctaggtaaactttaaattcttccttgtcaaatctgctaaaggcgctgcagtcttcaaaaattcttcaacaaattgacaataataaacagctaagcccaaaattaacttctaactttagtagctgattctggtgttggccaatccctaacgaagtcaatcttggtcgaatccaccataatcacatctttctgtctactacatggccaaggaaagaaacaagaggtaactaaaattcacactttttgaacttggcatacaacttgtgatcctgcaagtgctgaagtgctaatctgagttattgcccatgttcttcatctaattctaaatacaccagaatatcccctatggaaaccacaacatgcttatctagaaaatccttgaacacttggttcattaaatccataaaagttattggagaattagtgagtccaacagtcattaccaaaaactcataatgtccataccttgtatggaatggagtctttaagatatcctcctctcgaatcctcaattgatgataaccaaaattaaactcattcttagaaaagactgtcttaccctttaactggttgaataagtcatcaattttagataaaggatatttgttcttgatagagagcttatttaattcttgatagtcaatacacatctataacaatccatcttttttctttacaaataacactggagcagcccatagtgagaagctcagcctaa

SEQ ID NO: 68589 - DNA, 1707 bp, Cannabis sativa
ccacgtatttttggcaaaattaagagaaacagatatttttacaccacatactatttttttttttaatttattcgttttatattgtcttacgtcagaatttacttttttagtctatcttttatatattgtatactatgtacactataaaattatgtatattaccattttatattattttgtcatgagtattttattttctttattttttgttattctttttaaatattgattaaagttgatgttgaccttttatacacattattatattttgcattttctttttaaatttgggcaacaattcatcacatgatctcctccttctcaagaaaattgtgacaatttttttttaaataataattaaagtggatgttgacctctcatacacattattatgttatctcttccttcccaagataatatatatttatttatgtatattgctcttgagcaaatcactaaacacacacacattatttatttttcaatgtatttgagttctttctccccagttcatcagcttctttttttttcaattctaaaatattacccaaataaaagctaaccctctccttttgtagtaggtaaaaaaaaaagagatgtcaaggaggaagaagaagaagaagaagaattggaaaagataagagtatggttgtgtgtgtgggagagagatggagagcctgctctgtgatgagcttcttgtaaatatctttcaaagactcccactaggttcatgttcttcagtctctttggtctcaaagtgttggctccatctctatcgtacttctaagtccaccctcttcctccaactttccattttctgttactggttcttttgttattgttttaaggttgttttactaatgttttctttcatttctttatcaaattttcccaaatattattatacttctctatataatagttttgggaaaataataaaatttgtatgtaagtattttcttcagtatcctatgctccaatatatattcaactttcttttgttgtgccactattattttttaattgttctgcttctttttagttttgatgctttttcctgtaagttttcttgttgtgtccaaactccccacatttggtgtattggttaagttattttttccccagctagcttcgatcctctttttttttgtcttccaaattttaccattttaatgggaggtaagaatattactgtccatgatttttttattctggctacctcaaataaatattcagtggttggtttaacctgtgtaatttgaaaccaacatttgttcaacatacaaaaagaacagtggaaccacccaaaaacaacattagaaaaaccatgacaagccaagtatttatagttttaatgtttctgcttcatctcgccagatttaatagttgtttttcagctattctagtgttgctgtggtggttttgtctgtgggtgtgaaagatggagatctcgttttttattttcagtgtttacagtataaaagaaaaaaaaagactaaggcaataaaaatgtaaaccatcatccaaattccggtatatttttgtaaaaactcctttaatataatcttgttaccatttaatatattttagaatctgtattatggttcaaaaaaaaattaaaaataagcacaaactaaaatccttatattaaaataaatagataaaagaatatagcatgtaaattgttgcattgatatgacaataaaa

SEQ ID NO: 68590 - DNA, 801 bp, Cannabis sativa
tgactgaaaataaaacattgtctaagtttgtgtttgtcaaaaaaaattgttagagttgttccagacgggtttgatactaagctcctggcaatggaagatttgcacacctttgaactaaataaaaaaatctaccaaaaagataggcccaagtctacagttgatagatgtaaatgtatcgcttttaatgttgttgaaaaagaaatttcttatgataattgtgatgatgaaatgcctttgttaactaggtattttcaaataattatgaaaaagatggaaaataaaaaaagttcacttaattgtcaaaggaaattgcatcgtttaagccttcggtaactaacaataaaaaaaagaattcagtagaagtagaaggagagtgaaggcttggggcacattcaatcagaatgtaaaaacgcaaaaaaaataagaaaagttttaatatcacttaaagtgatgaataaaatttagaaaatgttgcactaatctatatttatcctaatttgtgttgtgattaacaagtgtaagaaaggatggtatgcttgaatagtactatagaaaaaaaaatctaattcagatgaatataaaattattgaggagtccctcgtataaagaattaccatattactttattttcttagctttgtgccttatcatcaatagaatcattcattttcttcaaaataataataataataatcaatttttcaatataaaaatttttcttcaccagcattttccttacttctttccttccccatgagaattcaacttcacataactttgagaacgtgttttctttctctc

SEQ ID NO: 68591 - DNA, 743 bp, Cannabis sativa
ggaaacctacaagtttctaaaaaaaaaatatacaaaacagaattgaggtaaagatcaagcaatacaagtgccgaggataagcggacgatgtacagtgtggatattactgcatgaagattattaaaagtttcatgactcagcacaatcctgcaactttataaaagaatgaggtaattaaacatatataatttttattttgataattactttttattttaaatacatttaatattatctatctctggttgtacagttcaaagatgacaagccttacagcaattaggagataaatgaaatacgagatgaatggggcagttttgtgaagtcttatgtattgaaagaatgagtatgcaattcttttgatattttgttatgatacatgtaggatataaaacttttagctatatgatcgttacttttggtgatacttaaattttattgatatacttcatagttatatcaatttcttattataacatgtatacaatttttatgatcgttacttttgattatagttgatgtactttatagttataaaatattcttagttacatgaaaaatcttatcattattatattataaatattattgttagtcatataaattttattttttttataacatataaatattgttatgaaaaccaattttaatatctgaaaatgcaggtggggaaaattgcaaagaaatctgcaatttcccctacatacaacaatgtatcctttaataaccgacacaaaaag

SEQ ID NO: 68592 - DNA, 2466 bp, Cannabis sativa
aataaaaagatgttagtttagtaattgcaataggtaacagaataacaatagtgattccttaagaatcataaacactctaaatttagtatatgaattcagttgcttcagttgcttcaattactcaattgttaatgttatttaactattctcttttttttagttatgatagattataatataacctaaacacttttcagatcataaagatcttaaattatatgccaactattgtatctctaagatagaataacatataataattgttaatattacatgcaatgcacgtatacttagttatattcttaatttttattttggttattctatttttagttgcataattaattttttttatgttattcaataaataatataattttttttatataaaaatatttaatttgagtgctacttataaaaaaaacataataatatttattttttttgttaattataattttagtttaataataatacttttaattttaaaatacctttattttaaagaaatatcatacactttttctattttttttaaataataataaaaagatattattttagtaactagaataggtaacaacatcacaatagtgattctttaataaatataaatactttttatattttattatattaaaaaataatagaaatatatatttttaaatatgtggattaagcaaaaaaaaaaaaaaaacaataataatagaaatatatcttttagatatgtccaatgagtttaaatttgaattgtaatattaaataaatatatatagtcacatttaatatatggatttttacaccacatactcaaatttctaattttttttactctgtggcggaatttttttcaaaaatattgtgtaagttttatattgtgtattgtgttaagttttcacggtttgttctatgattattttttagttgttccactgttgttttaattttttaattttcttgttttgcagttttttttttataaaaagaaatagtatttttgcaaaaaaacaaatcatgtgacagtaaaattgtaaactttttttcaaaatttagtatttttataagaacccctttaatataagataaaaaataaaaaggatatgtgttgtgagtttaaatttaaattgtaattttttgaaagataaaatataaaagaattatgtgtagtgagtttaaatttgaattgcaatatttttttttaaaaaaaatgaataacattttctgttgtatagtcatatttaatataatactatgttattgttacgtgcattgcacgtatacttagttatatattttttttaacaaaaaatatttaaatttttaaaaattttaaaaaattaaatataaagttaaagaatattaaaattaaatatactctcaatattagaaataacaataaaaaaataataatattataaataatctaaaattgatataaattaaattaatctaaaataaataatattaatattgatatatattaaattaacctataataatattataaataatttaaatttgttataaattcaattaatttaaaataaataatattaatatttatatatattaaattaatctaaaataataatattaatatttatatatatttataaaactaaccttacactaatactgttaaatttaccagaatattcttaaaatatttcgttaaaccaacaaaaattgttagataaccaaactttatacataaagatatataactataataactttatattatataaactattttctttatttacaagtattatgtttttttttagttattcataatatttattatatattataatatcgagtatatatatttataatttattaaaaaatatatcaatatatttgtggattggattaaaattagttatattttttttttaggtaaatcatcacttaagtgtagattttaaaatttttgattcaatctaatctacacaaatgatattcgtactttaagattagatttgattgattttagatcataggaaattaaattggatggatattttttgagcacctctaaggtcatgattattaatcatcataatgttatatatgtgaagcatcaaattataaggatgatgactctatacattataattataaaagtattcatataaacaaattgtaataaataatatttagcttttatataaattaaagaagaagcatcctcattataaaattacatataatcactataaaattttttatttttagttacaaacttatgactaaaaattaaaatagttgtgactaattataaatcatttttcctatgttattactaaaaaatctgtgattaaatatattagctacaagaagcattgtgactaaatatatttttaatcacaatagggtgcaaatagaaaagatcgtgtaacttgacaagtaattttattgttatacatttactcgtataaaatttatattgtgacaaaacta

SEQ ID NO: 68593 - DNA, 645 bp, Cannabis sativa
cattaattgctacccatgcatgtaaattaagaatgttatcttgagtggtgggtaatttttctgttaatgtggcagagttgcttgtaatatagttttagtatctctattattaatagtaattggcaattagttagattaataaatctcatattaattttaggtttcaatctattttattagatatctattcgttattacctgttgttggtggtggttcttgcagagccatttctcgttcggcgaatggtgtcgtctatacactaacaatttttgttactagtttaaaagaatgtggttaaactgatacttgttcacaatttttaaattcttttataacaataaatttatcgtaataaattatgtttttcttaaaaaaaaaaaaaaatgttatgtacactaccaatgcaagttaggagaggcgttagcttagcattaatctttttgttgataacttttataaatgttatatatatgattaaattgttccaattagtttaaaagaaaatactaaaatgtacttagtattatattattattagtgtaattaaatattatatttcatcaaattgtaaaacatcacctctaaatagaatagtgttaggtattaatagtgtccaatagtaatattctagtttaaaccctcat

SEQ ID NO: 68594 - DNA, 786 bp, Cannabis sativa
atttttgatcgtagatgataatctgtaaaaattagtatatgaaggtgatagtcatttttcggagcctggtgggacccgttgtgagtaaccggagcttattttcgtaactctcttggggtgaaatttgagattgatagcttcagaatttttatcaagtgtgagatattaattgatagagcattgaattagcttcaaagttcaagttgaatcgcatcaattggattaatattgagtgagttatgaccgttttactaaaggcagttcatgaccaagtgcccaagttgacatccaacgccatgttgacatctcagtgcctaggttgacctatgatgtcaacctggatgctcagtaagtgaacaaatgtctaaggaatgtactttaagatgcataagtgatattttgacattacttagtctgtttatgtgttttagcaaatctggtcataagttctcggagatattgttgttctacaaaaatgagagactcgaaactcttcatttccgaatgagtttcctatgttagaaatgagaaatgcaaagttgtaaattttacttctctagactttatgaatcttagttattgtgaaaaactaaacggacagtcgaaacaaaatcaaaatcggataagcaaaacccagcacactaggccatttatcaacctgagcgctaggtaccccattttcgagctcccgaccggtttttcgttttgatacttccaaggttcttgaacttgagaatgaggtctcctaccctatttttgactattctagattcaatggtcaaatca

SEQ ID NO: 68595 - DNA, 1865 bp, Cannabis sativa
aatattacaatatctcaagggtacctctggtcaaggactattcttttactcagcatcttctactaatctatctgctcatgctgaaactgatatgcctagcaaagactttcatctcaaaaaaatttcagatgcttattgggcctcttgcagtgacactagaaggtctgtttctggctactgtgtttttcttggcagatctctcatctcttggaaatctaaaaagcagtcaacagtttctcgctcttttgctgaagctgaataccgggctatggctcatgccacatgtgagatcacttggtttttggcgcttcttcgcgattttggcattcttcacaaagatcccgccatcctatattgcgacaacaccgccgccattcatatctctgagaatcccgtctttcattaacgcaccaagcacatagagattgactgccacgtcgtccgagaaaagatccaagaaggcacactaaagcattcatgtcaccacaaaaaacaacattgctgatatacttaccaaacctcttctaccaagctatttccaatcaattgtaatcaaaatgaacttaaaaaataaatatagttcatcttgaggggagggtattaaagttattggcccactgggcctcatactcggcccattcctctagggcagctgcctcatttcccctatatatacttaagttgctctaatcattttattctttttggcatatagccgggtaaagcattatagcaataataaagagttttctttctattatgtgatgaaaaaaaaataaaagaaatttacatggtacactaatttttgctatttgtttacaaaaatactgtcagatggtattttttcttttacttttttactgtgttttttttataagtttcatattgcagtatattatattaagttttcactggtattttttagttgttctactgttgctttgagttgttctactttgtgttttactggtgttttataaaaacgcattattttgaaaagatttctgtgtgatagtatttttgtaaagttaacctaaatttcagtatttttgtatgttttttttaaaaaaaaaaacaggtaacaaagaaagaaagaaaggactcactataggcatttcaagactagctcaatggtaaaagagagatagaaaaagggagggaatggattcgattcaaacctaaaacggtaagttattaataaattgtaatgccactaagatatattaaaaaaaaaaaaaaaagagacatttcatcgaacaagtagaatagataccaaaaaaatgaaaaaagaaaaacagtactcaaccccatatctcgacaccacacaaactcattatataggtgtgcgtgtgttgatgtagtagaagtacccttgcgtctttgattttgagaacgagatcgaccaatgggattcgttcagcgatggcgcgagaggcagcagccatgtgagtgccaatgtcatcctcacgttggctctgtgttttgactagatttcaccctaattctctagctaaacaaagagtagtagccatttttctagaactcaaaagatttgaaaaatggtatctcacagttgacagttggagtcttcttttttcaatagaatacatcatttatatgggccatatccttcctagcccagtccgttgagccccaacaaattgctcttatttatgagttggcatttttacgcaaacatttttgtagaatttacacaaaatatgagaaaaagttttagagtttacttttttatggcataattttttaagtagaaattacattatatatgggaaaattataaaagtttattttttatggcataaataaataatgctaaggggttatgtgtcttttttttttttttt

SEQ ID NO: 68596 - DNA, 1899 bp, Cannabis sativa
attgtacagcttacccggtatttctccttacggatcacgggactactgactgtcacagattaaatatatatatctttaatcacaatacttattgtgattaaaattaaattagtgataacttgtaactaaaagttatgttaaaaaaattatattatgattaaaaaattgtgactaaaagtagttattttttgtatagtgagtttttatataatgtgtcctaagtaataagtaaaaatactattttgatgttgagcaaaaataataaaaaaaaaatctttcttgaagactaaaattttaggtagtccctaatactcaattaatttaatcacacataaatttataaaaataaattttcgtagttgatttaagtatacatacgttagtattaaatacaaaccgagtatataaagttgtaaagtgttgggtttatggtaccattggtacgtgtatgaccagttcagaagaactgagtgtataattaaatagagtcaacggtcaaccaaagttaatattgaacaagtatatatattatactatacaaacccccaaaaccaattagtcttacaaaatatgttattacgcgcacacaaacaaacactataaaaacctctcattacctccatccttaatataaactcatcaacaaatattaattattattctctctctctatatatatatataaacatatataatatttttcaactacgtacacatctctggcaacctaatatacaattttgttttagctatattgatgatggtgatcatgagaaaagtgatggtggttttggccattatcaacttattatgtattgttacaattgaaggtggtcgagttttgaatcaaaagcgagatttaaataatttattgatttcgtctttagagagaggaggtaataaaccaccttcgcgcaatccaactaaacctgcatctttcgatgagagaaactttgttggaagtacgagcagtaaattgctcgtacattctccaccaccaccaccaccacctgcaccgagcttagctttcgcataactaagtttacatgttcaatattaaaataattttgaacaaaggaatttattatagattaggtcattttccatcatgaaggaattaattaatatcctcataaattaacctaataaaattgggttaattaagaagggcagagttctatcttgcttaagtgcttttttttttcttttttcatgtacataccatgaaaaaaaaattattctttcatttattttttctagttctatatgtgaaaaaattcagttgatttgtctaattgtaaccaaaattaattgtggttattaaagaataattgattatatatacctttttttgtttgaatggtggataaatgatcatttgatattttcttttcttgctcagaaaatatttttatttagtgtgccttctttagtttatcgaatgctttaatgaatttatgtcaagcacatataagaggggtacgtagttgcaattgggccagattaattaataagttttatagaaaattgataatcaataatcacagcacgtggcacatcaggatatgatgttatattatgtcgatcctgtaaattttttgagctcattaaaaattaataatgttggaactattcacaataatattataaaataatagtgattttgttagattttaattattactatatatattgacacatctgcctgatctgtggaccaaggaagcttgatgtgtggtatgccatggctaaaaattaagtagccgtagtcatgagatggacaaattggactgcaccgatcgacactgagaagagaagagaaactgcctaaattggactacacctcctgcatgcatgtaactgtaaaattaatgccatttttttcatctaatttatttt

SEQ ID NO: 68597 - DNA, 946 bp, Cannabis sativa
tatggtgggctcccctgcccatggaatcttcgacttcctttcttctacggccagaactacttcttcttgctcgtgttgtactattcgggcatacatctaccgggctttgcctgaatctccagctatgtgcggacctctaataatgacctgtagatgtccatctactggtggtagtagcaagtcttgcttgttatcgcccctcttattctgatcggccttgacatacttttgcacatgcaaattatttttccttatcaagaattcgatttcctactttagattgttgcattcatttgtgtcatggccataatccccatgaaaacgacaaaacttggtcatatctctcttgctgacatcttttttcatgggtgtgggcttcttgtacgtggctaatgattgagtagccatatacacactttctatatcttccgtcaggacagtaaaggcagtatacttggcaggattctcctggggagcttgttcggtcttaccagtgaactttccctattttccattcccttgcctattactgttgttggaccgtttccactcgagcttgaattgcttgggtaatgggggagctggacagatgtcccagtcgaaggagcttttgactcgctaggtttttgttcaccctctgctcactgaatggctttttcaagcttgacaaaaccttctacgcggtcaagaaaatcactcatcgagtctactggcccattcttccttatgtccttccaaagctcgccaaggacctcaatacccccaatatcgcagacaactttccatcttcggttactcgtgcaaccttagtcgcctctgtcatgaatctgctgatgtaggcttggagagtctcccctggtcttttctttacttcgaccagatctcctaggtgcaacggaagttggtgaaaggaggagaattgttcatggaactccgaggagaaagc

SEQ ID NO: 68598 - DNA, 796 bp, Cannabis sativa
ggaagaagctgctgttgcagatgctagttgaaacaacacttcactgctgtaatggttgaattttaatgcccatagtaaggataatgacaagttaggccgaattgtcatgctgtgctgggccttatggtcggctagaaacgatctaatttggaaggaccgtgttcgaagtgtaagtgatgtagttgcttttgcgttctcaagtcttgatcaatatgttaaagctcaaggtaaaggaaacattcctttattgtcacccttcaaagatggtgatggttcagagctttggaaaaaaccgataacaggcatcaagcttaacgtagatgcggctatattcgatcgtgagtttaaacacgggtttggttgtgtggtgaggaactctggtggggagctgatctcggcttttgctggtgtgaaaattggcaaagtctcccatgagttggctgaaatcatgggtataagagaggctctaagttggcttaagaaccacggctacacttgtgctgaagttgagacggatagcttggtctgcgttgaagttattcgtcataatgcaagctataactctggtttcggtttggttgtggaggattgtaaaactttgcttaaaagtttgttaaatgtttctttattttttatcaagcgttctgcgaaccgtgccgcgcactttgttgcccaacactctgttactctcgctgaacgtatgttccctattaatagtgttccccttgagctgttatccattcttgtgagcgatagctcctcttaataaagaacacttttattaaaaaaaaaaaaa

SEQ ID NO: 68599 - DNA, 716 bp, Cannabis sativa
taactattataagtgtcatgaggtaattagttttctagttatgttataatttatttatagttgatttataattgtcctgaggttgatttaaggtcccgattgatttctaggttttttagttatattttttttttattttttgttaaataaagtgtatttttgtaattttaaaactttaaaaatatatttttataaacaaaaaatttaattcgtaaaattataaataaaatataaaaaatgatatttttaaaaaatttcctatgtatataattgacctatttttaattaaaaattataataataacaagaacttaaatttctctctttcaatttaattagcatccatctcatccagaattcctcatgctcccttaaaaatagtttcttgagcaactcttgaagaaaagtgtaataataaacttcaggaacatatgatatttatttaccaaaacatgagatcgattctagaaaaagagacttatttattgtctcgatttaccatgttagtcaaatatgatgaccaatatacactagggaaatttgatttcatatacttaagaaattaaaaaaatttattattaaaccaaaaatctaaaccctaaaagaactatgtttttttttcaaaaccccaaaaataccccctcacaattcacccattctctctctgcatcatctctctctctatctcacatcccaaccgcccaccctcaccacca

SEQ ID NO: 68600 - DNA, 668 bp, Cannabis sativa
agtaatgtaaaaagagagtgggtttgatgaatccatttatattttggccaaatccttacaatttgaaatgaatgatccaaatcgtttctccaaaaagcatgatctgattcaaggatgggaagttaaaaagatggcatttaaaacttgctcattgcattcattttatttatcattgtttgcctcgagttaagaatgcattaaagaagggtcatttcaatcgaccttccatcattgcaacttcttctgaaagacatgccccctgcatgtgcgtgttatcaaacggatgtattaaaggcacaacatgcatgccgtgcttgtagcaccattggttcctggtcctttaattgatgaccattcaaggaatacattcgtgatctcagtaatcaccacgtgttttaaacttatctcagagatctggaagaacaatgcaagctcccacaactcgaagagtcccaaaagcatgggagtaaatgttattcatgttttcagatgggtgacacatggcatgaaaaggaaaagatattctcatgatctcactaatcgaaacctctcaattaaactaagtcacatagaagtttcactgatctaggaatagggcaagaccgagaggtatgcagagatccaccttttcatactttatcttccctgacacggaagacttattacca

SEQ ID NO: 68601 - DNA, 598 bp, Cannabis sativa
tcagatgtgaccaaagttgttttatgagttttaaatgaaggccatgacatgagcaatttaaacaagtcaatcataactctcatcccaaaagtgaaaaagccgaaagccatgggggactacagatcaatcagcctttgtaatgtcatttacaaactgatttctaaagtgttggttatgcgcttcaaagatgtactgccttcagtcatatcgaaaacacaaagtgcttttcttcctaaccgccttatcactgacaacatcttggttgcttttgagcttgtgcaccatcttaaacataagacacaaggaagtaagggctactcggcactaaaactagacatgagtaaagcatttgatagggtggaatgggattacttatctgctatcatggaaaaaatggggtttgcacatcattggatctctctcattatgagatgcttatcttccaatagtttctcctttcaactaaatggcgagattgttgggaatgtgtggccgactagaggacttcgccagggagatcctttatctccttacctcttcttaatttttctgaagggctctcaaggctactaaaccaagaggaacaaaggggtaacct

SEQ ID NO: 68602 - DNA, 1087 bp, Cannabis sativa
tatagctaaaattgtttttaatatcaatattttagcgataatattactaaattataattctgaaactctaagtatcgaaccgttaaatgtataattattatttatttgttatttttttatatatatatataaaaaaatttaatgacgtaaaccaattagagattgtcactataacatgcattattactgtaataaaaattaaacttaaaaaattatttacaactaagagttaaacttatatatttatattacaagttacaacttactcttttttttttttaaaacaaaatcttgtgttttttaggtgaattgtcaagcacacccaacttttcaaaagctgactaatctgactaggcagcaactaccactagccaccaaccaactaatcaaataccggggtagtgcagctgctggtattgatccataggttggcactattagaaaaaccaaggctcaaaaatggatgctttattttagtcattcatttcttaattaaaaaaaaaaaaaaagaactcaaaattaaaccgacccatcattccaatagcaagacaccttcaatagacaagcttgtgagatcataaaatggaaatattctaaagagtgacaatttgagatttcagagaaaaaattacaatagaaaaagcaaagcacaaacaattaccaactcaaaataacaaaagcaaaagggggtgtctgtctcctcaaacttatttattgtcaattttcttttttctttttttcaaattactattgagaaattcaacttctttttgtttcttaagcttgagctgacttggtgtaaaagcgaattccgacggctacacccaaaattagaagaggaacaagtacttggaggatcttgatgatgaactctggtgtcttgtcctggttataatgaggctgttttggtggtgtgtatgtcaccttagaaggaatagttgttgtgtcaatatctcctatgtagaaatcatccatcattgagtaagcacttgtactatgccccacatcctcaaaatcattagttgcatcctttcctggaaaacccacatacaacattttggtatatatgagaatcaacacaagtttt

SEQ ID NO: 68603 - DNA, 594 bp, Cannabis sativa
tagaagcttccaaattaaacagtttggccgtgggaaacaaatcaagccaagattgattaaccaccgctctatctatacacacttctacccaatcattcgtaccacgattcctttcccaagtatacgggtaaccaaaaagctccatgtcacaaagcccacactcccccaaagcatcattaaaaccatcaatcaaccaatttggataaggattacctcctcttttatcatcttgagaagtcacattattgaggtctccaataacacaccatggaagtcttgatttatcacgaggaattctcaacaaatcccaagttcttctacgcaaacttcggtttggctctctatataacccggttaacctccattcaccattttcactatcggcgatacaaacatcaatgtagtcaacaccaaattccatgactttaacttcctcatcaattctccaaagcaaagcaaccccgccacttttgcctctagcatccacagaaatggcaccatcaaaaccaatagccacccacaacctctctaccacctccttccttgacaaagttccacataagaacaaataattaggtttcttttggatcacaa

SEQ ID NO: 68604 - DNA, 1541 bp, Cannabis sativa
ttttcccattgtctgaactctggttagagtatacttcctttttagccttggttagggcaaggttgtaacattcccgtgcaacttgttgatttcctctcaggcacccaaccccattctttgtaggaatcttgaggcacgaatgaaatatcgatgtaacagcttttaggtcatataaggctggtcggcgcaatatgacattaaaagttgacgggacatctaacaccaaaaattgcgccattacagttatgctctttggagcttgcccaacaatgaggggtgggtgaattttctctaaaggtgcaacactctagcgcggaaaaaccatacacgggctgaagacagggggttaaatctttcagttggaccccatttttttgtatggagttttgaacaaaatattcactgaagctccttgtctatcatggttcgggccactgttttgttggctatctatacttccacgaccaatggatcattgtgcaggaagctaactttgacagcatcttattcactgaatgttatagtgggttcccctacccgtggtgtttttggttttcttccctctacggccaggaccacttttttttactcgtgttgtaaggttcgagcatgcctttcccgggctttgcctgaatctccagctatgtgtgggcctccaatgatgacttgcaaatgcccgtccactggcagtggcaataaatcttggttattgtctgtctgggcggccctttgattctggtaagtcttgacatatttttgcacgtgcgggttattcttccttatcaagaattccatttttattggttgcattcactggtgtcgtggccatagtctccatgaaaatgtcaaaatttggacatgtctctcttacttatatcctttttcatgggagtgtgtttcttgtacggagctacggactgagtagccatatatatggtctcaaaatcgtcagtcaagacagagaaaacaatgaattcggaaggattttctctaggggccggttcggctttgccaacaaacttttcatttttttcccattgccttgcttgttattgctgttaaaccttttactgcccgagcttgaattgcttggatattgggggtgttgaacgaatgttctagcagagggagcttgcgattgatttggtttaagctcaacttctgctcggtgaatggcttcttcgagcttgattaagccatctatgcgatcgaggaagtcactcatagaatctactggcccatctctcttgatgtccttccaaagctctcctagaactacgatgccccccagtattacggttaactttccgtctttggttaactgtgccactttcgttgcctccgtcatgaatctactgatataagcttggagcggttcccctggcctttgcttcacttcgaccaggtcctctagaggcaacggaagttggcttgaagaagagaattgttcatggaattgttaagcagcttctgagagtgtggcttgaaagactcgacaacatacatctcctcgcactccctgtgtaacaccctaactaaca

SEQ ID NO: 68605 - DNA, 541 bp, Cannabis sativa
ttttagaatctccaacaatatacgtgccctttataataacttataaatgcctgtccacagatggaggcattaagtggttttggttattatcgggttgggtgaccctttgatcctggtcagcctttacatacctttgaatgtgtggattattctttctaatgtgaaattcaatctcttcttttaagtttttgcacttattggtatcatggccaaagtctttatggaaatggtagtactttgaatgatctcttttgcttacatccttcttcattggtggaggtcttttgcaaggcactactgattctgtggccataaggatagcttctatatcttcggtgagaatagaaaagttgtaaactttggagctttctcacgaggatattggtgtttgggaatgttattaaactttctatttttttccatttccttgattgtttccaccatttgacttttttccaccctaattatttctagcttggcttggaacagacgtaccagaggccacgttgggaatttgtttttggccagttaaatttactct

SEQ ID NO: 68606 - DNA, 773 bp, Cannabis sativa
tttttttaaaaaaattaaattaacgaggagaactatatagtatatacactttcttattacaatttcttagtcaatttcaacgttcgaaattatatgtcgaaatatttttttttcaaatttcttttggtagcgttattcgttatagttacagtatcattcctgtaaatttttgaaaaatttcgaataatttacagtaccgaaaataaagttcctgatattctagtttaccacgcgtgttcaaaaaactttaaacatattttcagcacggtaaactattcaaaaaatttcaaaaatttataaggatgatgttgtaagcataacaaacgccacgtgaaataaaatttgaaaaaaaaaaatattccgacatgtgttttggaacgtaaaaattgactagattgtaacacgaagttgatggtaacactcttctaaattaatttatcatatgagtcgttggtgaggcaagttttgaaattgcttttatattattcaacaacatcatcttattgccaactaattttttcaacaaaaagtgccacattaagtgttgaataagaactaataagacgctacccaattttaatgtgtaacattaataccatttaatttatgtgaatatactaaattacccttatttcaattgctaaataaataaagaataattagcatctgtttggcacaacttttaaaaatattaaagctacttttcaaaaaaattgtgagaaatttttatttgataagcagttaaaaagtaatttattgaacaatttatgaaa

SEQ ID NO: 68607 - DNA, 1422 bp, Cannabis sativa
aattatacatttctctcactatataaatatatatatatatatatatatttgttttttgtttttcttttgaaaaagtatttatattttatccttaactttaaaaataaattttagccacacttttacttgtttgggctgatatcattgtgacctattttttttagtaattttaagatgttggaagtatttattttttaggcactagaaaagatgactataattaaaagtaacatttgaatttcttttataattttttaacaaaagataactaaattttaaatttagacaaagtttagtatactattaatttgatagactactattttatatttaaatgttatcatatagtatttaaataaatctatattatcgagtaattttataattttttttttaaaaaaatttaagaaactaaattatatcttaaatatcacaaaattaaattagttacattacagaactttgtttatattatattgtcttgttgtttaagatacttttacacgttacctttatctgtaataacattttccttacctttaatatcaaattgaaaatttaacgataaagtataataaaacatgagtaggtactctgcatataacttattagtaaaataaatagatataatagtttttataatgtaattaattttacaatgtttaagatactttttggttactttataagttttttttttaaaaaaaatatattgaaatagctttgttaactagatttgttttaagtatatcatttgataacttttatttaacaaaaaagttagagaaatctattacattgagtgttgtattgaattttaagataataagtgatttttcttagttatcctagaaatttttttaaaattattgtataaaataagcttttgtagaatacaattcgttatcttttaaatatcaaataataaaatgttttttagtaacctatgatatatattgatttttgtttcagtttaaaaataaattatttattggttaattatatagaaataaagaaactaaaacgttattttttatattcggctcattttttagtaatgattaaaaaatatatgattctcatatattaaaaaaaactcacctaaattgcaatggtacaatttttgtgaccaaatgattatcagtataaggaaaaactttttaaatttttgaaaacaacaaataaaaaacaaaaacagaccacatgtactgtatttacaattgagtgaaaaaaataagtgtaatagagggctatttacttttgttaaggaaagaaaatatccttaaattggtgtgtcatccgttctattaattattttacactacaaaaaaactattattttttgtgataattttttagtcacaacataatttttttatgactaaatgtgatttttagtcacaataaaatgttatttgtgac

SEQ ID NO: 68608 - DNA, 614 bp, Cannabis sativa
agggtttcttgtgcacttctacacatgcacaacaggtcatgggctacaaattgggccctaaaagcccaacaaaatggctgaataatatctagatttaaggccaatttagtgttttgtaattgtctaacaaactatgcaaacatatagggatttaaactgtaacatagggttttaggcctcttatttaaaggctttaaccttagcctagaaacttaagttgcatctaaatttgaaatccgcctctaagctctaagtcgaatctgacaaattctctcttcctcacttcctctatcacacgcctacactagcaacatctcaatacttgagttttgctaaaattgattcataccttgtattccttagggtgctatagcagatcctacctatagtgatctcgatagtattaaccctcagtattaatacaattaaaaggggagtaggtcattactcgctatcacaagggggtcaaacctctataacaaaactgttgtttattgcttttcattcttatttgtgccaagacatggcaagcatcaaatccatatgaccccgctgtcggttgatcactttttgaggtcaacactttggttctttcactgagattgtggatatcg

SEQ ID NO: 68609 - DNA, 761 bp, Cannabis sativa
tttaaggtgacttttcttttatcaccaattcattgaattattataaaataataactctgatttatatttgaaatgaaaaagcactcccttaaggaaaaaagaaaataatgggataattacttacattattttttaaaaaaaaaattatattttttacgattttttaaattttttttatatttttatagtattctataaaaacaataccataacaacaagaaaaacatataaaataattggaaaataatatcaaaacaacaacaaaaaataacatataataaattacaaaagtacaacatgaaaatatattaaaagaccgtattttctataaataaaatcataaaaatcataaaaatatttaaaattttataccatatttttgtaattttttgttatttttgtaatatttgtgaaataatcttattaaaaaaaaagagagagcccaatttcacattagtaatccccaagctgcctgaaataaaaacaaaaaaggagaaaataattaaaaaaaaataataaaaataaaaatgaagtagaaaaatcaagattcatacgattgaattggtggacgaagtggaaaaaagaagaggttctcgatcaagaaaaatgatccgatgactttaaaagaattgaacaaggaatggtaagcctgacgaagcaatacggcgtgaaggtagaagggaatgataatttatcattttgatagtagcataattcttataattgcacacatcgcagtataccaaacctacaacctttat

SEQ ID NO: 68610 - DNA, 821 bp, Cannabis sativa
  modified_base (313)..(316): a, c, t, g, unknown or other
tatataattaagggtaaatattatgttggaccatttgttttacaaaagtaactaatttgattttttattttgttaaatgataaaatggaccatgtattatctaaaatagttaaatagtacatgaactaattttttgttaaaataaaatttaataataatctgatctataagtgttatgacaactgtttacattttctgtatttgttcgtgttaggaattgtcttcaattttgttatattaaaaataagttatcgaaaattaaacgaagggatttatttttaccattttaaaaaatacaaggtctattttatcnnnnaacaaaacagagggtccaatcgataacttttacaaaatacagggtccaaaatagtatttactttataattaactaaatttttttaaaaaaaaaattataaaagtactttttttaagaaaaatgataaaagtactttaatatggaaattttttcatttttatactttaaattttttatttacaaaaatacttttttcagtaaaaatagtaaattatttttttataatatttatttatatttataatgagattgttttatagttatttatagttgatttctcagtttttttagtaatttttttttttttttgttgaataaaatgtatttttatagttttaaaatattataaacgtattttttaaataaaaaaatttaaacggtatacgatcaggccccacgaacaaaaatattattaaattaaaaaattaaatgtaaattttttaatttaataattatagaccaaaatagtagaaaaatcccacaaaattagataaatttagtaaga

SEQ ID NO: 68611 - DNA, 1634 bp, Cannabis sativa
gatgtagatgtagattctcctcttttcttgagttctctccataaaaaacgtaatgaaaaacttgctaatctctaaaagtgctatttatacaaccctaaaaataaacttaatttaaactcaaaatttatttttttgtaatttgtacagatatcgtacgaacacgaccgcatatgtggagtttaagtggcgtcttctgggtgctatttcctgggttttatgtcatgtgcttagataagtttttggtcataacttcttcaacatgactccgaattggacgattcaagatgttctaaaaatctgaaaacgagatctaaaatcttgttgagctccaagtccaactctacctttagagttatcaaaagttgtaattacactttactagtcaaattaagctctccaacgtccagcatttactaccataatgcgttaaaactgcatcaaaaatctctaaacatatgattagctgtcaattctcttaacaaaataaagtcacattaaccaacagttcaaagaataaaaataataataacaacacgagtaaatgaccatatttataagatatatatggacttatcaaatatgtcttgcgggaaggagaaaacaaagtttgaagtgcctaaatgtggagcacacacctgggcagcatgcaatgtgccacctaggtagtatgcatctaccacatgggtggcatgatggtgtttcactagtggtttttgaggtgtggtttctcgatatcaagttattttctgcacccgacaattcgagaccctccggaagaagattaagcatacgaattggactaagtgtttcaataacatgaagatatcccttcccacctggttggcatgcaacatctcggtggaggtaaacttggagggcatacacatagtcagggtgcagatgaatggctttcccaagctacatttgtaatcttgtgaagcaaccctgcgtaggctttactctagagtcaagacatgcctctcaagaaggaaaaaagataacacaatattgtatcgggagcacaggtcccctaggcggcatacacctatgttgattggggtatggatttgcacaataaatgctgattatggtgcgaattcaggtaataaatgctgatagattcccctctccctgtaaatataagttttccatcaactagaaaaatgttcacaattttcttgtaagcataaacactatagacatatttgtaaaatttctccgatctcaagaaacttaactaagctattcttgtgatcttgagtgttaaattaaagattagtacaactaaaaagagagtatgctattatgaccactcaagttggggccgaacttctataacaatctggtgtcactattattttcgtctttgctatcgtttacttattatcagttttacattgtatatgtgacttcacgtcaattgacaaaaaattgggtcgataattaatttataggtttggattgagtttaaaatgaaatttttttgataattatacaacattgttatacttaattattatgggaggtttatgaatatttgagaatgtaactaaaattcttagtcatatatcactattgtgtaattagataataagacaaatgtgttaaattttatatttacttcaaactacacc

SEQ ID NO: 68612 - DNA, 1203 bp, Cannabis sativa
aagcattgatgagtttcaaaatacagtctttaatattactgaaaaagttcttttttatctttgccaaaataagaagggaggcccatataccgttcatggaactcactaattggcataaccaaagtatggttgaaaaaattatgtacagacaccatcgtatttggagagaaagacatgaccgatttttgtgtattaagaaattgacttgaagctttgtgatgaatctgaagaacacgctggatagctaacgctgagttattcattattcgacaaaataataggctattatccgcaaatagtaggcgagtcactaaaggtgcataacgggtgagacgaagcccttcaagattatcatttgcttcttcatgttgtagcaagcgagatagaccttctgaacaaatttagaatagataaggtaataacatatcaccttgtcgtaaacctttctttggtgtaacatcccccacaacctcaccatttagtgagaaagagaatcttattgataataaacacttcaaaatcaaagttatccattgctcattgaagcccattttttccataacagctgctatgtatactcattccaccatatcaaaggctttgctcatgtccagctttagagtagagaaccctttttaccttgggtcttatgtttgagatgatgtactaactcaaaagcaatcaggttgttgtctgtaatgagtcagttcaagagaagaacactttgtgtttccaaaatacaaaaggaagaacttctttgaggcgcatggctaaaattttggacattagtttgtaaatgacattacacaaactaattggtctaaaatcacctattccacttgagtttttaattttttaaataagaatgataatagacttgtttaccaattccatatcatgtccattattaagtactctcaaaactatttttataacagtagaaccaacaattttccaatagtgttgataaacatagggtgtattcataatattttgagtacaaatataaaaaaatagagatatttgcagcataaatactaaatgtttttaattttatacacttaaataccatatcttttatttcaatgaattaaacacccaaagtttagtttcattcactcccgttactacttttctgctaaatataattgaaaatatttctatgccacatgttacttaggtattggtccactgcataatttt

SEQ ID NO: 68613 - DNA, 1493 bp, Cannabis sativa
acaaacaacaccaagggctgatgctgtttgacaagcagggagagattacagaatgctcgagggctccctaaacctcgagcattccaactgcagagactaatttttctcagcggggccgcgtagcagcacccaccgttggctcgtcatcggacatagaggggaccacagcatcatcagaagcaatagctctagcgcgcttaagcatgctacgcacagagtctccaacttgggtattttgacgcgtgaaggtcggcctggtaacaggggaagtggcagtgagagtagggggcaaggttcattgataacgacaaccttaccacctctggacagagagggatgactaggagtagatatcgcactagctttcccttttccttttgcagtatgggtggaaacagaattagtcataataggaacagggattgaagttgatattggtggcattacaggacctgaactggagtgtgagacaggcaaaggagaggtagataggacaggctgaggaaactggacagaaacatgagcatgcagggaattaggacttgaatggggagagtccacatggaggaattgatcaacagctcgctgcaaatcttgagcatcaggtctgggatggatacgagggaaaaactcctcgaaaggggtagagttagacagttcaaacgggttctttttatgaggggaggaaggggatgcacggaggatatccttatattccaaaagaggaggatgaggaaagttgtcacaacgaagcaggtacttagaacacttattataggtatgatcaacaaggccacagaaataacagaaatttgggagactctcgtacttaaagctaatccatcttgggtccgaaatcccacgaaaacgaatggtcatacctctgcgtagaggcttagtgatgtcaaggaggacacggattcgaagataaagaccaaagttttccattaaagagaggggaaaaatttgaaggagatcgccaatctcatcagcaatgaattgggccagttgggggcttttttgaccaaacgggattctatggactggaatccagaaaggaacatacctaatcgactcaggagtaggagtgggggagacatctgggtgggtaaaaaccatcaagaacttgtcgaagtgccaaggctgttcttcaagaacacgaagcctatctccatcacattgaaaggaagccaagaataacccagaatgatattcagagatttgggaaggaaatcgaagggtccaagcttcagacatggatttctcaatccaagagggcttagccgatttgggagataacagtttgaagaacaagcagaacgagtttgcatcagtaggagagtggatggaaatgtggtcgaaatcatgaacaaggctttcctcatcatcaagtgcagtgatagggttagggttgctggaggaagaagccattgttggtggagagagaaagaaagcaggggttgaagaagaaagcgatggtgatagggatagtc

SEQ ID NO: 68614 - DNA, 744 bp, Cannabis sativa
tttttcacttttagtcacaaatttgattgtgactaaaagtaagattttttgtagtgattgtgtttatagttaaatgatcttttatgagctgtgtgattgggttggtataaagcttcagaaaattgagttgatctatagtctgaaatggattaagaggtggtccaagttagtaagaagagaggtgtgtattgcattgataaatgccttggtttataatatttgggatgcaagaaataatactctatggaatgctaaaatttatactactataattttcttgtaaatagaattaaaagagagatttgttttaggttttctcaattcagaaaagagaatgctatagaggatattgagaggtttgaaagtttaagtacaacacattagttatgtttagtttttctttgtaaaaagttggtagtttgcaataaaattcttacttacgaaaaaaaatgaatttttatatctcatattgaaatttctaacttttttttactgtggggcggaatcttttttttaaaaaaaaaactgtatttttttctttcaaaaatactatgtattgtgttaagttttcaattttcacagttattttttttagttattccactattgttttaatcattctagtttgttgttttaccgttgttttataaaaagatagcatttttgtaaaaaatttcatgtgacagtaaaattgtaaatttttgtccaatgtccaatatttttgtaaaaatccaaaaaaaaaaa

SEQ ID NO: 68615 - DNA, 1108 bp, Cannabis sativa
gtcccaggtcctggtccgggtcccagttcaaggtccagtttcggggtcaagtcctgggtctcggtgctagttccgaagcccgagtccctggtctaggtcccccaggtctcggtctgagtgtaggaccaagtcggggttcaagtcctagtcttagttcgggtttccgatcctggtccaggtccaaatctaggttctagtcacgggttcaagtcgagatccaagtccgtgtctgagtctcggttttcgatttgggtctcggttctgagacccgggtcctaggttccagtctgggtccatttttgggtttgggtcctactactagttccgatttcgattccgtttctgggttcgggtttgggtccgggtctgggtcgaggtctgagtgttggtcctagtccagggttgggtatgggtccaagtcctgatccctgtcatggtcttggtttgggttcagccctagtttttgggtttggttttggcttcaggtccaggtctcggtctgggtccaggtcccggtcttagtttgggtcctaggacacaagtctcagtctgggtccaagtctcggtatgggttctagtctgagtttgggtttaggtttgggtcctgttacagtcccatgtccgagttctagtcccagtcctggtccgatcacggtctgggggtatgtgttcgagtccaggttcatagctagatctatgtaatggtccgagtctgagtctaagatcgggtcctaggtttaggtctaacccgatcctggacccggaaccggaatcggaccaagactgggactagaacccagacatgggactgtagcaggacccaaacctaaacccaaacttagactagaacccacataccgagacttggacccgaagccaaaaccagacccaaaaacaagggccgaacccaggacccaagagccacactcagacctgggacctgaaacccggacccagactgggactgggacccaaacttagacccgaacccaaatccggaccaggactcagatcggacccgaaccttaaccgaaacacgaactttgacccagatcgggacctacgatccaaatatagatgggggacccagagctgggaatcgggccca

SEQ ID NO: 68616 - DNA, 846 bp, Cannabis sativa
tatgtttattttttattatttttaagtagaatcataatttctgtgatcatttttaaaatttttaaccgatcttatttaatttgataaacttaaaaatagtcctataaaagagaatctattagctcttgcatttttctttaatctagcttagctttttcttttaagaagttttaattgattaatttttacttaatgtctattgaatattattgtgtaccataaagttaagtggtttgtttttgtaagttgtgacttattttgtagtatagttgtatgtgctcagtgtattttgtttggtatcaatatatggtggtggttgttttgtgtttatcctaagaatatcgtgaagtactagtgacgcatgatctgttctgcagttagtaaagataagttttttttttcataatataatatttcaaaatattttcatttaaataaaaattttcactataatattaccattaagtagtgtgctaattaaattttatactttttatatagatatatttttattttactcacttagtcaagaggcaatgacttcaaaagataagttttatcacaattctctttcttcaaaattttactatattattaatttatataacataattttaaatttgttattttaacatttatatatgaagttactaaatttatttatttggtgtttttggtctaggtatcgacttttttaatagcaattcttactttcttggttggattaagttggactcaaggaaatctcactgttattcaggcggaagttgtagctttagtaatggttgcattagattcgttgctgaaattggacttcctctctattcttttgagcctgattgttta

SEQ ID NO: 68617 - DNA, 992 bp, Cannabis sativa
aataaaatattattcaaaattgactaaaacagattaagttgatttcatgttatgaaactttgactatttttttaactattcttttgataaaaaaaaacagtagacgtctttaatgatatccttattatttattattattattgttattttgtaaatataattacatcgatcaaattatcattagcatttttcattgtccttaactataccgtggatcataagattgggaaattgtaatagaaaattttgtgttattttgtgaaaaataaatatattgtgtagatacatttaatacatataattatttgcaaaaaaaaaaaaaaaaattggcaatattgtgtcattaaaaaaaagttgttgcaaggttatcaaagaaaacgttctctcatgtatttagagaaaaaagagatatcgggatcatatgtgaaaattgtcaggtgatttgcttggaaaaacttaatatggtataggtgagcctaaataaaaaatttcatctattcttacctaagcctaatgttataacccaattaagtcattttgattttaaaggacatgttattgacattagtggataaggctacgtattgcacccttattgataatcgggttgtggacaagatggattgatttcaatcatgtatatcaagttccaatagtttttgtcatttgcaagttatatttttctttttgagtttgaatgttaacgttgagtattgggagtaatcagattgaaaatttagttttataacaattgaatcttgtgagtggcggtagtgtggtgtaaattcaagtaaggcttggagcttgctagtgtttttttctctttagttcagtttagtgttgattattacttgagggcgagtatagattaagtttgggtaggctagttttaggtgcattttataaagtgctttagaggcatatttcaattgattatattcattttgtgtagaattatttttgttttgtatttatttcaggtttaaatggta

SEQ ID NO: 68618 - DNA, 536 bp, Cannabis sativa
  modified_base (279)..(279): a, c, t, g, unknown or other
ggtcacaatacctataacagagaaatgttaaaaggcacaaggtgtctttcattctcttatatcttattattagtataattaaatattgtcttaaataatttaatgtaataatttttataaaatatcgctaacaaattatagaatgacacgtctagaagtctaaacaccactattatctaataacaatgctctaactaacattatgatcataaagtacaaacaaaaattcctaaaaatataagcatacaataattattgtcaatatatatatattttttnttttaaaaaaaaaaaatctttattagaaaacgttgaccccattcttagggaagctgcaaaacatgataaatggcgctaattaagactatctctaactaacaacaaaagaacacgagtcgatccgataggtacgagtatgacccaacaataaagaaagagtattgttattagacaccttaaggtgcttaatgttgagatttatgccataaaagtaagtaattaatggataataaattacagaatatatgaaatacaat

SEQ ID NO: 68619 - DNA, 1801 bp, Cannabis sativa
ctgttttggttagattaccatcacctaattccacacaatgcacaaaaacaaaacaaaaagcactgcttcacttctatctgtggtgacaatgtgacatcaacataagtgtaagagttttcactagtgggtttttgttgtaagggtaaggtaaggggttgagattaaggcaatctcaaactcaagtattcaaaaagtttggcatttactcaaaaataaacttaaaagtagggtccacttaattgtaagccctctactataattataccaaacatatgtttggttttacattctcattccaacccaaatctccataccaaacaccccatacgtatctcttgtaactcttaattgagatttgtcacattaacaagatcgactgaaagcatgtttcgagtcaggttcatgatagaaatattctaaaattatgcatgttaaccccctgtggatatggctaggattggttctgatattagaaactgtgcacagttgaaagattacgttttcctttaactcttcatttcgtcataactataatgaccttcactatatgacaggacattatgatttagcgagacatgccaagagagtgactctaaatttccataggttgaaatttgctgttctgttattgaatcttgttctgtcattttcttgcgctgtatgaatgttgcaggtactggctgtctgttggtgctcagccttcagaccctgctcagcgcattctttttcgagcagggttattaccaccaccaccaatggtggcaatgggacgaaaaggtggtccacgggacacacgccctgtagatcctttgagcgggcggtttacatcagtaaaggttccagctaatcctgatcaagacaaggactccggaagccctgaaaatggtggtaaagatggtgctactactacataaattctcaactattttgaagatattctgtttcgaaaatattctcttcatctaggagtgtaatttatatttgattacagaacaagccacttggttttcctccaaaccatgaaaataactagcattacttggagacagcagcggcttgttgtgactacatgagccatctttcctacttagtactacctttgtattgattgttgaactttctgtttgttccatccaatttcgtcggccatcttacacgagcaaatttgcatatcatgacaatttctcataatttgcatcagtgttcatggaaaaagattgtcgctctagttttgttattacaacattaacaataataacacacttctgaatttcggattggatccatttattccctaatcttcacgtgcaaacaaagtatcgctcggtttaacaactttatgcatattttattcttcttgaaactgagatttaagtttgttttcatgggatagatattgttgatggagtgattatgaatagaactaggggagttttcaagtgcggattttatattttagatttagttcaatccacacaaagtttaaattcaacgatgaattgattatttttattattaaattatttaatatttattaaaaatgtatttttgttttcacataactagcaataaaataaaataaattattgctgttttatgtgtctaataacaaactaaaataaataaattcaaaggaagaagaaaaaaattatatgtaaaaaagaatatttaattttgttttgaattatacatttatgatctattaagttttgaaatatatttgtgttctatgtattatgtaatagattttttattttttttttacattaatatattaattgtatatacatataggtgcact

SEQ ID NO: 68620 - DNA, 1467 bp, Cannabis sativa
  modified_base (1402)..(1403): a, c, t, g, unknown or other
aaacaaactcatcaagattttattaggcttatgttatatcagaatttgaaaaactcaacaaaaatattgacatacgaattaacagttggaacacttgaaaaaaaagaaaaaaagaaaagaaacactaactctgctacacatatggacaaacatatgacagacaaattttaaagccatgccaaccgacaaactccgagaaattatgaaaccaaatactaccaacaacagcaacaatagcaataacaataaagatagtaaacccagtgatcaagtttgatgaagtgaagataaaaaaactgacagctttgagatcataagtgaggcagaacaccccatagcactcaggcttgttctttgtgtcttcagcttgtattgggatcggagcttcaacttgactgagaataaatacgaatataaaaatgaaatattatatatatatatatatgtaagattacgaatttatggtaataaaagtagtaaaaggagcttacttgggagcaacagagcaagaaattctggcatattgagttggaggaagaggtcgaaaagcacaacgtcggtgtttgtgaagatggttggacaagaatgagatctgggaagattttaaaaggtgggtcttggagtatgatgatgatgaaacatcagctacggccatagtagcagaggtagcagccattttcagagaaactaacaaataaccaaaagtgacaaaagaaaaaaaaaaggtgtttgataaagaaaaggactgtctgttttggagggatagaagatgagagagaggttgaagatgatgttgaaatatagtaagaagaagaagaagaaggagaagaagaagatattagaagtaatggatagtttaagctaaggccatgcaaatgacagttgggaacaaaacctcatctctttttctctttgttctttggatttggattctctgtttttccgtggccaggatttgttgtggctgatatttgataactcacacttggatggacttgtgtagctaaaaatcttatactatcacgtggtttttacattttttttttttgaaaaaaaaaattactaataacacaagttcatattattaatgatatggtttttcatttaatttaattttattttatttttagtaaggttgtttggtggctcgttttctagtattataatttataagatcaatatctttaaaataatgaagctttaaaacatttaaaaaacatcactaaaaagatactatggcatatgttttaatttatttttaaccaggaaactgttagtaacatcctaagaggtggtaatccgagtagtcaaggaagggatagatgagtttggacaaaagaatcaaatggtctcttttcaactaagtatgcctatcttattcaagcccttgatcgggctcctnngtgcaacattgctctggcactatggaaaaaactttggaactcaaaaattttggagcgtcacaaa

SEQ ID NO: 68621 - DNA, 655 bp, Cannabis sativa
tctgttgagctatttttttctcaagttgagtgtgtgtattccttgtggtaattctccaattcttagtttccatattttttacgtattgtctaaatcgggtttgggcagctgtgtttttaatattgttaatgggattgggcttcatgaaatataactctaagggctttttttgtctttttcactaattggtaataaatatgtttttaccataatttgatttcacccaccttgtcaatcaaactatccatcttcttaagccaaggtcgtcttcttcgtggtatccatcatctctatattgtgcttgctgcgaaacaatgggcaaaaaggctgggcgcctcgtcaaaacttctgcattgactggtgatggttcgtcgtcaccttcgcctacagtggaacctagcttgtctcccactaggactgaatcgcctccatgcacaccaaacccaggtaagacttcttcctctgtaagtcttccaagacgttttacacgctccatgtccattccttttgcgtcgtctaaggatcatccttccccatccaccacgttaccccaccctctcactgagtctgactcgtctcagccccccctgtcgaagtctaaaccaaaaaggaaaattgtctcctctgatgctactgcttcgtcagtggctaagaa

SEQ ID NO: 68622 - DNA, 1107 bp, Cannabis sativa
ttgtccagttggtgtttaaggtttgagttgagtcatggcttcaagtagtcgacaggttaatgagttagatgaaaagtatgcacagatacaaattgaagatgaggaagagggaatattgattgaaggggaggttgagggtgaggagttggtgtttgatgatagatggtgccttgtaggaaagtttttgacaggaagaagtattgactttcatgccatgagatatttgatggcttctgtatggcaaccgggaaagggggtctatattaaggaattggatacgaatcgatatttgtttcaattttatcatgaaattgatattcaaaatgtaatcgatggtagcccatggacttttaataagtctcagttgatctttcataggctgaagagaggggaaaatcctaggatggtacatcttcataaactcgatgtgtgggttcaagtccatgatcttgtatctgggttcatgatggagaaggtggtgcaaagtgcaagaggatatgtgggaacttttgttaaaattgatcctaaaaacttcaatggtatttgcatggcgtgattacttacgggttcaggcaaccatagatatcgagaaaccattgaaaaggaggataaagttgtgtaaggagaatggcgattggatttgggccattttgctttgtttgtggcatcattgggcattcagaatgattttgtccaaaacgatttgagcaagacttagatcaaattgttaaaccttacgctattggaataaaggcgcagcttcagaaaaggaattacttaattggagcacaatggctcaaaactagaaatgaagatcctaaaccagttgctggtggtggcattcttcggacaggggctgatgcccaaggagttgatgaagcaaaaatcatggaaattgattccatgatttttggacgtaatgggggacccttgattttaggtgatgacatcccgaggagtaatggtggagatatccaaaaaggcaagaatgtggtggaaattgaagatactggtaatatggaaagagtcaacttttctcataaagagacgactctttatttggaaacaaaaaaaggaggatgcatacaggagacgtgaggggaggga

SEQ ID NO: 68623 - DNA, 1417 bp, Cannabis sativa
  modified_base (37)..(48): a, c, t, g, unknown or other
aaattccgtgaaactgtatttttgttgtttttttgtnnnnnnnnnnnntttgtgaaattaacccaaatataaattaggtattttctttattaaataataataaaaatacaaaataaagtatttttaaaaaatgaaggtgtgtgtactttttaacaggagatcttgattcttgaagggaccatatatataatcaattaaacaaatactacaacaatactttaggatgtccatcaaatagtgatgcatgcatcaagattaattacgatcgtgttggtctataggtgcgaacttgttgataatccatatgaaaaagtagatggtatgataaacagcaatggtgataagcaacccaatccaagccttaactgacttgtggtagatataatctactctatcaaaaatatggttgggacacactaaggacatcccatcgaggaaagtgagagctgtaaacgttaaagtgacacaaatgatcatggtcaagagccacactccaatcctactcctaagagggagtcctcccactattaaaagcacaacactaagagaagcaagaaaagcaatgctgttgaataatatgaatctgagatagtcctcttcccaaacataagccaatactcctgttcccgccatacatgtgtgtttgtcgcagttaaatggatcagtgtcgcctttattgtcttttttgtttgaagtttcttgccaaacaccgcccggtggattgattgcggaattgaatgttgtggatgctattacagtggcgaccaccatgattgaccctctcatttctttcaaccaatctctttggtgattcgttaggcgctcaatgatgatcatccatgacttccaacatgatgattttggatggttgatacccaatagttgtttgattttgatggtgttggagtctgttgggagatgatgatgatctaagagatctgtcggtttgtatcctttcgagtttaaggtgtcttctttcactcccggaatggaaaccaagtattctactgtctgaaatagaattcattgtaaattaaaacctttttttttatagtaatttcaatatagaacttattgataacattgtcatacatagattaaatgtaaaaatattgagccacatataagaatatgtactactccactcatcgattgattttgagatagaactgatctattgtataactgctgggatgttagatccaataggttggaaggcttatgggtgttggttattgttttcaatttttaaaattgcgatataaaaacatgagaacagaaatttatagtttttcaaaatacaagatatgtttgactaatattttctaaaaattctttttgaatttttttactgatttttttttcctcaatattctacatttcgatacgaacctattagctgatatggttgacagtt

SEQ ID NO: 68624 - DNA, 690 bp, Cannabis sativa
  modified_base (217)..(225): a, c, t, g, unknown or other
tcaaataaatttaaataaattttttaagtataattagaaatagggcctttttcatttttacactttaaaacaatttgttttgcatttttacaaaattctatataaaaattcctattgcaactagcgctgcaacctaaattgtaataaaaaatcgtatagatcccatattgcaactagcgctgcaacactatggaaacccaaaccgtaaatttgaaannnnnnnnnagttaaaaaaataatatatggggtaattctccttaaaaatattgtttataaagaatgttaaggctatatttggaaattgtgaagaaaaaaaagtagaaaaagtgtagggaaaaaatagtgaaaaataaaaaaaaataataaattctcatatttggtacggaaagaaaaataataaaacattcaattcaacaaaaattttcatatcaagcttgaaaaaattgatttatttttttgttttattcctatattttctcctttttttttcatttatcaccaaaattaaacttctaaatatataattgaaagaattcaaaaaaaaaaaaatcaccataaaatttcttatatatataaaaagagaaatgctaaatggcaccagtggtgcctaacaccatcctatgtgtcagtatcactattcgtccaactaggtatcgggtcccacaatagtttaatataatagtttttagg

SEQ ID NO: 68625 - DNA, 1901 bp, Cannabis sativa
tttactttattacgcttgactaacgggcttatctattcattaagtgaattttcattttatcgttttttgagaaatatttacaaaaatatgatattttttgaaaaacatatttaatggaaacaaataaaaaatatgggaatagcaactagttaccttatactatttttaccatattttttaattttttttttaatttttccgataaaataactttatattttaaaaaaatatttttttgcagagtataaaaatctactaaatcttattttccattttactgcatactttatctatgctacatcttttaagttgatttggagcaccttttttataagacttctgccatgttttctcgtggttattattatggaaatattgtcgttaatttgcaaacaatggaaataaattgtacagatttgtaataaagaaatctaggctaaccttgtgtattaactttcttagacattgaatgaatgaaagagagaaaagagaaacaaagataaatgaaacagagagaaagaatagaagaaagaatgaatgatttccattacagagagagaatacaagatctgtatatatacagattactgatgagaagaagagctatgacagctcactaacaatacaacagaaattagttagagagactaactaactaacagacagtcctaaccaacatcactaacggttttaaccatattgacacccttaacactccccctcaaactaagaattgaagcatcttcaattctgagtttggctctgaaagaactgaatctgctactggaaattgacttggttaggccatctgcaatttgatcaatggctgggacatgtctgacatcaacaacatgctgcaagatcttctctctcacaaagtataagtcgagttcaatgtgctttgttcgggcatgtagcacaggatttgctgtcaaaagcacagtactgagattatcacaccaaaccacaggagtccttgttgaagtgatccgaagttcagacagtagtgacttgagccatgtaatttctgcaacaacattggcaagggctcgaaactctgcttcaatactggaccgtgaaacagtgtgttgcttctttgaagaccaagcaaccaaatttgtcccaaaataaatgacataccctgaagttgattgtctgtcatcaacatctgctgcccagtcagcatcacagaaggcagtgacatcaaggtgtgggggtttcttcagatgcaaaccatggttcattgttccactgagataccttagtattctcttcacggctacccagtgagcatgaagaggattgtgcataaattggcatactttgctaatgctgaaagagatctcaggtctggttatagttaggtattgaagagctcctacagttgacctgtacaattgaacatcctcgacaggatcactaccataggcagacagtcgaagtccactggtcattggagcagatgatgatttggcctcttgcatttgtgtcttgacaagtaaatctctaatatacttgctttgggacagatgcagaccatcagtggtatatttgacctctatccttagaaaataactcagaccaccaagatctttaagagaaaatttagtgttcagattggatataagttgatttaccattgtgggatcactacctgttaccatgatatcgtcaacatacaccaaaacaaatattgtgccttgaggagaatgttgtataaacagagagtgatctgatttggaagacacaaaaccaaacttgcaaagagactgatgaagtctctcaaaccaagctctaggtgcttgtttaagtccatacaaggctttgtgaagcttgcaaaccagattaggttcagatgtaacttcaaaccctggtggttgagtcatatagacctcctcttg

SEQ ID NO: 68626 - DNA, 722 bp, Cannabis sativa
gttcttacttctttcatttcatttgatgaaaagttaaaactaagagcattgctattaggtactgtcctgaggttgagttctgtaaattgttagcgattttttataataattattatgttgaattaatatatgtgagactcgatatttaaaggtactaatatcggtatgacaacttttagtgtactactggtgtctaataccatcacgaagtatcaaatcgatattattgttcctgtaattaagtattgtgttctacatgttttaatttaataattattatgaacgattgatattttttttttcatcttttgttctagctagaaaactacatcatagcattggcatgaaatgccattttgcgaatgtttagtaatttttataataattattaaattaaaatatgtgagacttgaattttaattatatttatagtggtatgatagtttatggtgtatgtcaaacgccattacatagtgttatatcaatataattgtgtaattagataacgagtttcacatattttaatttaataattattataaaaaactgctaaccactcgcaagatgttatttcgtggcaaaattaggcatctctaggacctcactacaaaaaaggttaatatcttagtcgcaatataattttttttgtaattaattgtgatttttaattacagtataaaattatttgtgactaaaatataatatttagatacaataaataa

SEQ ID NO: 68627 - DNA, 825 bp, Cannabis sativa
  modified_base (402)..(403): a, c, t, g, unknown or other
gcttcaagagagtaagtcacacaagttctattccatgtcaagcaaacattccacaaacccaagtagaataaaagtgatactatccaaaaatcaatacttaacatctatatgaattttttttacaaggcatccaatttaattcaaagagtttatgaatcaagcacacggtttaaatttcaatccattgcacaaataaacaatagcaattcaatcaatatttcggctcaattatgaacacatgaaacttaaacaaaaactaaactaaactaaacaaaaacataaactgaaaaatttaaatgcctccccccaaactaaagatgcacattgtccccaatgtgagataatattataggtgagagagacaaacctgaacccttatcagaaggggtttggtggaggcgnntggtcataaggataaaaacggggtggattcgccaagtaattaggctcctcaatcccaacattcatccttgtgatcagtgaattcagttgctacacttggttttcgtcaaatagactcatatgcgccatataagtttgcatgtgaatgttctgcggaataagataattcaactggttatgagtgtactgcatggcagggtcaagagggccagcaacacgttgtggtactttttaaaatgctcctcttcgcgttcaggaggatttgggcctccttgctgtggtggagcgggtggttgaccatgtggataaggtgctttaaatctaaacaccgttcccatgtcaatcatgcgctctggagcaaccttagtatcataggagtattgtggtaccccttatttccacacaaatcagtgataacatcag

SEQ ID NO: 68628 - DNA, 592 bp, Cannabis sativa
gtcctccactatagcagaggcagctattggaggaactcagaaacaagaagttttacaacataaaatattcttagctattaaatgtgtatttgtcgagtttggttgaaagaagacacctaaaataccattctcatctagtaacttgcgaagatcacataccattaaatcccaccccccacatagctccggcggcctaccaagcattgccaccgccatgttacaatcagaaacaatactacaccgctccaaagacagcaacctagccaattcaatcccatgtttgatagctaaaaattcagcaataataggaaaaaatggcttattcattaaaataccttgtgaggcaatggcatttctgatgtgattacgaacaacactacctatactgcaacaaccagcccccgcatcaattcccgcgtccatatttaccataactgattccacctccggagccctccatttgcacttttgcttagcctcacacacttgtccacaaccctttttatcccaaaaatcatgcaaaatatcagtaacccattccaactccttctccccagtaagaacaaaagttttatgcatcatacaattgcgc

SEQ ID NO: 68629 - DNA, 1321 bp, Cannabis sativa
tcatataaatgccaaaaataaaaatgtattttagaccccgaactcggttcagcccaaaatatctgattgtcactataccacgccgatttgtcagaaaacacttacaaaacgacagagtaaacatactatataataatatagtccataaatacattatatcagaaaattatgattttacccttctcaggtcataattacgaaaaatacccctatcacaccaacggggtcttaaaatgcaatacgcgataaaagtatcacatattaaattatataataacataattcctcaataatacataattaatcgagttaggattgctgattattaaaccttaggttattacaattttggtgctttcattgagagttgaagaaagaattaccacagttgtcatgtacaacaatggttgtaacacgcaaagcaatggtcaaactgtcaactcaagatggtaagggcgatgtcgctaacaatgatgagaactagctcccccgacaaacactcagatgggtgttgcaggggacaaggaagcatctgaagtcggcaatcgcccgaatctagaaacccaagcttgcgataaacaagttgttgagtatcccatcgatgtggatatgcgagatggtcatggagatgacccaaaagattaccacaatgagaactacaataaagagtacgaagaagagtattatgagcaagatcctgaggtagtaaggatggcacatgaactcattgaaactcaaaaagactggcggagtaggaagaattctcctaaaaatttcaagaaaccttggcgcgactgtaagtgaaagttggtctctcagaggaagacattcctaccccacgatttaaccaccccgaagttggtctgtctgccccaacaaatgatgaaggaaaatatgtcattggggctcttcaacaaaatcggcaaacaagttccacagaacaatagaaccacaactgactaacccaagcaaaaagaaaggaatgctcatgccccagagctgggccaactaatcaatccgtggggcagagttgtgcttgacaatgggttgggtgctcaagtgcatgatcccaatgtttggagatgaacaaagcaagcaaaagtactacaatgtcttggccatgttagttttcgtggtcaaagaagaaaatggaagagccatgttagttatcatcgaaaattaaatacttttaaatttcttattaccaaaatccttcttatgtttaggtaagggcgcaataaaatcatctttttctttttttccaaccgattacccatatctaaagcttttggatgtttagtaggatttttttttttttttt

SEQ ID NO: 68630 - DNA, 926 bp, Cannabis sativa
cctctgtcaacttcatgggttctttcatcttatgtctgtaaggatccatggagaagggaccaaatcgaagcagattggaagcagccagagttggaaaaacacaagttacaggaacggttattggaagaatacaatgaaaactttttataactgtaataaactgccacagagcacattagatgggcagacgctcttgtaaaaagtttattatccactatacggtcttttataacttcttctctattttttacgtttctcttatatggtttgcatttttataaaatttattttgcaaaaatactaattcataaaattttatattccattttaggttttctactttctccttttccatcttttcttcttccacacactaaaagcttcaccagccaaatcgaaatctgctctcttgaaccactttctgctattgttttggatgatgctctgctttgacgacctttgcttggaccaagttctttggaccacatctgctctcgaacaccacaacctcaaggagctttgggcatcttcaatgtttactgttgttcttgaattttacatttcaggttagtttatcacttttatcattcactgtgatttcattatttgagcctcatctcataaacattaactgcttgtatttgagtacctaaagtgtttttcaagaatcatctatttacatgaaatttgaattttacagtatttggtgactactgttttagttttgtgattaatttttagggttttctttttgagagaatgaggacactgaagcagtagctgaaaaggttaaaaatggtcaagcaaagaaaactggcaatgttacaatgatgaaagttgagaataatactatcatttttagccttcattatactcatgtattgtattaaaagaaagctagtagtgcaatatactataaaattact

SEQ ID NO: 68631 - DNA, 772 bp, Cannabis sativa
tcccactcccaacttgttgtcaatcaactcaacggatcctaccaagcacgagaagtgaaaatgacagcctacttaaatctggtaaaaaatttacagtctactttcattgagttttctattgtgcagattcctagaacggaaaatagccaagcagatgcattagccaacctcgtctcagccatgcagacgaagtcaacaatagttatcccagtcatccacttataatggcccgccgtgtggagggaaaccaataatcaaatttcaaacccagtgagaactacgtgttcgatgactgtaataatcgattatttacaaaatggagaattatcggtcgaccgcaatgaatcccatcgactccaagcaaagaccgccagattcaccatggtagatggacaactatacaagagatcatttttcagacctcttcttagatgtgttacatcttacgaggtgcaatatgttctcactgacctacacgaaggagaatgagataatcattctggagcacggagtctcaacaatggagcgctcaccgtaggctactattggcctacaatgagggctgattcaattaaccatgttcgtcgctgtgacaaatggcaacaattcgcttaagtctcacatctatcgcctgaaagattaaatcctattggatccctttggccatttatgaaatggggggtggatatagttggcaagctacccaccgctcctggacaacgaatgtacacatgctcgcgttaacagactacttcatgaaatgggtaaaggt

SEQ ID NO: 68632 - DNA, 762 bp, Cannabis sativa
attatttaattagtaaaaatatttaaatatttaaaagatttagagaaattataaaaaaaaaaaaaaactaatctatgatataatataaacggtaaattagataataaaatgaaatagtatttgagtaatgtattttaaaaaaatagagtaaagcatgagtgttttaagaattgtaagatacctttaaataattcttttagaaaaatgctaaaaagtattagtattaatgttacgtattaatattattattgttctaattaaatatagactattacaataacttagtagtaatgctctttgttttataataaattagggaagaaattataaacagcgcattaaatgatgatgaatcagcaatgggcgaaaactgttaagtgatggagacattattattaggtgaactatacataggtaggagttaatcggagacaagatagttggcatctatatatagagtagtagtaaatagatcttttccgtggacctgaaaagatttggtcccagcagttagaaaaacgatgtatacacatattacatacacccacaaggacgacatactccaataagaggtatatatatatatatggattagggtatagcgctagctcagtaagtattttggtcagtgtgtggtgaaagctagttagctagtaaattcagtactactagtatttgatagagagtactggacaatcatgatgatgcatgacgtacatataggagaataccttaggccctatatatggtactgttaaatgt

SEQ ID NO: 68633 - DNA, 1065 bp, Cannabis sativa
aaaaacttcgtgtagaataaaataaaaatatacacgataaaaaatacacaaactaaacaactatacaaaaaacataaaaacaacaaaaaaataattacaaaacaactaaaaaacacttaataatataaaaataactataaaataacaaaatacaactataaatcaacaaaaaaaaaataacaagacatcaatctcttaaaatatgcaaatcatttataaatcaactctaaataaattacaaaatatagaaaaaatatattacttttattgataatgtaaaaaataaaaaagatatacaagagtgctcttaattattttgtaaaggagagaaagagtttaaaaaaataaaatataaaaaataaaaaaaaaattgagaaaaaagagagaattgaaaaaaattaaaatagagaagagaaagaaaaaaaaattagtaaccaacttaaaaataaaagaaaaaaaaagaagtcagcttaaaaaaatataaagaaaagaaatctttttcaaaaaaaaaaaactttaataagtaaaacacagttaaacaaaatataaatataaaaattattaatgtaaagttttaaaaaaaaaaaattagtatacattttcctttattaaagataactttcattaaattgttatcaaatggatctctaagcaacacttataccagaaaatgttttatcttcagtaaaccaaaaaattctgtcttaaagtaaaccagaaaaaatgctttcttttaagttcattatatatataaacaaacatatatttaaatacttatgtgctatacaaagaaatgtcaacttattcataagcagtggagtgtaaattcattctttgtttttgcattgaacttacatagctgtcaaagaggtgcttaaacattaactttacaataaaaatcagaacttgtaagaaaccataaagaatgaaatatgaatccaaacacatctaatacatgccacaattaaattctagaaaaataatgaagaaaataagatgcttttacttaaataagacaataataaatgattatatattagggtcttcacttttaaataagacaaa

SEQ ID NO: 68634 - DNA, 1467 bp, Cannabis sativa
cttcgatcgggtcatactgcaccagtgtgccactacaggttcgacaagaactgggtagtgcctcgaccaaatccaccccctcctagagctcatctcactgaaattgagttcgaatatgaccctcaagcctacactactaccatggttcaagactttggtgatgacaacacttggtatgctgacactggggccactgctcatgttgcctttgacaattcgacctttgacactcaacatccctacactggcacagaaaccgtggctataggtgatggtaagaaacttgtaatttctcatataggcaattctgttattccatcttatctcccttcctgtcctttgcacttacaatctattttacaagtccctaacattactaaaaatcttgtaagtgtttctaaattggttgatgacaatgacatctttcttgagtttcacaaaaactgttgttttgtcaaggacaagaaaacaggtgctcttctcctcaaaggaaagcgtaaagatgggctatacatgcttagtgatggttctgtcaagtcaaattctgccttagagtgtcttttaactactactactgcttctgttcattgctcttgttgtaatctgaacacttgttcaattgtcaatactgatgtatcctcttgtactcaattgaatatcaataaagaaccattttctggttcatctatgcctattgcatgctttgcctctacaggccctgatgttaacacttggcatcataagcttggccacccctctatagctactctcaccaaactacttcctcaactacctcataccgggtcaattaagaccctgcagttttgcaatgcctgccagcaaggcaaaaatcacaggttaccatttaccctgtctcaaacaaactcgactcaaccccttgaacttgtgcatacggatctttggggtccatcccatataccatccaaagatggattcaaatactatattcatttcattgatgattatagtaggtttacctggatctatcccctctccctcaaatcccaagccctggatatgtttttaaaatttaaagcaatggctgaaaaacagtttggtctacctatcaaaggtgtccaagctgatggtgggggtgaatacaagccattcaagaaatttctatctgatcaggggatcattttctcacatccctgccctcacactcatgaacagaatgggagggctgagaggaaacacaggcacatcattgagactggtcttacacttctagcacagtctcggttagatttctcctattggtggcatgcttttcagtatgctaccttcactattaatagattacctaccccaattcttgatggcattagtccttttgagtgtctctttggtcaaacacctgactacaatatcatgaaacccttcggttgtgcatgttttcctcacttaagaccctataactctcataagatggatttcaggtctgag

SEQ ID NO: 68635 - DNA, 1711 bp, Cannabis sativa
gacctcttcgcatggtcacacggagacatttttagaatagaccattctgtgatgacccatgcacttaatattgatccaaacttctgacttgtgcaatagaaaaggaggttgttggaaaaagagcgcgaccaagttctaagagatgaagtcaaaaggttatgtgccaatgactttatcatcaaacaattctatatccactttgggtatccaaccccatggttgtacccaaaccaaacaacaagtggagggtgtgtgtagatttcaccaacctgaacaagcatgtctaaaggactgctgtctacatccaaggatcgaccagctagcaaatgctacaactgaccatgagatcgtaagcttcatggatgcttattcaggatacaaccaaaataagatgcacccaccagatcaagagcacataagattcatgatagacctaggcctatactactacaaagtcatgcccttcgtgctgaaaaagtaggggccacctatcagaggctagtgaacaaaatgttcaaagatctcattggctgcaatatggaggtgtatgtcgatgacatgctagtcaagtctaaaacaattgggggcatgtggaggatatagatgaatgcttgaagatcctttgagagcacaacatgaaacttaaccacctcaaatgttcttttggagtaggctcggacaaattccttggcatcatagtctatgccaggggaatagaagtgaagccagacaagatccaagcccttttggacatgaagttgcccacaataatcaaagaagtacaaagcctaacgggaggtattgttgagctaagaagatttgtgtccaaatccatggagaaatgcatacccttctacaacgtactcagaggaaacaaaaaatttgagttgatagttggctcaacctcctatcctatcaaaacctctggacaatgaagattttggtgtgtactggctatcacagaatctatgagtccaatcttaataagaaatgaagacgttatacaacatctagtatactacatcagtagaagactaattgatgttgaaagtcaatacccactcatggataagctgacatacaacttacacttagcatcaagaaatctaaagtcgtacttccaagcttacccaataagggagtacaccaactagctattgtgataggttttgcaaaaacctgaagcgtctgtctgactactcaagtgggccattgaactcgaccaatttgatatcacatatcaactgagagtggccataaagggccaagcccttccaaactttgtggttgaatgtaaaagaaaatgcaagagcagcaacaataacctgaaaaactaacatggaaatttcatgttgatggaagttgcactgaccaagtgtctagtgtaggcattgccttcattacacctaggggaaacagctgcatggggaaatcaagtttggctttaaagcctctaacaatgatgttgaatataaatccattatcgttggcttcaagctggtgcatgaagtacgggctgaccacctggacatataaactaactctcagctagtcgtaaatcaagtcctaggagaatacatttcttgtggtgaaagaatgatagcctatttaagcaagatccaagacttgctaagttggctcaaaggctatacaataaggtagatccctagtaaacagaatgccacagtagatgcacttgcccgtctggcaa

SEQ ID NO: 68636 - DNA, 506 bp, Cannabis sativa
ttacataaaaatatgctttgaaagtggtcgtccagaccttagcaccaaaacttttcaaacttttgaacggaaggtacgtccaaaagccaccaatgaagagtgatgttgtggagcaacatgaaatttcgtggtcttcaaacctttacatttattagtaatattttcttagatgctctccattccaataccattgtactaggatgagtttcattttgtcaacatacctacccaatttatattctcccaaacttgtaacttcgatgacttagaatgacccttccaaatttagtctgagcacacctactacactatattttgtgtttaagagcactcttctgaccaccatatctcccataaaaaactttttttcccttacttgtttgttgaaatatctagccactttctattgatgggcatgaagccttaagattgctagatctcttctttcgccaagtttatctgagcactatattaggacattccagttgacatcttgatcgttggat

SEQ ID NO: 68637 - DNA, 805 bp, Cannabis sativa
tacctaagttagtgacacctagcagttctaaggcagcaaaggattaatgagaatccttttcaattaaagaaaatcaagaagaaataaagaaaaaaaaatcaaaaattgagaaaaaccatatttctttctctctctctcccttgttcggccaccacaaaaccagaggagaccacctcaattcagcttgttttttggagtttcagctagggattcaagactcaagttgaggtaaaccctagaccattggttctttgttttcaagctttgatttggttttagtttgtgattttgagacataggggctgttagagttagaaatgtttaggtttcgaatttttaagttcatttgagttgaatatagcttcttgtagctcgttttgatgtatgatattggatttacgcaagtttgagtttcgaactcaaagctttggtctttaatggcatgtttgatttcattgaatttttctgggaaaacctggttggattatgttgtatatgaattgtataggtgttctagaaagtatggttgcatttggtgagttttgagcaagaaatgggaattttggggtgaactggtatgaaccggctaatcggttttaccagtacctgtaaaaccagctagccagttttggcagggtccccgaatgctccattttctcaattctcgtccatttcagtgtcgtagttggttgtttccctatttccagagttagtgtaattccttgaggatataacagaacctagagttgtaggttcgggtttcccgggattagggttttgatcatatgtgattagggcatccatc

SEQ ID NO: 68638 - DNA, 1473 bp, Cannabis sativa
tcccccttttgtttccttctaggttgaaagagaggagagagagaggtttgagactgtccttcctaacttcttcttttatttaattcttttgtaagaaattaaatcctattttcttttttttaaaaaaaataataatcagcccaaaattaaataaatcaaatcaccttcccatgcaaaatgaccaatatacccttctcccaaaaaacactaaactaaacacaccctaggggcaatttggtaattttagttaatccgccaaaccgacattctaaaattctaaactagaccgaaatacttctaaaataatccatcctttaatatcgtgacatttctgacaacgtccagtttccacggtcgtcctgcccgaaaatattttatttcagaaatggtttttacgatacccacatattccaatataatcttcgtaattaatcaattaagctttatttaatcatttaataaattcacactaattaatctaagtaagatcataatcttacttcattaccaaaataattgcatatttaataaaatatgtctaattaaatatcattttattttccgtgatattacaactatcccctccttataaaaatttcatcctcgaaatttatctgaaaagctcgggatactgctctcgcatttgtgactctaactcccaagtcgcttcttcaaccttgctgttccggcacagaactttaactaacgatatagtctttggttcgtagtactttctcttttcttgctcttgaacctcaatcgactatttcttctatgacaagtttattcaaagttccatacctccgcaactctgtatacgaatcgtatctacctcatacgccttaacattgaattacaaattatgaactccaagtaaggtaaggattatggctagctgaaaagctacctaacctctcctttccagaaactcaaacggactgattaacctgggacttaactttcctttctttccaatttctcagttcccctcattggaactacctaaagaaagataaaattcccaacttggaatttaatatctttacactttggatcagcatagctctttcatccattatataaatctacctacgaacttgaatctttaaactgcatcagtgccacattagtagtacactaataaatgttattatacgaaaactcattcagcggatgatgcttattataggaaccctaaaaatctattacacatgcttgttacagactctctcagcatttaaactgagataatttacttttgaagcatcacaaggtttaattatttccttagcaaatagattagcacactaatttgttttaatcatattccgctctgataaagaaaactgtactgactttgtacacctgttcctacttacctagatagaatcaaataactctaccattccttgagttgctgacgagttagaaatctaattcatacttcagaatgtcatctttcatacctagcaa

SEQ ID NO: 68639 - DNA, 860 bp, Cannabis sativa
tccgggcataccccctggtgctccatgtggtaatgggcctcctactagagccgggttaagatggggtaatcgattcttgatccattcatataaatgacctagtcggattaggttcacaattttgtcttttaggctcttgcattcattggtactatggccaatgtcgttgtgatattcacatctttagctgggatccctctgggaactatccctatacaagggagaaggttttcggtaatgtgtattttgcctagtggcaaagtatacccgctcctgcgtgtctgtaagctccgtgtattgagtgtactgaggggtgtatcccctccattgtcatttgtcctcagtccaggtgctgccctttgaggacctcttactccgggaactctgaggaggtcctgtcaggttggtggcaagcgtggactgagacagggcttggacgttcatccccgagggattgcccatgggggtcccaaagtgtgatgatgcaggagccaaggcgaggctctgattatatcctggggtagcggagaattgtatgtcgctcatttgaggagtggccggaggcatggctcccgggagttgtgcatatcctgacacttcggccgggtaatatcctctgtaagccactattttggcttcttccaagttgatatacttttggacccttttttggaaatcttggagattagctgctccctcttttttagttcgttccaaaaaggagtccccgtgcggatcacagcctggaggagggctagctgttgttcgtcgtccaccttcttggtctttaaagcttcttctttgaatcttttgttaaagttctttagagtttccgtatgcaattgttttatattagtcag

SEQ ID NO: 68640 - DNA, 5061 bp, Cannabis sativa
gtatggatataacttagagatgacatatgtatttatttaaggttgattttaccatatattttggtagaaaaacttatacggatatttaaaaagtgccctagagtaaacacttatcaatttatcataaatgtgacatagggcctccgtgcaacgcgtgaattttcattcagattgactggtacacttgaatcaggaaacgagataagattagtataaaatgtgtatgcgtatatgtgtacgtgtattatatacatgttgtattatgttgtttgtatactaccaacactagtacaattacggtactgagtatattagtacagtatatgatttacgacacagtgttaccaactttattatgggatgagtacgtagtgcatgtggtacagcactcagtggtactcgaggtacagttcaaccctaccaacactagtacaagacttgtacttagtgtaggtggtacaggggtcgtaaatttactaggaacattcttgatgcatctgaagtcttgtaaataggtgtatgagcgcctagatacaagtcagctttatgttatatattttgtgcttttcttactgaatttgtcgactcatagatattgtttatatgtataggtaaaaaaaaggcaaaggatgagcaccagtgagtccaggacttgaggatgattgttcatatcaggatggttagacctggagagttcggtctcgagatgacttgggctattattttgtagtcgcgaagcgacatggttataaaatgtaatttgaatattgttgtaaacttttaaaatggaatcccggcttttatgtacagttatttatttataaaagtttaaagcttaattaaaagtttaaatttgacacaatttttgagaaatcctttcattagcaaaggtgtgcacattaattagaaattcactgcaacatgcctaagcaagtagggtgttatacccaggttgacaatatgtcaacctaggtgttgggacctaacaccaggtcaacctgcgtgctgggtcctagttttggcccccacgttaatttgcttctttcctgaaagcacttgattccttatttttgatggagatgaagaaaatgatcgggatacttcttcaatattgtggttggaagcgccccaggttgacaatatatcaacttggacgttaggtgcatcataaggtgacctggccatcaggtgctccaaatgggaagtgttttgattctgattatgaggcctctaacatgttcgtgacatgtcttattcatgtctaagtacgaattttgagccatttgcactaagatgaacctaaaaactgaaactctaattaggaatgtcaagttgagtgctcggtaaaagtcctaggcactcgggctgatttctagggtgttgtttcatctcttttcagtttctaggccttggacttggattcttcttgtcttcttggttcaaaatactgaaggatggtgagttagaaataatttggcgggatcaagcacacgttttggagttcccagagtcaacatgggctagggctagggatccctcccaagtcaactaatatgactcgggataactctataaattttttccatcttacgacgtgtcaaacattgatgtctacgtcaccaaggttagtttttgggtaaacactatcctttaaattacctaatcaaaactaacttatttttattttacctcacacattttcattacaccatacattagcttctctatatttttctctacatcatttaaatattatgcctttacatctatgttatttagtataaatcaaaaaaaaaaaaaaaataaagaaaaaaaataataaaagaatgatagagaaaaaataatgtctaatatgtttacctcactactatttattgagctacatttagctcaaaaatagctatagggtcagccttgtgttagtttgggtcttaagcaaaaataaaaaaatatgacccaatgaaaaagtgatgttgttagaatttaaacacttaactttttaaatattactctaatcaaattatcgttaagctacaacatatatttagtattatgagattattttttatattttattattaattatattttaatttttttttcgaaatagggcttgagctgtgggggacctaaggtgaccgcctctttcgtctcacctcaagactggcccaaaatagttatgagctatagctcacctcttataattatctcacatatagctcacttgatggaggtaaatttttacataattcttttaaaaaaaaatactaataatctattttaggtcttattgggaatgctcagttaaaaattgagttcccttaaacgttttaaacctctgttatacttcatcctaaatatttctccacatatgctataaacatattttatatttttttttctctttcgttcctttaattaattttttatttttcttacttattcttgtaatttctttgtttttattaataaaaatatgttaaaaaaaattgtaatatttaaatgatgtaaagacaaatatcgagaagctcatggtaatgtgtgagttaaaagaaaaattgagttattttaaaaaatagaatacagaaacttaacaaataataataagagtaatatcgttaactttctgtacaatttattagttaacttttacgtccgaaaacatatgtcggaatatttttttttcacgggatgttcgttatatttgaaacattatccttgtaaatttttgaaaattttcaaatagtatacagtgtcgaaaatacgtttgaagttttttgaacacgcgtggtatactagaatatcaggaactctgtttttggtattgtaaactattcaaaaatttacaggaatgatactgtaactataacggataccgctatcaaaaaaatatttcgacatgtgattttagatgtgaaatttgactaaaaggttgtaattagcactattattgatttgttttgttacaaactggaaaaaaaaatattggaaaaataatgttcaaatgttacagctagtagtagtaactaaactaatcaaactaatcaatgatacgatcatgtgatggagaaacgtcagtggaaaaagaaaaggccagccttgcaaatttattggcaatgcccccaccttacaattccaatgctaatatgtacgaacactaaaacagataaggtcgattagatattttcttcaaaaatatcttctgtactatgaccaattgaaatcacccaacaatacaaaataaatcctctaaggtgaggcaaatttgcatatacttctcatactaaaaattatcagaagaaataaggttttagaaacaacactactactcaatacactcattggcaatggaaagctcaacaagaaggcctaataggagtgacgttcacctgtcactagaggaagagggagaaattgaggctaaaacgagagattattttgatggaattattccaaaacgacacactaagcctcagcggagtgaatactcttcaaaatacgtggatgctattgatagtgctaccaccaccaataatcattctaatattcctgaatacgtcgagtttcaacgtcttgagaatgatcaacaggtaatttccatttacattattcttaatacatgtatgttgctgttgttaatatatatatgtgtgttgttttccgtttcgaaggagaaactggtttatgaagggaaaaaagtggaggaggagtttgtagagacggactactacaaggatctcagctgtgttgacaagcaacatcacactgtactaaattttattcattttttcttaattttttggagctaccctttattttattttatccttatccttagattctagttaatttttgtaaaggtaaatattattttggatttgtgttttgcaaaaattatgtattagattctccgttttgttaaatgacaaagtaaatcttgtattttttaaaataataaaaatagaacagatataaaaaaaaaatgtaaacagtcataacacatttagattggattatcattaaatttttttttgacaaaaaattagtttaaggtcttatttatatcattttagaaaaatacagtgtttattttgtcatttagcaaaacagaaaattcagtgacaggatccaaaatggtatttaccatttttttaataaagtgaagaaatagtaaggatgggatattgttaatttcagacaggaacggggttcatcaaggtagagaatacaagtgacagaagctacaacctgggagctgatgcagtcacttgttgtcatgcttcatccacgtgtaacccagcaactaacgattggactccagttccaaatgctgaagatacagtataactaacttactcaagctttcactttaattcaactactttgttctgttttgagactgattaactaataatttcctcctatttttgttttcatctttctcagatgccgattgattcaggcaagcccaataggagtgacagttaaaaagatcatggattttagtatttgattactgtgtactagtaataatatttgattttagtattatatgttcctctgtttgtacaagggaagggtcgatttgttgtatcggaataaggtttacttaattagtcggattaatgaggtgaattaatgcctcatttgaagaaagttaaaagtatgctacatgtcttgcctatgaacagtgctattgtatccagcaaattgtgtgttattattcagtagcaaaaattgagtagaattattatcatattaaaaaaaaatagttggaattttttttatttaaagaagtttcatcttcattagataatatcattcaaaactaatgatgaaaaagggagtgaaaccccactaaaaacacagttagtctctcctaaagaaacccgcataaagcaacaactttattagcagaccgtttaaaaaaaaataaaaacaaaacacaactcagaaattaaagccttgcaatacaatcaaagataacatgaccataagaagaggacatttttgtaaaagaattgagatcattaactcatataaggcagtcgaattcaacaa

SEQ ID NO: 68641 - DNA, 902 bp, Cannabis sativa
ctaacaatccacccctctccaccaaagggagatttgagtaaataaccaaatacaatacttggactaagggtcaaattggtaatttttcttacatctccacccccgcagcccaaatgtttatattaaataatccatttagagacataaaaaagatatattaaaattttaatttttgtaaaaactaaattttacgggaacaagtttaagtccattctttttcccaaaaatctagatttgtttaaataaacataatattttttaatttaatttttaactttttttcaaaataattttatatatttttattgaatttttaattatttttctttatttttgaagatatgaatttataaatataaataaaattgatttttcttcaagaaaaaattcttagtttgggtaaattatttattggacttccaataatcttggtgttattttttaagacacgtgtttgcaaataaaataaaatttaaaatattttttttaagaataatttaaattttttaagtaaacttaatattttttaattaattgaatatttttatcaagtttattaataattttttattagttttttcagagataatagaatattataatttttaaaattaatttttttttaataaaaggagataaaattttgtgttggtcaaagtttagggggtaaaaatactaatttttaacggtaaaagaaatagaacctaagagaatgggcataattatgtaattgttacattttacgaagaatttttaacaaatcgtatattttagggtacaaaatcaggtaatgtcgaaagttcaggagacaaaaatgttaattattctatcataaatgtttaagtcactcatatttttttattataaattactatatatatattgattagttaaataaaaaa

SEQ ID NO: 68642 - DNA, 1956 bp, Cannabis sativa
gggaaagcaataagcaataacacccagaaaaagtatgtgaaagagataaagaacgagcagttggcatttgccccagaatcttacaagaaggtgaaaaccgaggaacctcccattgtattcacggaggaagatgagaaaaatgtgaggtatcctcacgtcgatccatttgtgaataccattcaactcgccaataaaaggatcaagagggtgttaatagacaatgggagctcggtaaatatcctttataaggagactctacgaaaaatggggctcgaaaaagctaaattaacgccttgtatggtgaatctttgcgaattcactagagacaacattgccagtcttggcataatcgagctcgcattaatattaggtgaggcacccctatctaccactgttatgcatgacttcttagttgtggacctgctatcagcttataacatatttttgggtaattcagcactgattggactaggggcagtcagttcgatcaagcatctatcattcaaattccaaacacaagaaggcgtgcgagtggtgcgtggagaccagatgctggctcgcgattgctatcgcattgagctggagcataggaaagtcggtcattagttgatggcgatcttggcaaaagaaaatgagaagaacgacgaagatcttgacccccgagttcaacatgagaaaaacgtattgaaatcaattgaggaattggaagaggttattctcgacccaggaaatcccacaaggtttgtatacattgggaagaacctggacgagcagctcaaatagtagttaatatgttttttgaaggcgaaccaggatcaattcgcctgcagccatggagatatgatggggatccaccggaatattatctgccatcttttaaatgttgatccaagctacccaacaaagaggaagaaaaggagacctttggattccgagagacaaggggcactaaaacaggatttggagaagttgttggttaacgacttcatacgcgaggtcttttatcccttattgatagctaattctgttcttgtcttcgaagcctaacggaacttggagaacttgtattgatttctctgatttgaataaggcgtgcccaaaagtttgctttccactacccaggttttactagttagtggatggatctgctgggcacgagcttatgtcatttattgacgcatattctggatataactagataaaaatgtatgtctcggatcaagaacatacaagcttcgtaacgaaatgtatgtcccggatcgctggggaaacgtatcagcgattggtaaacaaaatgttcgcaaaccagatagggcagaacatggaagtttatgtcgatgatatgttggtaaaatcaataaagggtaggaaccatacctcagaacttgcggaatgctttaacatattaaagaagtataacatgaagctaaactccaaaaaatgttcctttggagtttcctcaagaaattttttacgattcatagttaacacgaggggtattgaagtgaatctcaaaaaaatcaaggcattaatagacatgccatcaccgataaagcctaaggaagtacaagccttgacaggaagaatggctacacttaacagattcattttgaagtcaactgataagtgtgtgccgttcttcaatgtattgcgaggcaacaaaaagtttgagtgtacgaaagagtgcgtagagtttcagaatacaaaaaggcatctagcgacgcctccagttttggcgaaacccataactggagaaatgttgtgtctctatttagccatctaggaagatgcgattagtgcagctatagtatgagaagagggcaagtaccagcaacctatttactatataagtaaactgttactagaggcagaatccagatatccatgttggaaatattttactaggatcatagatttactaacaagtatgttatttaacatcctgaatatgaactt

SEQ ID NO: 68643 - DNA, 660 bp, Cannabis sativa
caacctcgctgaaagttacttggccgaatataaagcaacagttgttgttcacaatgcaccacttccagaagccaagcctgttgccacaatcagctggacacctcctccacaaggcctcctcaagctgaatatagatgtggcttcctcgaagaaccaccttaaagtcggtcttggtggaattattcgcaatagttatggagaagtagtcgctgccatagcttttcctcatacaagaggcggggatactgcaatccttgaagcaaaatctattcttaaatctcttcactggtgcataaaagaaagcttccatcttcatcaagtagaaaccagctgtaaagctatcatagatgctctcgctgccaccaaagaggacctctctctctctcttcggagatctcatcaggcaaattaagttggttttatctcacttccccaatgtcttgatcactcatgttaagcgctctgctaacacatttgttcacaagctagcaaaatttgctttgaggttagatgaaacttcaatttggattggagatgacccttgtaatcttgctgctcttctcttcccttaagggcatccttcctctctcaaaaaaaaaaaaaaagcacaaagagtgttaggtgacattgtatatattttttcttttacttttattaatt

SEQ ID NO: 68644 - DNA, 587 bp, Cannabis sativa
caacttatccctatttatttagtaacagttgagagtaaatacactacatacctcttttaacttgatgtctttaatttttacactctctttcaaaatttattatatttacctcttttttcaatcattctactaatattacccttatcactttacaatagattttattcttctcaaattaaaattttctccaacttttctacaaatctatatatccatctacaaagaacacaaatttattatgtttgaaattatatcttagttatgtgagtgtgtgaggataacttcagtataatactcataaaaaaatatatatttaaattttttttttttttgaaaataaatttaatttatatataaaaaaatatattctacaacttctctcggagtagcagttgagtgtctactattaaggggtaagttgaaaaatactactttttttaatcaattaatcaaatttacttctaatttcatatttaattgaaatatacctctttttatatgtattgtacctaaaataccctgacataagagagctacacaaagagtatcttgaagtgacaggagcaaaattggtacaatgtttaaaa

SEQ ID NO: 68645 - DNA, 576 bp, Cannabis sativa
ccgacactgtttccttgcaagatctactcagatggataaacaggtccacgaagagtaaatgcaagaagaaagtcttagctgcttccattacagctttggttggcaagctaggaataacaagttatggcagttaaatatattgttagttcgaatctgtaaatttaggaggcaaaatatggcaaattaaaactaggccggataacttgtgttatgcctaaacatgtagattatagaaacatagataaatttgacttattgtaattagatctcttatatagattcttatacagggctctatatgaggtgttttaggttgtacaaatcaatctgtttgtgcaatgaattttctaattcatcaatatatataaatgataaaataatatatatgaaaaaaatagattttaaataaaattaaattaataaaaaaatatattattacattaaattttaaagttgaaaaaaaaattaaagaaacccttatagcgtcggttatttaataataatagtcatcataagtactttatgatattgaattttataataactgacgctataagaattctatgggcgtcggtt

SEQ ID NO: 68646 - DNA, 930 bp, Cannabis sativa
aaatattaataccggcggaaactgcttgtggtccgccggtattaatgcatctgcgtgtaaaagtgcagatattaatactggcggactccaccgctattaatccgctggtgttaatattattaccggcggaataccattttcgtcgctaatagtcacttatagcgaccaattaataccgacagattattaccggcgaaatccgccgggattaattaatgccggcggtgttgtctattattgaaatttgttgtagtaactccaatgtatatattataaaaaaaattagtctaattaaaaatcttttctaaacatcaaaatagataaaaatatgtaccggaatatataatcatttaattaatggggtgcaaaaaaaaaaaaaattaatggggtgcactatacattcttccaaatatatattttgattaataatttttcttaacatttataattaaatatcgtacaaacactgtaattatttgatttttcctttaactgctgtgaatgtaaaattggaattgggtcaaatttagaaggcacctggttattacgacacactacattcatggtcagagtgatatgatggctcaaaactatatatgtgtacaatacattacaaatatagatataattacacatatttgataactgtgatgtcctagctagctgatgatgacaacttttttttttctttttctaattatcacttcaggtatataattaaaaaggcccttatcatcattacattgccaggtatcaatatatgtcccactaatttacaacataaaaattcttataattcatacaaatgattatttttgataaatttacaacataaaattgatgtacaactatatttttttaattttttgttgttgttgttgttgttgtttttagatacttatgaaattatctcatattaataataatgtt

SEQ ID NO: 68647 - DNA, 2157 bp, Cannabis sativa
atgaatatgaaaaaaaaattagactaaattttttttctaaatgccgaaataggttaagagtgcatcaatacatccttttaagggggtgcatcgtagaatcaccctaaattatttaaattttatttttgatactgtaagtatttaaaaattaataaatagtcaacaataaatatatcgtacacaattataaaaattaaatagactataaaaatttctgtgagtctgaaatacataaagaatgtatcaaaaatacatttaatatttttaacatatgaatttgaatactgagtaacacaattattgagttctatattggggggcttggtggttatagtttggattttggttcctataagatttgatggcttatgttctctattttatttcctataattttcagttttagttcccttaatttgttttctagagttaacagttgttaaagtgagagatgataactcttttgcactttttagatttaacgcttcaatgatggtgtcatgtcatatattctctcatcgacgtggttagctccgaactaagatagttagactcatgtctcatgcccctaaacccgggagtgagtccaaaattttgatgaaaatataataaaatataaattaatacttaatctatctatacaggcattaattgattgccaaagaaactactgtgaaaggaatttagatgaggattcaagtataacaagaacacttactacccgttatgcgagtattcacctagaatagcgaatactcaaaatataagctatgaaatagacaaaaataaaaaataaaaatataaagaatactagagaattatagtggttcagtcagaacttggtctgtttagtccactttttgcaatagcttcatcttagtttatttgatttggatcacccctttatatagaaagcatgtgccttttaggattacataaccggtcagacaagaccgttattacaataaattacaaaattaaattaaaataaacatttaaagaataaatgaagaacaattttgtctgttcttgacttaattgcagcaatgtatgcaacttaagaagtcgtaacttgtccattcatattccaaacacgcgagctcatgagctctacggtgttatattcgcaggatggcctttgagcctatttagttgaatgtctgcggtcctttgatcgcgtattcagacattatatgcattgataacttagaatatgcgagttctcagtgagttgccgaacacaattagtcattcgaaccaaacctatgtaaagaagcagtctttacttgtcgcatgagagatatacttggtcattgcgtaaaactagtatatgcgtgactagtattaacttctcttggtcctgcttatcttttgattatgctggacatagtgtgcgactagaccctttctcagtcgcaccttctcgcaagttcgtatcatgcgagattagctgactcatttttccttggtcacactggttgatgcgtttacacttcttctttctacaattaatagcacattctacggttaacattactttgtggttaatagcacaagggtggaggcgagcatacacttgcgacaaatcatcttttcctgtgataattagatccacgtgtcaactgtttgtcatgtagaaaaactattcatgagggacatgtgacttcgaatcctgtagtgaagagagtacttcccatataattcaagtcaatactcaattatagtatggaagattgtaaataattttatcatctaagaagatccaagttcagatcttagtaatattctgcgacaaaaagaaataatggttataaatctgaacagaatgaactattatatttatgccaccaatctaaggttttctacaactttatatgtatttattttattgttttaagaaattcatatttagaatgttagattagtcttataatctacatgcatgttattaaatctagatcctaataaaataagttctaaccgtttttaccaaattgtaggcatcctagagagaaaatcattgttaatgtatgtattaagttttaaaggattattgcacaattttataggaagaagaagcttatatctgcaaattgttgcgatcaattttactttcatgttttgatgtgtttgtgtgttagctgattccgatttatc

SEQ ID NO: 68648 - DNA, 1078 bp, Cannabis sativa
agaaagcgttcattagatagataaaaaattagatctctcggtcgttagataatcgactaaaccggttatggacaaaagcccacttagctacattatgggctataaaattacaagatcttttaatattacaaaacaaacagctaacaaaggaagaaataattttttgatacaataaagaatagttctcaattttctatctaattcctcaccgttgatagaattaattaccatcttagaatcactttccaacaaaataaacttgcaaccgtagtccttcgcaacttcaagagccaacaaattacgagtcacaacaaactttttaaaacaataatctttcaatagtttccatacaaataataacatataaattcgaaaaagtggtaaaagtcatgcaataaaaaatggcaatcttcattttttttgtacattaatgttattagatgatgcagtatttataattgtaaaaaatatacacataatctaaaaacatatctttttttttttatatttttttttctcttattcacatccgatttaacacatttttgttttaaaaaatacttcaatagttacaactctaacaattatctattatgatctcacatcacattaaattattaaggttaaataaataaaaaaatagtgatcatggtccatatttagcaatactttacataaatttggtcttaaaaattataccacattgtgtatgtgacaagaccattctaatggacaatctccattagagatgctcttaggcaccagtttgagtggttcctaactagtactatctagaggtgacaccttataattagttagcataaaaattattttaataaattatgtgagatttattactaaattgcattaataaatattatttattgaaagatacaaaacactactatttttttttattgaatatcttgaatattcattcccggaatatatataattaactcaaattgcaatttaacaaatttcataggaatcactatcactataaaataaaaattaaaaaaaaaatgtgaggataggaattaaagatggccacatatatatactagtttattgttac

SEQ ID NO: 68649 - DNA, 521 bp, Cannabis sativa
accacataaaacgacaacaacctcaattaagaaaaaacgatgtaagtttgaaaaccatgaaaagtactgaactgaaatacaaaaaaaaaaaaaaaatactgaactgaaaataaattggaataagcaaagattcttgtactttttttttatctcatgcttcctgatttcctttaccatcggataccactttgactgttttctaactatttaaatttaaaatagtttatgatatttaaacgtatttttctttacaaatcaatattaatatatctaaataaaaaagaaaatatgtcaatctttcagaaaaaaaatgtcagtacaaattgtaacacacttcttatacatctccaacagtacatcggtacttttatgtacaaaacactatctatttttttttttaacagaggtagtaaattgggtttcaagcgttgatccaaagcagttccacacaatttgacccaaaataataatgtgtcaaacaacactatcatgactggcgactttggaatattactattttc

SEQ ID NO: 68650 - DNA, 585 bp, Cannabis sativa
aaaaaaattagtttaatataacttagtaatattactgttaaaatttaaatttagatatttatttgtaactaaaattaaaattaagtgtttgtactctaacattactcgttttttctattacaagaaatgtaatattttccagcttgtggatatttattttttaataattattttttttttttaaaaaatacaaattattctcttacaaatatcactttagttatattttgtttatttttttaaaataaattactcataacatttctaatgaaaatgtaaaaaaggtatgactcataatttgtataagaattgatttaggattttgttgggtttgatttatatttttgaaagttaatgtgagagttaactcttgctgttaactttaatttaaaaataaaaagttaaactgactattaaatagcatattttatatataaaaattatagatcaataaattattttaaaaaaataaacagaactatttctataattgaagaagagtttttgaaataaaacaaaattttaaaagaaatttttttaccagtgaagttttttcttcttttttattgtttttttaaaataaag

SEQ ID NO: 68651 - DNA, 666 bp, Cannabis sativa
tagtgagaagtcattgttaaaagccgttgccaaccaaccaatctcagtggcaattgatgctggtagtactgagttccaattgtactcaagtggtatcttcacaggcgaatgtggaacccaattggaccatggtgtcacagccgtaggatatggaactacagacgatggtactaagtattggttagttaaaaattcttggggttcgagttggggtgagaatggttacattaggatgcagagggatgtgaatgctgaagaaggtctttgcggcatcgctatggaagcttcatatcctactgttgcttaaataaatatattaattatatgtgtaaaataaaaattattatagctaaaatgaatgttgaccacctactttaaagtcatacatgaatgtaatttttaatattatataaatttacatgtcaatcttctgcttatatagttggctattaatttgctttggttaaaaaaagaaaaccatttagtttactaagaatgtactcatcacaattatctgtcttagcactcttttaattcttgtaggactttagattttgatgaagccccatcaagtttcgcatcataaaattatgtattgaagggactctttagccttcaaaataaacagaaaaaacgaaatattcttgtttctctccatcagtgtgg

SEQ ID NO: 68652 - DNA, 541 bp, Cannabis sativa
tatttggctttattgacacaacttatctcattttcttaccctatacgtatatattctagttgctatcaattctaaaattttaattttaatcctttcttcaagaaatcttattttattttttaaatttatgaaaaagccacattgtaattataataatgtctagaaaatagcatggtttgaagaataccaactttgcattcgtaatttagttatatactcttttatatatttttattaatctattgagtgacaattcaggagaaaactctactggagcataatgctaagctgaggcaacaggtacaggtacctttctttactcaccaacattatgacacttataatctaattcaggattcacatatataatagctactagttatatatatcaaacaattatatatatttatatatatatattttttttttcagtgtgggatgttacaaaaagttagttcaggaagtgaagagaaggaagatcaggtgttggtggtagtaaataataataacaatgctcatgatcatcatcgtcataacatgg

SEQ ID NO: 68653 - DNA, 1368 bp, Cannabis sativa
accttttgtttgcaaaagaaaagaatataattattattttgatatttaaaaaatattaccgttaatctcttattttaatttttttagttaaatttcgtacccgaaacacatgttagaatattttttttctaattttttttttatagcgatgtttgttataattataatattaaacttattaattttcaagtattgacaacaaaattcttgatattctaatttatcaagtgtgttcaaaattcaaacatgatatgtgataaatataatgaataatactataaaaaaatatatttcgccatatattttcaaacacagaatttaactgaaaaatcataataagagattatagttaaacactcctttcttctatattttatttatttgacaagtacataccataataatatgtttgaatagaattccaatgtccaaatcttgatcatttcacacattatgattctctttgtagcctaaatattaaatagaagaacatgtgttatcaatttcctttttcttttctaaagaactaatttgacttataatagactttacaagtcataataatgtgttttcatacgccacttgctttcatttcacatgagtctatgacctaagttttattagtaggcattttaagtttccccctatcatattttttaataatcataagagctacatgttgatgtattaaactatatgtcaagtaaattatttgagtgtttcaaaaattgtagcctcaaatacccaagtcagttttgactcatttgtcaactatagctagataaattatcttccttcttttaaaaaataaaggttaagtaaattattataatacttccatacattcgagatcgaaggaaacaaaaattgtgaaaattaccatcaatgagacgttatctaactaaaacctttttgttcttttgttggtggtgtgtgtgattatcgaatcaaaatcaaaacacatattcttaatttatttaaatatggggtaaattttattttagaccctatattttgtaaaaattactaattaaattttttgttttgttaaatgataatataaactctttattttctaaaattgtataaataggatctgaaatgaatttttatcaaaataaaatttaataataatatgatctagagatattataataaaatgattacattttttgtattgttcaaaattgtcttaaaagttgattacattcaaaaataaaattattaaaaattaaagagttttatttttactattttaaaaaattaaagagttttgtcatttaacaaagagtcagtaagttttaaaggtagaaaataatatttacccttaaatatatatgtatatatatcagtgggttgattatggca

SEQ ID NO: 68654 - DNA, 752 bp, Cannabis sativa
  modified_base (401)..(421): a, c, t, g, unknown or other
attgctttattttattatagtttgatgcatttacatattatatatacacattcataaaataatacaagttttttaatattactcattaccatattagtagcacaatacaaataacttgaataaatttaaaaaatttattttacattatttatttaactaagaaagttttattcttaaattatataatatttaataccatactataatttttttagttttcaaataattataaaaaatttaaaaacttattttttttttaaaaaaaatgaatttcggtttggtcagtttaaaccgaccaaaccgtgaattaaaactgtcagtttttttttttacattggtataatgatcggttggttttcaaattataaccatgaaaaccgaaaaccgaattttgaattttnnnnnnnnnnnnnnnnnnnnnaaccgaccgttgctcacccctactaatgatcaaatgtatttactcaaaatttatagcctgttgagaacttgaggcaggggcggtttgtcttgctgtcttggtgtttgatgtaattgttcaaatgattaatgaaaacttctttctcgataaaaaaaaaataaaataataataatatcaatactttttattattaaattatatgtttgtatgcttatataataccatataatacatgtaacaaatagaccctaaaaagaactcagctacttgatcaaacatatctaatatatctagacacaacataaacaaaaaaaaactacaatattacatt

SEQ ID NO: 68655 - DNA, 723 bp, Cannabis sativa
ttcgtgggtgtaagggcctaatggaggcttgaaacgagggacgctacaaatggtatcagagccttgacccaaccaaaagtgtggttgacgaggacatcgaactcttaaaaggggggaaattgtgatagctagagtcctgtgatctgaaggggaatatctgggagctatattgtaacaccctactagtttagccgtactacactgcttttcaaaattactgtgcaacctttgcaaatcaaaggatttatcaaaagtgataaaatttaaactttaataaataaacatatactgtgttacatttatttaatatgggatcatgtatctacgtatttcaactttacataatcaaaagatgtcgcacaacgactaccaaattgttagccctagttgtcccgaagatccaacactccaggtcaagctgtctcgatatatacaatcttcatccagctcaaaactcactgccgttcaacaatagctttttcctgtacctacacataatataacatctgtgagtcgacagactcagtaaaagcataaaacataaatatataaccaacctatgactaagtgccatacacctatcaacaagtaataaaccataaaaacatgtataattgagtctcgaacgtcaacataatagcacatgcactcagtactctagtcgtactagtgttggtagcatcaatccatactataagcacaagtagccataataccacatgc

SEQ ID NO: 68656 - DNA, 1710 bp, Cannabis sativa
  modified_base (1318)..(1325): a, c, t, g, unknown or other
ttcttgtggcgagcgtgttctggtagtcttccaacgaaggttctgcttcaaacaaagcatatcaatgtggatcttctttgcacgttctgtaacagagaatatgagtcgatttaccatgtgttgttgggctgcaatttttccaactcctactagttttttgctgcagcaaccgtgcctcgtgctggtgcatcagaagattttgccgcctggttttttggcttgctagaagggaatcaagttatgttacagtggatgctgctatgatcagttggagtatttgaaaaactcgcaatgagttgctttggcagaagaaaaatcgagctacttcggatgttgtgaagtcggctagatcagtccttgcaaattggaagattgcgaattttgagtcgcctcatgcttattttgctacgggtgatgttactaatagcaatctttgggttaaacaagatctttttactatcaaggtgaatgtcgatggagtcatctttgaagcgcagcagaagtttggttttggttgggtggcacgagatagcaatggcactcttattgaagctgtttcagggagtaggtggggttgtgttcttcctaaaattactgaggtaattggtatcaaggaagcgttgagttggattaagagtaaaggctgtgataaggtggttgttgaatgagatgcattagttgttgtccaagcaataacaagttcaattcatatgccatctcagttcggtttgttggtggaagactgtcgtttaattttatctactttaaataatgtccaaatttcttttcttaatcgttctgctaataaggttgcccattgtgttgctagggggtcttgttttttgtcagatcgtacgttctatgagcataatgctccttcctctttacgagatattgtaattgtagatgcaagttgattatctatgataaattccttttccaagaaaaaaaaacaaaaattaagctaaattaaaaacataaattattcttaaaaaaatattttcaaattttactttatttataaacacataattgaaaatttaataaataatttaaacaaactaaaatttgtgaagagaaagatcaagcttatttgtgtttataaattcatatcctaaaaattaataaaaaaaattagaaactaaaaaaatatataaaattataagaaaataggaattaaactaattttttttttttatgtttatttaaacaaattaagatttttggagaaaaatatagactcaaatttgtttccgtaaaatttagttttaacaaaaaatcaaatttttattatacttttttatatctaaatagattnnnnnnnnaaaaataattaattttttaaatcgcttaatttattttttgatttcttttttaattttcttaatcattcaaaatgatttttttaagatctaaatttattttttaagatttactgaaaaaaaaaaatgttgaatctttctaatttttattaagagggagtacaatttgatagttgtcaaagtttaggggacaaaatttctaatttacaaagacatgtcagcatataaacaaaataataggaagaaacctaacagattgagtaaattttagtaaatgtaaaagttcatggggagttcttaagaagtatattttaggagacaagatcagtagtgtcgaaagttcaggggctagaattgctaattattcgttattatattaatgcttaaa

SEQ ID NO: 68657 - DNA, 1563 bp, Cannabis sativa
  modified_base (365)..(367): a, c, t, g, unknown or other
  modified_base (452)..(457): a, c, t, g, unknown or other
gttatgttggtcaaacttttcaaaggagaatctaggaatctctacagtgaatatttgaggaaaataagtaaaaaaattacaatataaagagaatcaatttttatatatatacacttattaacatctaatgcaaccatttatgttaagatatacacttattatcaaattcaattattttcgtttgtattttcatctatatttattattcaatgtcaaatcttagtgacacccatgaaaactaccaaaaacatgtgttgaccctgcttttagccaataataatgagttaatttaagcgatcagaaatgataaatagtaataattaagtaataagaacacaaattttttatagaggttcagccccgannnagtggtaatagcatactccccttttacttgtactaaattggagagaagaagcaagaagttcttgatcttcctcgaaagcttttannnnnnttttagcagcgtaagtgctctattgaatgaataaattttgaatccctaaatagttaaatgactccactatttatagggaataattacatctgtttagtttctcaaatcaaataagaagtaaaaagggaaactaattactctcccataacacaataattgcgtgtagaaatctcatgaaaatggagatttaattgatgaataaaagaggaaggtgcttttgaggctttcactatcgcatttaccctgggcgatatatgtgaagtagccctgaaactgactctggttggatgatatcatttaccttccatagtacctttatcatattcttcaaataagtaacaactgatggataactcaatcttagatgacataatgacgaggttttcctctgcccaaatataaagaatgacccatgtgtcacccaaaacaaactccatgtcaccttgtgcgtatttcaggataacatttgccccccaagtttgcgtgagaacaatgtattggtatgtgaacttgctcggcccacatgctaggtaaacagggtggcacttgctctatatacaaagtaggtgaacaaaaacatctttttaaatcttcaagctatattttcatatcctaatatattaaatataccttacctcaagaatcatgcccttgggaagtgcgctgacagttgtactactcaagggtactgatggtactcttttagggagaaatccaaattttagaatatagaattacagaaattccctttcaaaaacctataaaaggaatttcagaattcactaatactcttttaggcaatttgaaacatggaaatataaattttcaaactttcttttaagcttcaaggaactacaaggctacatcgagattttgacttgcagttctgctcaaatttttggtgatcttcaacagtgagtaactctctgaactttatgcaattcctttgaattctttcatttttactttagaactgcttttgtgaatatttatgggtttctgtaacgtcctaacccgtaagggcgccacatgtgtacttttacaatttagtttataataataaactaacggtttaagaaaacgtgatttaattaaaacttttagaa

SEQ ID NO: 68658 - DNA, 650 bp, Cannabis sativa
atcaaatataaaaacttaaaaaaatttgaaatatttatttatcaaaactgaaaagtcttgcaatataaaatatgagcacaaaatgatcacttttcttgcccaatgaccataccacaaaactaccttaaataattaaggacaagccataataaatggcacaaaagccgtaaaaggcacaaaagtcataaaaaacacaaaatccgaaaaaagcatcaaaaacatcaaattattgtgcaaaaactagcttggttttatattaagtttaattcaagaattttcttttctagtacatgttttttggtgttgtttgtttttttacatgtagtattatttttgtattacaagtcaaaattttagctctctcataacaactatcaacaaaggaatggtgttttttaataagttgggggtgttgtttgaggatgttatagttttattgtctaaattttcggaggtagttttgttccatgtggcttgcgataagaatttaacagcacatggtttggcaaagcatgtcctttgattagacgataagttattctaatttaaagaagtgctgccattataaattgttgtattattaataaggtgtgattttaatcaccacgtaaaaaaaaaaacaaggataacaaaaaattggttaattttgc

SEQ ID NO: 68659 - DNA, 524 bp, Cannabis sativa
  modified_base (288)..(291): a, c, t, g, unknown or other
acatctttgttgacagagctccaaaacttttggtaaaatagtgccggtaacccatcctccccaggtgctttcttaggattcatatctttgaccacccgaaccacatcctcctccataaacggttccaaaagaaaagcattcgtgtcattagacactttcggtgtcacagctgagagaacctcaccaaccacccttgagttcacctccgaagccataaaaatattctcaaagtattcttcaataagtcgctgaactttcggtgtcaaaatctctttaagtttacttttnnnntaaatttgagacattagttaaatattaccgttaaatactaactgaatgaccactgtgtgtacataaaagtaaaactgtaaaaccaacccataataatctagttgatatttaatagtgatattcaactcacaacttaaatttataaaaaaaataaaaaaacaaaaaacaaaaattcaaaaatataaaaaaaatttagccacaaataatttaaataagttttgagaggaaagagt

SEQ ID NO: 68660 - DNA, 1533 bp, Cannabis sativa
  modified_base (189)..(190): a, c, t, g, unknown or other
aagtgaataaattacattaattactgaatatacaataaaggttgattgagtcaatcccacaattctctcaatctcattactctaggcatccaaaatgacctagtgttcaaagatttggcagttaatacggacttggtctcgcaatcctcttggtcagatcctccgtccaggatataacatttgctctcnngatataattgacttactccttccgaccagccaagtgcattggtcagatacttgggtaatacatcgtgcgacatctctatattccccaaatcctttgtctttattcgacttttaagaacttaacatgtgtcatccaacctcctttctcaccgccacgtgtcattatcaatgccacgtcactcaggtaattttgggataacatttgcccccaagtcctcataagatcatctggtcatacgtggacttgtcatttccttaaacaactaagtgacaagtgtcctcccccatgtgatccgaaccctaagggctcatacctacttgcatcaaatcttctcaaacctttttaagtctccaaccataatgaccatttaccttagaagtcgggagtcaggtaatgtgttcgacgattatgcatttttcgagatggttctagtaaatagtgggaaaagcaatcatttcaaatttatttcctcaaaaaacatttcccactctacctttttccttgtaaatatctcctcacacttcttttaaatctttctaaaccttcaaatttccagagcaagaaaatttccttttttttgattcccaaagttttcctcagattgcttcttgcacgcaccccaggaggctatcttcttcaaaacttcaaaccaaacagtgagtaagtctttcttcccttttctttgcacgaatgtttacatgttttaatttcttttttgtatgaatttcatttgttggaatgtgtgtagtaccattcttcttttgaatctagagacatattgcgatgatcaacaattattttgtcatttattaggaattgagttggtacaagtatttgtgtgattttctttctttattattctgcactgaactttgatttttttagaaatataggtttccccaaaatccaaaaatccttatttttcaaaattccctcaaagagatgaaagtcttgtagctaaatcttcatttttagttggtcgaagtattggaaatgtttttcttgagaaggcaccttccacgcagtttagtgtttcacctctctaaccttcctatttcgtagaggaaccctgcttaattttgaggaggtgaacatcaaatgtttgatgagctgctcggagtactgttcgaaaataactcaaccctttcgtgcatatagctcgtcttcatcttcaagtgatccttcaatctcttggcaacgtgagaactcttgtgaaagtctagaatttgatgcttgaatagtgagaatgatccactatttaatagggttacgagtgaataaatcacattaattaaggaataaacaataaaggttgattaagtcaatcccacgattctctcaat

SEQ ID NO: 68661 - DNA, 733 bp, Cannabis sativa
gtgcatcattgccctattgctgggcagacgaggatctaagccctctgcagataggattgcattagcatcccctcctcttccagttcactccaggtatttccttcttctctttttctatttgagatttcattctctggttagtacatacttcttcacagttcctttttcctctttcgaccaacttcctgtgttttctttcctaccaaaaatggcctctcttcctgtctcccagtccactcagttaactcctgaagaagctctcgttcatgactttgatcatgtttccatccaccctgaacctcaatcccaatcccactgccttgtcgtcaaaatattatcacccaaaaccctaaaagttgattggattcagaaagctatgactgaagcttgggtagctcgttgccctttctctttctctgaatatcactcgggcctttttctggttcagttcggttgtgagggtgaccgtcgaagggtcatggaaggtcagccatggcatttcgatcgatccctcatgatctttgctatccccgatggatttgataccattctcccctcccaacttcgctatattcctctctgggttcaagttcactatatcccgtttgggtcccgttcctacggtctggctcagtttgttgctgatacgatcggtgacctcattgaggttcacttgatctctctgtacgactctgttaccccttttatgcgggtccgagttcttcttgacacc

SEQ ID NO: 68662 - DNA, 573 bp, Cannabis sativa
aataagtatcctttacctaggatcaatgacctgtttgatcaacttcggggagaaatagtcttctccaagattgatctctgatcgagctatcatcagttgagaatccgagagggggaaattccaaagactgctttctgcactaggtatgggcactatgaatttctggttatgtcttttggactgaccaatgctttagcagcttttatgaatctgatgaatatggtatttaaggatttcctcgatatttgtgttatagtatttattggcgacatccttgtgtactcttaatcagaagcggagcatgagcaacaccttaagatggttctacaacgactacaagaccataaactgtatgcaaagtttaaaagtataaattttggctatctcaggtgtcttttcttgaacacattgtcagtaatgatagaatcaaggtggatccagagaagattgagtccggcagggattggctgagactgaagatagttacgaaaattagattttttttgggtttggctggttaatatcgtcgatttgttgagggagtttctaagatctcaacacctttaaccgaac

SEQ ID NO: 68663 - DNA, 3314 bp, Cannabis sativa
aaaaaaaccaaaaaagataaataagataaatgaagtaagaaattaacttataaaaaaaattaaaaacaaaaatttcaatatataaatacttatttagcaattaaaatatgaagaaagcttatctaatgatctttactgatcctccaataatctttaatgtctccaaaaatttatacacttaaaaaaatatataacacacaaaaacataacacaacaaaaatacactaacaaactgagaaaataaaaaaacttttagtatttatccacaaataaacaaaatcttttctatttcttactatggccaaaaaaataattaaaagtggttaacacgggcgcgcgcggaactgaacttgacacttgctccattttctaacaacagcagcatccataaccatttactggtatgtttcactcaattttgaatctttctgctttcgtctgagtttgtgtctttcacacatttttcattggttgaataatgttcgtcaagcttcaactagaccccggttgcctatccttgttgggttccacgaagattgtacccaatataggaatctcagtttctcctctagaaaaacttgaggctattagcaaggataggaagcaaagggtcattaaaactcccgatgcagaaggatttaagaagaagtttagtgaattccccagaccctctcgtgatacagctagtagtggccgtcgagagtttaaaaaacagagtttggtggaaaacccaggtacagaaaggagagcaaactgttgggatagtggtggagttttgaaggagaacgagggtaatggtaaatttaggaggagtagtactagacaagatgtggtagtaaagaaagtgcataccaagtgttcgacgaaatgggggtcttatgggggttgtattccggcaatcctgcaagctttagttgaagttaaggatttggataaggctttacagccttgggaggggaatcttaacaataaagaaaggagcattattttgaaagagcaggtgagctgggaaagggctttggaaatctttgattggttcaagagtaagggttgttatgaattgaatgtaattcactacaatattatgctcaggacacttgggaaagctaggaagtggagctatattgagggtctttgggatgaaatgaaagccaaaggaattgcaccaataaattcaacttatgggactttaatcgatgtttatagcaaaggcgggcttaaagaaaaggcacttctttggctggcgagaatgaacaagcaaggaatggtacctgatgaagtaactatgggaattgttgttcaactgtataagaaagcaggggagtttcaaaaggctgagggttttttcaagaaatggtcattaggtgaacagctgaggcaaaagagtaaaactgtgaatggttccactaaaatggagactggtttgcattctcatgtttgtttgagttcacatacgtacaacactttgattgacacatacgggaaagctggacagcttaaggaagcatctaaagtttttgcagagatgcttaccgaagggatagctccgaccactgttactttcaacactatgattcacatttgtggcaaccatggccagatagaagaagtgatttctttgattcagaagatggaggaacttaggtgtccaccagacacaagaacctataacattctaatctccttccatgtgaagagagatgatataaacatggcaacgaagtacttcaagaagatgaaggaggcctacctagagccagaccctgtgacttatcgtacactattgtatgcatactctataaggcatatggtatctgaagctgaagaccttgtatcagagatggatcataggggccttgagattgatgaatttacccagtcagctttgactaggatgtttatagaatctgagaaccttgagaaatcatggttttggttcaaaaggttccatcttactggcagaatgagttctgagtgttattctgccaacatcgatgcatatggagagcatggccttgtttccgaggctgaaaatgttttttattcttgccaggaagcgaagaaactaaccgtccgtgacttcaatgtgatgattaaggcttatggtgtaggaaaatgttatcagaaggcatgtcttttgtttgatagtatggagaatcatgatgttgttccagacaaatgtacttacagttcactcattcaaattttggctggtgctggtatgccacatgaagcaaactcctatctgatgaagatgcaaaattctggattggtaagtgattgcgtcctgtattgtgctgtgatatcaagctttataaaattaggtaaactgaaaatggcagaggaactatataaggagatggttagatatggtgtgaagcctgatgtcttagtctttggaatattgatgaatgcttttgctgatgctggctgtgtaaaagaagctcttggttatgttgatgaaatgaaaaaatctggtttacctctgaacacagttatatacaattccttgatcaagctctatacaaaagttggctttttgaaagaagcacaggatacatatgaacttctgtcatcagaagaggagggtcctctcacctattcttcaaattgtatgattgacctttatacctcacaatctatggttgaaccagcagaagaaatcttcgagagattgaagagaaaaggggctgcaaatgagttcacatttgcaatgatgctgtgcttgtacaagaaacttggaaggtttgatgaagcctttgttattgcaaagcaaatgaaagaactaggaattttaaccgaattattgagctataatcgtgttctaggattgtatgctgtttgtggtagatataaggaggtgctagtaaccttcacagaaatgatgaaagcttctgttcaacctgatgattctacatttgaatctcttggcattgttctggtgagatccggggtttcgaggcaggctgttggaaaacttgaagtaatgactaagaagaatgctcaagttggattgcagaaatgggtgtcagccctttcttctgtagtccaagtggatgattgtgattacttgtagctgttcttgtatcgagcagaagtttgagcatgggggtaagatacaaggctacaatttgtagttaaaaagatgaaaattcataggaaggatttgattgtagaatttgcacagtttgtatggtgaaatatagacctttgtatatagtagaatgtagaacaaaaatttgtgtaaccttacttgtagtagtagtatgatcttgttcttggatagtatattttgccagttgtagctttttttt

SEQ ID NO: 68664 - DNA, 588 bp, Cannabis sativa
tgtcagttgaaaatctaatctacacaaagtagtggttttgtcttctacaaaggctcaatgcatggctgctacaaagttataaaagaagcaatatggcttaaaggattaacaagtgaacttaacatcaacttagaagatatcacagttcattatgataaccaaattgctctccatctcatgaaaaatcctatgtttcatgtgaggagaaaatatattgatatcaaaatgcactttattagagatttgatacaatccaaacaagtctctatgagaaagatcaacactcaagaaaattctgctgatgcttttacaaagagtttgacaagagataagtttagactttgtctagacttactcaatattggttctaactaaagtctcatctgagactcacttttattggaatttagattcagttctgttagctactttatttggcatggattactctgttatctaagtgtactaaaccaggtagaaattgtgaggtttagctcacttagacaaactcttaactaccttgacaattggtagttaagttggttaggctctgtcctaagctaactgagttttataaataggagtctt

SEQ ID NO: 68665 - DNA, 568 bp, Cannabis sativa
tcaccatattttttgggatccaataagaggcacgccacgtatgtcattttatccctttgactcccgttctcagatgaccgctgagggtatctttatataatttaagcatttctagtaagtataggtaatcacttgtgatataactgtcgtatcgaggaaggtcatgaccccagagaataatatagaatttggacatgtcgttcagattcgacacaacaaataagaaagactaccttgttggtctatttggactaggcaatgggctcgatacttaatgggcttttgtgagagctcacacctcacctatccgacaacacggataaaaatttgcaatcttaaaattcggtgcagaaataatttttgcttccatttttgaaaactactttcacattgatcaaaccaaataaacttaatttattttggtcaattcagccaacgaagtagcagtctttgagctttggaatgatcctcacagtcaatcattcctcaatccacctccttcccaagctcaaaccttggcccaaagttctaccaaaagctcttgtcatgttctctctctctctctctc

SEQ ID NO: 68666 - DNA, 638 bp, Cannabis sativa
gtgtgatctctcgccagggccgccatgcacatggagtctccaccaactttgcattgatctacaatatccatagtagtcttttcatatctacggtgtttacgtgaatgctgccttatgattattttaagataaaattatataatacactgaatttttttaaaaaaattacaaaaatacatcaacatacaaattttttatttgtatgctttaaactttttatattaacaaaaatagtttttcagtaaaaataataaaccatatttttagttattttatagttgccttataattgttatgatgttatttttccagtttattttttgttattttatattatatttatagttgatataaaattgatttctcgttgtttttagttatattttttactgtttgctaaaaaaatgattttttataattttcaaactttaaaagtatatttttgtaaagaaaaattttaagtcagtaaaattgtaagtaaaacatacaaaaaagtcattttgaaaattcttcatgttttaagtattaattagtcatttagtggctgctttcaaattaagaattatttcacaaaaacgtaaaaacaacaaaaaattacaaaaatacagtttcatgatattttaaatatttttacgatt

SEQ ID NO: 68667 - DNA, 1005 bp, Cannabis sativa
  modified_base (26)..(30): a, c, t, g, unknown or other
tatgtgacataaaaatgcattctgannnnnaataaatcatcataaataattaattcaatattaataattaatttccataataaaatccctaaatatctgctaatttccatattaaagctaagcggtctttacaatagttgtggttgggcgtctcttcatctcgaggcaggtggtgaaaaaccccagaagcggacggcttaataccaaccacggtcaagatcttttccaactggtgggcacaggtcaaggttgagcaaagctcatctgcctcccaaccattggatcgacaagtgtagttctcccggaaaacagggcccttcatcacttcctccagggtagccagagtaactgcccccttgcgggaagatttggttccggatgtagaagtagacatttggttctgtaaaaggaaaaatccagcagttagcccccaagccaaaccctagtgttaagaaagggaatgggggtcccctaaccgctggaaagaggccccttccggacatttaccaaaggtggaaattctaaggattttcctaagcaaacatcgggtgcaaatatctcaaaagcagcgaaagcaaagggaaagtgaaagacgcagaacgtgggaacgaaaattgtcccataccctgagtaaagttttgacagaggggtcgattgcaaaatagaagaaagagaagaagcaaaacataaataagagagggtatatacaccatacgacagtctttgccaaagcctatttcccagaaatcaagcacttaaccaaaagttctaccctagcatgcaaatgaacaacaaaaacataaagtacccagaaaacttacttgaaggttgaaaactgggggttggtgttgatcgacggtagaatgcggattgacaacgatggagaaatagctgtaaaaaatctatggtttctggaattttctcttgaaagtgttcttgaggtgaaatagcgaagtggttaaagtaacccagtgaaggaaaaaggctggcttttatagaccagaa

SEQ ID NO: 68668 - DNA, 1073 bp, Cannabis sativa
atactattacctaataaatttgattagcaacataaaacccaaaattaagttcacttggcaaaacaaaaggttcaacgggggcctgatccgagagagaattgacagagtaatagtggatacgggctagctaaatgtttgtccaaatggcggagtaagaaattttccaattgtggcgtctgatcatgggccgattatattggacactctcatgaaaaaaggaaagggctctagaatttttcgcttctacgaagcttggctcagggagcaatcgtgttctgaggtgattaaagagacttgggaaaagaatttgaacaggggaggggctgataatctcacgctacttctcaaaaacacaaaacacgccctgcaagggtggaggaaacaaggattcagagatgtggatgccaaactaaggattttagaggatcggctaatgtggattcaatctcaaaaggatttcgagccatggaaaaatgaagaacttttggttcgccaaaagattacagaggaatggaaaaggagcaaactcatatggaaacaacaatcttgggagttatggttaatgcatggcgatcgtaatagcaagttctttcacgcatccactatggtgagatgaaaatgaaatcatatatgggctttacatgacaaggatggaagaagaaaggaacatgagagggaaaaggggtacattcttttggatttcttctctaatttctttaattcctccaatccggaagtccctgaggctttagaggggttgataaccccaaccataagcattgaagaaaacatgtccctgtgtgctattccgtcgggtgagaaataagaaagcaggttttccaaatgcatcctttgaaagctccaggaccggatggaatgtctagaattttctttcgaagttcttgggatacagtgggggataaggtgatcatctgcattcaagaattttttcgaaggggggcattggacccggatctgaacttcaattacattttccttattcctaaagttttgaatgttgagaaagtggaattgttcaggccaatcagcttgtgcaattttgtcctaaagat

SEQ ID NO: 68669 - DNA, 837 bp, Cannabis sativa
tgtttaacacttgaatgcatagagagggatacaactttattcatgcatggcctcctcattcaataaaatttttctctttctgctacttatttttaccatggaaggaatagatatatttacatttacttaataatttgtttatgatcctttagttttgggttcttcatattgataaaataggaaacacaatctgtttggtctccaatgtgccttctttttgtttctatatacttgcaagttttcacttagctaaatataggtttacatttgttattatatcttgaattacttctataaatttatggatgtatgactatttttaaatatgtgcagatggaatacttttaggaggcattctgattatgtacgagtttcataattttctgaggcctattcttctccttatgtactgcttttggatacctcaaatcgtcaccaatgtcattcgtgattcaagaaaacctttacatccacattatgtcataggcgtgactgttactcggcttgcagttccattatatatatttggctgcccgaacaatttcatgcgcattgaacctgaccagagttggtgtatttgtttggttgtttttattggacttcaatctgcaattcttcttcttcagcactatcttggatctcggtggttcattcctcgtcaggttagatgcaactctgatcttttataaatcagtatgataatatgaaattcactcaaccacttactgttatctatctaattgcgtacttgtctcacttgatccagctcatttccactgaatatgtgaatatactactcctggaacatttttgttttgtttgaatttcccttgttgc

SEQ ID NO: 68670 - DNA, 1805 bp, Cannabis sativa
ttcagtatatgatatgatacagatgtaatgtgaatttgaaaaaaattatcaataatttcggtttacgttaaaattttctttttatcgatgcttccttaaaataaactaaaaatagctcacactagaaaattttacatgcttgaatttgcccaaatataacaattgcgtggccgtatatttatttttactatttcatatttgggtttattcatttatacattcaaagtatttttttttttcatttatacaataaactgatataatttacaaatatacgatactttagtaaatgtcctaatcgtaacacacacagtcagtgacagacccagaaattttactttgtgaggacttacttatttatcattacaaaaatatttatgcttatagtataatcacttttaataaatttatttaattttgtaaggatttttttttactattttggtctataattatcaaataaaaaaaattacatttaatgttttaaaagacaatatttttgttagtggaggctttgtccctgcacatagcaattcaaatcgcaactcaactcaaatcacaatccaaattgtaactcaagttgtaacctaaattgcaacccaactcaatttgcaatccacacagcaatccaaattaacaaaaaaaaaaaaaaaagatcaactctatcatctctagttttgatgtctagatttggtgcgcatgtgagtgttacggtttatgtcttaaaaagcctataagatatttctaattattaataaagagtttgaacattttaatatatgtataaatattaaattattaatatttattattaaataatttatatataaatatcgaaaaattccttatttatatatgaggttgtgacttgtagttgtacagaaaattaaaatcacttagctatgaatcaaacagtcagcaacatattaaaattctagaatttttaatcaatggttgctagtacggttcacttatgcccgttcttcagtggaagtaatctcggttcagattactaatgtagtatgacatctaagtgaatgtgttgtatataatagtgattatatgcaaggattgatatgaataaagctatctttttctaacatgttgtttaccataaagacttaattcatatcataacaatgatcaatagtagattggcataaattttgagtaatcatgaactcatattcatgttattagtttctttgatttactcgttaaagtttctcagagaagatgattcttaaaacttctatttagggaatctaataatgtgaatggctggaaacataatctacaattatggaattctaactttcctaacaggtcgaatattgattctctttaagtgttaattctggactgaaaaattgtgcacaaatttagatgagatctaaatttagaaactccttcctggttccatcactagctggagcataaactcgatccttgtactgaagcattccactctcaaaaattgaaaagtccttagccttactaggtaggacttctttatgggattttaataactcaaggtcttagatttgtgcatttctaaccctttctaataggttagactggatagtcaaattattaagcttgccaaccacaaactaaataccagccctagtcatctctattgctaaatgggaaaaaatcaacttagaactggatatcttcttgggatcatttctgctctactacattagctttcccaggattatacaaaatctcacaatcataatctttcactatctctaaccatcatcattgtctcatgatcagatctttctgagtaaagaagt

SEQ ID NO: 68671 - DNA, 3224 bp, Cannabis sativa
gaaacaaagccctcgtgcttggtttggtaaatttagtcaggctgttgagaaatttggtttgttaaaaagtatgtcggagcattctgtgttttataaaagatcaactgttggtatcattttgttagtggtgtatgttaatgacattgttattactgaaaatgatactgaaggcatctcatcccttaagtctttcattcataccaagtttcccacaaaagatttaggggagctcaagtattcttgggcttgaagttactcggagtaaacaaggtatttttctatctcaaagtaagtatgtacttggcttgttaattgagataggaaaattgacaacaaaaccttgtaatgctccactgaatctagatgtgcatcttactcgtgatggggaaccatttgaagatcctgagaaatatcgtagattggttggaaagttgaattatctaactgtgactcgtccagatattacatttccaattagtgtcattagtcagtttatgtcttctccaataattcatcattgggcagcactggagcaaattttatgttacttgaaaggagcactaggatgaggtataatttgcaaggatcatggacatacccagattgagtgtttccctgatccagattgggcaggctacaaggtagatagacgattcacttcaggatattgtgcatttgttgggggcaatctaatctcttggaagagtaagaaatacaacattatgtctagatctagtgctgattcagaatatagagctatgccatagtttgtgtgtgaggtaatatggatttataagcttttaactgaattcaggtttaagacttctattctagcaaaattgtggtatgataatcaagctgcacttcatattgcctcgaatcccgtgttccacgagcaaactataagcacattgatattgattgtcattttgttcgtgagaaaattcaacaaggtctgatctccacaggatatgtgaagacggaaaacaattagggtgaagacggaaaacaattaggagatatatttacaaaggctttgaatggggtgcaagttgattatctttgtatcaagctgggtatgattaaaagggagagtgttggaatattaattgtaaaaaaattagggtagcttgtatttagtagttttctatttagtctcctaactttgtatataaatatatactattttataaaatacaatacacaattcgattcaccattctctacaaataccagggtcacgagagtggaagatatagaactaatatagcttaaagaaaatttgagcatagggagatatgtgttgtattatttgaatctaatcattcttcgaaaaagagattaattattttacttgctttaattattattttgttgcagttgcagctgcagcgtgtagcaagggtcagcaatttaccactttggtacaattgagtaatttaaatttagaatacaataagttatcagcaaaaattcctgtcattgaacatgtcaatgcagtaagttacaaattgtttctttgctctagctcttttccttttcctcaatctcaataacaactacatttcctcggctactgctacatttttatataatttaatcaaaatcaaataagtaaaacataggtttaagctctaatctggcttgattagattacctatgggacgaagattaagctgatacatgagaagactaagtttagattgcatttgcatgacgtgccccatatggttctttgcaacaatcggttactagttttcccaacgttgacgatgccaacagctattgggcattttctttctttctctggttgtgctaaatttatgtttcatatttcctctattttttatgatgtataaaatggaagaatagtaaccttaagttgcttactgagcatgctccatggattctgcttttaatttgattggttttgttatgtgagaaatctactttcattctcccttgtccataattggaggcgttgttatatcttgatggcttttaatgatgcaatctgtaagaatgttagaacatgtgaaacaatatactcattacagtaaatatgtatcgcagattattaggccaatacctgaaacttctactaaataaggtgattctatagaaagtggcacagtcattagattgcaacacatgaggatcagaaaatggctacacaactatttgcacgcatccccaattgcagtcaaccaagaggtatggtacttgtgcatttcatactagtagatgtcatgtatgatttctggtttctatattatattattctggccgggagaacaaataaaggttaggaaactaaatcagtcctgaatttgctttggtctgctctgctgcaatatatcatgggctcatagttgtagtgtccttgccgggagagtggtccgcccactatgctgctccactacctcattgtacaatttattaaaatatgattattttttgtaatattttagcttcaacttgcatattaatgcttactctattatatttgagtgattttctttgtcacaaattccattatcaacaatactttttgtatatattattttcttcttttctaattgcatttatagaattctctcaggttgtttttttaataatgtttgaggatcaataactctgaagaccaatcatcctcggctccaaccagttatgtatacgttggtatgaatgaatggactgcttgttgctaaagaaagaatgaacgatgtgaccaaactgatctgattctgtatggatctatatatgtatatatgtctattatataatgacttttattttatgattagtggaatggatttgaacaggaaaaatagaatgagtttttttttttctgtcattttaataaatgacctggtgctccaactgtcttcagtaatgtaagaatacaattcacaattatatattttcttaacttgttttctgtaatgtttatttgaatattgctcttatggaaaaaatatgatacaaaatttcattcaggttattaaactacgaaagaaagcaaagtcaaatataaacttgacaaaaagaatgaattaatttaagtactctttctttctttcaaacatggattcatttttttataacaatgtttggtttgtctgtgtttaggggttctagctaaacatttaattataaatatatgataaataaataagtcaaagcttataatataatgcgtaataaataattataaacttaat

SEQ ID NO: 68672 - DNA, 898 bp, Cannabis sativa
tgacatttgaaagtgagcgatttttctaattaaaacaagtcatgtgagttggcttttgtagtttgcaagattcttaccatattcacgcaactcgaattgtgagtttcaatcaagaccaaatacctttttctttgaaaaatattcaaattaacaactccaataatagaactccataataataagttaaaaaaaatcacaaagagtcataaaaacacaaaccaattagtaccaactttactctaatacctaaccctccatataaatacataattaaactctagattaagaaaagaagctttacaatcataatcataaaatcacaatgaagaatgatgtgaagaaaagttgttcttcaacttaggaactttgaattttgcagagaacaattttggagcaatcacaacagactttgactttgactttaactttgactttgacccatcaccatcatcatcatctgaatttcttctcttcaatcttcttccattaaaaaacgaatctttttcaactaacaatcttccattttcttccttcattttcctcaattgatttcttaacccctcaatacatttatctttctcaaccaaaaccctaacaaaatctcccaactcagtttcagcatactccaatctcaatttctcaatctcagcctctctttgcttcaaacccataaccaattcgaccttagaaatttcacgcgagtgttccaattcatgaatcgaagattcccttttcacctctgaaatcaaatcttccaatatacgaacatcggagacccatcgattgtgttggattctgattcgatcttcgagtagttttcgctctttggtgagttcctcgagttgggtctgttgggtttgtagaatctcgaccagagatttgaatattctttgccaat

SEQ ID NO: 68673 - DNA, 1264 bp, Cannabis sativa
cgagtttcaccgtttttagaaatttctaggagatcagaaatcgtatttttgtcataacattttactcgggtgtcccttttggacgttctatctatcgttttgaagcttacgatgcgctatacaatatgttgtatgttttaaagccaaaatataagttttattttagcatatttatactgcagggtttggtagaacaccctagattgtcttatgtgaatattagctagtgttttaggataaatatttaattgtttaccattgttgtgacataggaccgagatcatcggggatagttgtccacttaggttggccgatatgtatgaacttggattaaaggtaagaaaagtatatagtactacataatacactatattgtaatacaattaatagtgttatgaattgattaatattgagattgagatatagttaatattgttatataatgaagattgattggttaaaaaatggtaatgtatgatactatgaatgtgatatacaagctcacttgattaggtgatgcaattatatgaaatatgggtgtaggtttttcacacgggctcacttgattaggtgatgtagttatgcgatatatggtagcaggctatggcacgagcttgcctgattaggaaacgcaataatgttccttcctatttgtttttcaaaaatttcattcactattcgctgatatattgccccaacattcttcaaaccaaacgacataactttataacaataacgtcacatgttggttacaaaacttgtatgtttctgataagggacatgcatcttaatctggttatatccagaatatgcgtccatgaacgtcattagctcgtgtcctgcagttgcatccaccaactggtcgctccttggtagtggaaagcaatccttaggacacgccttgtttaaatctgaaaagtcgatacaagttctctaagttccatttggttttgggacaaggacaagattagatatccacaagcggtaaaatgcctcgcgtataaagtcgttagctaataatgtatccacttcctccttgagtgccccttatctttctgaatccaagggtcgtcttttttgtctcttggctgggtactttgggtcgatattcaagtggtgacaaataactgtagggttaatccctatcatatctgagtggctccaggcgaactgatcctggtttgccttcaaaaaacgtattagtttctattttagtttttcatccagattttttccaatgaatacacactttgtgggattttct

SEQ ID NO: 68674 - DNA, 1583 bp, Cannabis sativa
cccctaccaattccatgccacctgccccagacattgcaaatgtgttgccacctgcccctgcctatatcagtaccctgccacctgccccattaccattttctgtgccaaatactacacacacagaaactacaaataaccttccaaccattcccacatcacaacctaccactcgatctcactctatgattaccagatcacaaaatggtattcgaaaaccaaaaatctatctagctactaagcatcccttaccagaatccttacttccctctgagcccaaatctgtcaaggctgcactaaaagatccaaggtggtatgcctcaatggatacagaaaataaagcactaaagaaagccaagacgtggactttggttcctcgaacagatgatatgcaagtcataacaaataagtggatttttcgtgtgaagctgaatgcagacggatctctggacagatgcaaatccagacttgttgcacggggttatcttcaacttccaggaatcgattatgcagaaacgttctctccagttgttaagccagtaacagttcgtatagtactttctttggtcgtgtctaacaactggagtgtcacacagcttgatgtgagtaatgcctttttgaatggcacattggatgaagtggtgtatatgcaacaaccacaaggttttgaagatgctgagtatcctgatcatgtgtgcctattgcacaaagccatttatggcttgaagcaggctccccgagcctggaacgacaaattgaaacaaagcttgattcattggggttttcaagcttccagggccgatagctcgctgtttatttttggctcaggagatacacagattatccttctggtatatgtcgatgacatattggtgacaggccccaataaacagttaatttccaagctcattcatgatttaaacatggtgttctctctcaaagatctaggtgaagttcattactttcttggtgttgaaatcgtaagaaatcagtctggcatgtatttgtctcagtccaaatatatcactgatttattggttaaactcaaaatggaaggagcaaaaccatgttcaaatcctagcagttctaatgtcaaactcagcatcaatgatggggaacctattgctgatccaacttagtatcgaagtactataggagctcttcaataccttagcttaacaaggccagatgttgctttcattgtcaacaaacttagtcagtttcttaaagctcctactagtttgcattgggaggcttgcaagaaactacttcgttacttaaaaggcacactcagtgagggaattctgctcaaaccggtttcagaactgtcaatccaatgttactcggatgccgactgggcaagttgtgttgatgataggaggagtacaggagggtatgttgtgtttttaagtggaaacttagtctcttggtctgttaagaaacagcaagtggtggcaagatcgagcaccgaaagtgaattcagggctttggcaaatgctgcagctgagttgagatggataggaaatctgttgaaagaattacagttcacttacactcactcacctgtcatctgggttgacaatcaa

SEQ ID NO: 68675 - DNA, 664 bp, Cannabis sativa
ttataaataaaaaaaatattaattgcagtgtagttttcaagagttaatttaagccatttgattaaattaatggctataaatcattaggtaaaatgtaaatacttactgtattaactcccttatataaaggtaaacgactattacataattggacattggttgagaggctaaaaatcttgcaaatctcataacatatataaacccaaatcccatatttgaaaaagaaaaagaagtaatactgaaattttttgttcattcataatccaaattctcataatatatataataaatcacactttatattcgaaaaatcttgcagcttgcttggaattggcagaaggattatcgaaccaaaatcctatattcgaaaaatcttgcaacttgcttgaaattggcagaagggttattgaaacaatatttcaaaagaatatttgatagttgatcgtctccactgtgaacgaacttagggtttaaagcatgttcactttgaaattcattgatatatatatatatcgattaggttaatgttacgttcaaatgcacgtatacataatattattttaaaaaattatattaatttatttttattttattttttaattattacataatttttaaataaatatatgatcgtatagtaaaaaaaaacattaattcataattt

SEQ ID NO: 68676 - DNA, 546 bp, Cannabis sativa
ttatatttttcaaaaataaaaaataattataaggtttttaggttgagtgggccttagacgcaggtatagcccgctttagcccacgtcttaccctgcgaaccacatgaagggtcatatgagggcacatgaccccactcaatttattataaattatattttgtataaaaagttttgattatttttacttttgtccccatatttttttttccatttttgtcctcataaaatttttgtatttcatcaaaaccccttttatattatccccttaagtaagtgagttggttccgccactgtctgcaagcagattaccagcttcttctttttcaggataaaataatctaatatttctgtctcgaacacttattatattataaagatcaagacccacaaacaccacaccctaaatgctattgctcagaaactataatttaaggatttttttttttttatatttttttagtgaaattgatatatatttttcctgttagtttagtcacattatatagtgtgaatatgaaacaaagacagacaaataccacaccctat

SEQ ID NO: 68677 - DNA, 516 bp, Cannabis sativa
tttggaggcaagtgttaggcttaaaggagcttagccttctagattagagttaatgcctctatgtaggagaagcctaaatcttagattacaacttgaaaccctagatatttgaatattttattagttaattacaaaagaccaaattgcccttgaacttagatattattcagctattcagttggactttgaggacccaattcacagcccaaaagatgttgttcatgtgtagaagtgcacaggaaatcttgcaggacacctcttggccggctaggccctgtggagggcaggctggccggccatggtgcagtcccaaggttggccggccaagaggaagctggtctgtcacttgttgcccgtttaagtgttaggatctccgtttgcttaggtgctgacttggccttcttataagtgagttggccttcttattacacttataaaaatataaattttatagaaactagagtagatatatgagaataaatatgaaaatatgtaaagataaaaataaaaaaaaaa

SEQ ID NO: 68678 - DNA, 615 bp, Cannabis sativa
tataaaaaaatgtaattggaatactttaaattgaccaatttgcccttatttatttattttttcattttttctatttattaatagatgtaatatgaaaaaatgaataaggaaatacatgaatgtacatattatgggtgactttttttccagagttaataatattataattacaaatatcattgtaacatctttggaataaaaaaagttgcaataaagattcgaatgaaaatgcaatgaaaattgtgcattttcaaaaagatttttttgcaaatagagacaatgaaacaaaaaaaaataaaaaagtttacattgagatcatgataacataaatattttaaggatacaattgtcttttaatctttaaatatcaaaataaaataaggagagttttatttgtaccccaaaattttataaagacgtcccattttaataaattttattttaaataaaatatatatctttaatttatattaatttttttaaaaacatttcttccttctcatattattaaaaaatgtacacataaaataaaagtaaaaataaaatatattttcaatattaagacaatacaattaaaaggaaaaaaatatatgaatttttattagaaaaattata

SEQ ID NO: 68679 - DNA, 2754 bp, Cannabis sativa
aaattcgctcccctgtctaaacaaagtacacttaaggctccctaggggcataaacaaaaactgactccctcccattataagtacctatgggactgcctccaagctccttacagcaaagatctccaatctctaattaaatctaagaatgagaggttttcgaaatgcttagtcttgtatacccatgtagctgtccaaaatttgattttttcccataggacctctattgagcatgccgctccttcaaaggttctattgtttcgttctaaccaaaccacccaaagaacagacagtaccgccgttctccacaagcttgtgctccgtttactgctaccgaccttacttactaacatacaggggaccgaacacggcatagcccactgaatctcaaattcgtttatcagcattatccataaagatcttgcgaggctgcagctcaagaacaaatgtgcgttgtcttccccgcttatcttacaacaaacacaccacccaggtgatatgcacaggaatggacgttttttttgcaatctagcgtgtagattcagtttgtctagagccaccaaccagccaaaaactttgactttggaagggcctctatttttccaaaggatcttagtccaggacatctcattcgagtccttggttgcggtaaaccaactgaacgctgatttagaagagaaaatcccacaagaatctggtaaccatatacgactgtcgtcaagaatgcttagtactctaacatgttccaacttttgtatcagttgtgtcaagctcggaatctctctgtccataatgttccttctgaatttaaaatcccagctcgccacacaatctccgacttctcccgcatcgccaatcatctcctgaatactcgcattcttagcccttgataacacagctaaagttggaaactgatcccttagtgaaggtcccccaatccactcgtcttcccagaaccgaatacttgccccatttcctactttaaactttaccatcttaccgtattcatggtaaaggtctgcaatatccatccaaggtcctcttggggacattctaaccccctgtttagtatcccagaaattgtctgctttgccatagcgacttttaataactttgtgccacagggagtttgattctaaggggaatctccatagccatttcataagcaatcctttattcctcatctctagtcttccgatcgctaagcccccctcagctctaggtttacgcacctcatcccaagccactaaatgatccccacctgctaaatctcctccttcccaaaagaagtctctcatcattttttcaagttcctttaagaccatctttggggctttgaataaagacagatagtagattggaagtgaggataggacagactgaatgagagtcaacctaccccctctagaaaggaaagaacacttccacccgtccattcttttagcacacttatccaagaccggctcccaaaaagtcttcttccttggagagcctccaaggggcattcccaaataagtcataggccacttacccacctcacacccaattaggttcgcgccttgggccactgcttcgtcactcagacagattcctaacagttgacttttattcaagttgacttttagtcccgaaataccgcagaatgcttcaacaatcttaaccagcttttggagagagtcctcatctttaacaaagaaaagagtatcatccgcaaactgtaagtgactgagccgaatattatctttacctatctggaaccccgaaaaagcttctgtttctactgccttgtccaccattctcccaagaacatcagctaccaatgtaaaaagaaacggtgataggggatctccttgtcgtagccccctagaaccatggaacttgcctctgaccctaccattaacgaatatagaaaatgaagttgatgaaacacatccccgaatccattttctccaccgttccccaaacccttttttcctcaaaaccaaatctaagaacccccaatcaacacggtcataagctttctcaaagtcgatcttgagcacgaatccttttttaccacgacttctgtagtcctcaactgcttcatttgccaataataccgaatccaatatctgtctcccttccacgaaagccgattgggtttcagaaatagtttctcctaagacaccgcggagtctagtggcaagagtcttggcaatgattttatacacacttgtgatgaggctaattggtctgaagtctttgactttgcaactgtttaatcttttagggatcaggcagataaaagtgtcattgatacttccttcaattcttccctcactatgaaaagcccgaaacacttccataagttcgttcttgataacctcccaattattttggaagaccgccaggctaaagccgtccggccccggagctttgcttccttcacaactaaagacaatgtttctgacctcgtcttcttcaaaagggcattctagttgcctggctgagggttccgcgatatgttgccactcaataccttcaaccccagtccccattctcgtctccgaagtgtagagttttgagaaaaaggctattagctcctcaacaatttccttctcgctatctataatatctccattatctctttcaatcctagatatggtgttcctggccttccttgcatttaataagttatgaaagaatcttgagttggcatctccttcttttgcccatttgcatttagatttcagccaaatacttctttcttcttcaaaa

SEQ ID NO: 68680 - DNA, 3081 bp, Cannabis sativa
  modified_base (2667)..(2676): a, c, t, g, unknown or other
aatgaccaatacggtatagtaatggaaagcgatatgggagggggattcgaattataagaataagaatgcgaatgagaatagggattcaaattgaggcaaggactagtactcatgatccaactccaattggtgtggttagtaggaaacaaatgattgggttgaaaagtgtggtgatcattgttcaaaaaatgaagcccaatacttaaattgcttggagagaatccaacgttttgttgcccactaaaattttgcccttcaaattgttgatccatattgctacctgagtatagattcagaaaactaatcaatcaaatcatacaattcaattatattatatagaaaataataaaatagaggaactccgcccattttcatcatcaccctaaacacctattcatttatttataataaaacgagggatgtttatattgcaatctttcctcaaatgtataataaataaatcttttgtgattttgctacctagtaatttgtttatataatttgtttgtctcaaaaataaaaataaagatagaaagtttaaagaaaccggaaaaagaaaacctttctaattttatttaagtctttactattttctgtgagatagttatacataaatattagaaaaaatatatatatttagttgaaaaaaattaagtttagactttattatacagcattttttttatattaacaattaagtttctctctatatgattgacaggttcattgcattatatatattatgtatgcttataatttctattagtattttttttttatttcgttagtgctcaataatgttatattaagcctcttctattcgtataaatagataataaatataaatatttacattaatgggtaataccttatatatacatatttacaataagaaatccttgtttatgtataatgttttaaatttttattcttttcacatataaatgtagatttacttacctcttttttctagacttaatattgaatgatgagatttttttaaaatttatgatcccacattgtttattaattttttttaaaatcttaatatctttacagatttattaattttaattttttattctctataacttttggtaatatttcttctatttgaatagagtattatatggtaagttctctacatatttcttaataagttaaccaaagacatgctttttatttttttattagcattaacaataactttttattggcattaaccaaaccgattttttagctattttttttttcttatttttatatttaattatttttttttactaaaatattttgttaattcttgaagaagtattttattttttttaaaaaatatatatattttattaatttgctagaatatatattttgttttctttctgcatatacgaattttgtagtctattttgttttttacgatcttatatgttagttatttttctttccttttttctcccatatatatagatttatagatgtctatatctattttactctctttatttatttaattttctatttttaaaaaatgaataaatatctaatcctaaacaatataactcatcctattctattaaattaaatttaatttaatttgtaaatattcttcattcaaggcatttaaaatattcataacaaatattttttaaaaaattctcatttcttttattttgtatagagataataactatttcaattttttttaaaaaaattctacatataacattaatctatttataggatataaataaatcgatgatgatagattgttctttttttttttaatctatttattacatattaaaaattttaataaaaattatttgtctatacatatatacataaacctttaccattctttttttttctttctttttcctattaattaattcatgtacaaatcgagtacatattattttttaatgatgttttgtcaattatttttttttaatgatgtcttctaagtattatctcgatcagaattattaatgatgaatatattattatgataatttatttaacattgcaaccaccacaaaaagatatcttaaaaaaaatattaatggtagtggcatgaggtatcttttagtttgtatatatataaatcaaagcaggttttttttttttttacctctatatagtattaaaaaaaatatatgtatttatgtgattactataaactgatactccttacaattattaaattcaaatattttgataagcataaaataatcacaaatatattcaccttttatacttttttagtttttagtgtactattcactaatttagttgtaatttttagccaaaactttagtcatgataattattaagagtttatggtaaaatttgttatgctattctcctttatatcgttttcaagaaaagtgttattattattatttttattatacaagtgacttccaattttagtatattatttttttttttgtttggttatataagattattttaactttatttaatttttactgattaattttagaaaattttttatttttacactttaaaataattttattttgcatttttacggaattctacataaaaatctctattgcaactagagctgcaacctaaattacaacaaaaaatcgtagagaaatctctattgcaactaacgctgcaaccactttagaaactcannnnnnnnnnttaaaaaaaaaataatatatggggtaattacccttaattttataattgaattttgttaaaaaaatgtacaattaaattctattataatatttaatattctttcttataatatgatatctatgttagactataatctaatacatgaaatacaacatatagataaacgatatgtaatgcggataaaaactataatcatatcgtaaatatatgcaaagaaagatcgaaatacctccacccattgatctttgagcttcaatccctgcaatagctttagttttagagttcgggcttcttcgctctctcaactctttttaactggaatttgctgaataatcaaaatgagtgagaagctcggggaccgagaccttatatttataggtgagatactccatcagtatctgcgcc

SEQ ID NO: 68681 - DNA, 605 bp, Cannabis sativa
ctttgatactttagttatgttagcttctatccattaaattatacatccagctcaaatatcacaaatccaatattatttccaaataacatatcaaaccaaaaacattataatgtggttaagttattcaagatcaagaggagatattcaaaggcagtggttgagcttaagatagtgtggttggtgtgatgtgatttaataatttttctcgcagtaatggcaatgagatagaggattcaccgacaatagtagtattagagtttatatcctatgtaaagacattttgattataaatattaattgaacattttgatatatacttaaattattgatattttatattgaataatttatatactgtggaccgagattttcggtaaccaattaaataatataatgaggagagctatggaataattaatgcaggtgatttttacgtggttcaagcattaatgagccgtagtccacgagtctttgttatttatgagagttcttatacagagaatgttcttggtgaatctctctctctctcttctttactccctttgatttctcaatcgatcgatcgacccctttcccatctgtttttggggtatttatagagtttt

SEQ ID NO: 68682 - DNA, 963 bp, Cannabis sativa
  modified_base (773)..(773): a, c, t, g, unknown or other
atagcctacgagatttaaagcacatcgttgtagaataacacataatgccttgtacttatcaaatatttcaaaatatgcttaattgcagtccaatgttcctctcctgggtttgtttgatacctgctcacaattcctactgcatagcaaatgtctagtctagtgcataacatagcatacattagacttccaactgctgaaacataaggaacctttctcgtgtcttctacctcttggggatcagttggacactgttccttagatagacagatgccaggcctagaagggataacttcccttctggtgttagtcattgagaatcgctctagcaccttaccaatgtatgttacttgtgagacagcaagtgatctgttcttccagtttctaatgatttgaataccaagaacataaccagcttcaagcaaatctctcatttcgaatcgagtgttaagtcattccttaatttcactcattttcttgatattgttaccaataatcaaaatgtcatcaatataaaggacaagaaatactaccacttgattatccttgagttggtaaacacaatgttcatcttcatttcggtgaaagtcgtaggttttgattatttcatcaaaccttctgttccaagagcaagaagcttgcttaagtccataaatggacctattgagtttgcaagatctctcttcttgccctagaagcttataaccttctagtttttccatatagatggtctcttctagaatttcgctaagaaaagttgtcttgacatccatttnccaaatttcataatcgaaagcagcagttatggagagaagtattttgatggatttgagcattgtgactggagtaaaagtatcctcatagtctacaccttatctttgtataaaaccctttacgacaagtctagctttaaaagttttgacttctccaccagcgcttcttttcttcttatagacccatttacat

SEQ ID NO: 68683 - DNA, 612 bp, Cannabis sativa
tttcagacagataaaaacaacacttccaaacctgatactcaaggatcgaaaaataatcctccaagaagaaatagacctttttgcacacactgtaatgtgcttggccataccattgaaaaatgctataaaatccatggatatccccctggattcaagaacaaatcaaaagaagcttcagcaaaccaaatccaaaccggtaccgattccaaagtacctggtgatgaaggccacactctcctgccacaacttaatgctcttcaatatcaacaactattgaatcttcttgccaatcaacaacctggtatgcctactgccgatcctagttcttccacaggagctacaggtatcatcctatcacaccataacacaacaccaataaatgaatcttggataatcgattctggtgcaactcgtcatatatgcaacaatattaatctgtttcaggccatttatcatacagtaaaaaccaggttgcttcttcctaataatgaatctctttctgtcaataaaagtggttccatagctattaatgatgatctaactctcactgatgtcctttatgttccaacttttaaatacaacattatttcagtcagctgcttgacaaataat

SEQ ID NO: 68684 - DNA, 854 bp, Cannabis sativa
aagaaaaaagtatgaacacaaaagttttttacatggtttttcagttaaaattctgcatagcccacgagtcaatcttattagatttctgatactgttttagggtcttttctcttatgaactttccgtccctttttcagtctaacttgcctctatttgtaattacatagtcaggcaattaatttcatagttgactgatatcttacaacaattatctcctgagatcgtgcggtttgattacataccacgtaaaataaatacgattgatatttgaatatcacacacctgtgattggtctgcttttactggttcaaggtaattgtgtattaaacacgttgtttaatcataacgttcaggaatgtctcgttgggaacatgaaaaaaaatattatttaacaaaataaaaaataagataaataaattttacaaaatacataatttaaaataatatttatcctatatataataataatacaaaataatagacccacttcataaaaaataaaagtaataataatagacccaactatatggcgccaatccgtctctctctctttttttttttttcatttttctctttagctttagacttttgatttctggtaggtaattattgttctttttcttttgcacgaggaaacgataatagatgatcattacaaatctccgtcagctgatcgtgaataattaatggataagttgaaaaaataattttttttatcaattaattaaaaataccttaatattatattttattaaatatatctaattttttgtaagtatattatttaatatatcctcattttttacttaaatccaacatataatttatattaatttttttttttgacgaagtga

SEQ ID NO: 68685 - DNA, 973 bp, Cannabis sativa
caaaattttgaaattagattaaaaattgaaaaatcatttaattaattttaaatcaacttaaatcaagtaattttcattaatgatttattaaaatgaatagactaatatatataaatatattatattagaaaattagtaattactttatgaaatatctagatagttattatccaggtaaactttttgatatttttctagatatatttaattaaatagaaaattgatatttaagttgattagttcaagacacttaaatatttgatagttttcttaagagatttaattaaataggaacattaaatttatgttgaaagttattttttactaattttaaatcaacataaattagaataattttctagatttattttatgttattttaagtaatttcgaaaaatgtatttttttaatacattgaatttttaatttaattatagatatatatttatagaaaattaaatttgagttaaaaataaattttatttaattttggaccaacttaaattaagtaatgttaacgcagatttttgttaactaattaataagtcttaatcgtaataaattagacacagaaactaaaaattacgagaagaattatagtgatgataataatgacactaattttttatgtggttatgtagttagctatgcgtagtccacaagtctatcttattcagataattctagatacagaattatggttttacaattagtgatctgtctctaagatttttttttgtcaccctcttctgtataatatgcccctatttattagaatatagcttgacaattatttacatttgaatttgaaagacataattattttaataaaacgtgggttttgaccacatcccattgtaacgcgtgtatagctaaaaatttgcataaccatttgttattcttatctttgaagtagtggatacggacatgggataggagcatctcgctctattcatagatgaatgacttggtt

SEQ ID NO: 68686 - DNA, 561 bp, Cannabis sativa
tttttttttgattaagagtcgcgaaagcgaagcaaaaacaaacccccaccgaacaggggagaagcaaggaacaaacgttcaaaagagaatacaaaccagtaggaaaactaactaaaaaccgaaacaacaactaaaaaaaggaaggaactaaactaagttaacgagtggccatccgtatcccaaggatacagggaaccaccaaaattggccaaatcgaagttgccaaacaccctgtttcgatttgcccatcgggccgcttcatgggctacaccattacaattcctttggatccaattagcctcccacaggttaagtgaggctgctgcacaatgaaatctttcaagaaggctttgtatattgtgatgctgagtgcttgtagaggatcggttactctgaattgcatcaattgcgttctttgagtcactttggaatatgacattgctgtatcccagagaactcgctaattctgctcctttaactaaagcaaacatttcccctgcaagagagtccctgtagaagcattgaaatgtgtggattttaatcgtttggcctttgtcattc

SEQ ID NO: 68687 - DNA, 1629 bp, Cannabis sativa
  modified_base (588)..(588): a, c, t, g, unknown or other
  modified_base (698)..(713): a, c, t, g, unknown or other
agatccaaatctcgatctcgggtcttggtctggttcaagtctaggtcttgggttaggtcctgggtgccggtccttgtttcgttgccctggtccctatctcgattatgggtctaggtcctagttttggtctaggtttgggtcctggtgtaggttcaagtttgggtcctagtcgcggtttgggtttgggtctcggtctgggtttttatttgggttttggttcgtgtctcagtcttggtcgttgtcctggtcctggtcgtagtcctagtctacttccagttccacttgcgattctgaggtcaagtttgggttcgagtttgggtcaggggtcgtgttcgtgtcgacgtttgagtctggtctgagtttgggttgggttcggatcttgttctaagtctagatcaggctccggttgtgggttagggtcctgagtcttggtctaggttcgggtttgagtcccagtttttgatctcgatatgagtctgggattagttcagggtctaagtcttgggtttcgatcccggtctcggtttaagttcagatccaggtgcaggtcccaggttcaggtccaattttgggtttgagtccaggttngggtttggtcgtggtatgggttcgtgtttaagttcctatccttgtgtgggttgagtgcaggttttggctccaggtctaggtctggcttcagattcccaggtctaggtcannnnnnnnnnnnnnnncgagtcctggattcagatttgggtttgggttccggggcctaggtgcctggtctaggtcccctatccaagtttggttcttaggtccttgtctaggtcaaagttcgggttggggtcctgagtcttggttttagtccaggtggattcgggtccaggtctcggtcccaatcttggtccgggttcaggttcaggtccttgtcagggtctggatcctggtctgggttgcgggtctcaggtcctcacgagggtttaggaccaggttagttctaggtcccggtccccgttcgggtcccaggtctcgggtcccagtcctaatcaaggtctgagtctaagtttgggttattgtttgggttcggttattgtcttagctttgggtcctagtcacagtctagttctaattatgtgtccggttcggtttgaggtttgggtttgggtccaggttgggtcatgtttcgagtcttagttcgagtccgagtacgggttttttttatctcagtctgggtctaggtctgagtccgtgtccaggtttgggtccaagatctaggtcgcaggtttgggtctgggtctacgtttgggtccaggtcccgtgttacgatgccagtctgggtatgggtcggtatttgagtccagatctggttcgtgtccatgtccaggtctgaatcccagtttatatcagggtcttggtttgggtctcggaccgatacttgagtttgggttcgggttcgggttcgagtctcagtcctagtctgggtcttggactgggtctgagcctgagttccaaggttggaatctggtttagtttcaggtcccagtctaggtccatgtcctggtcacggtcccgatcctgttccagggtcctggtcacgttctggttcaagtttcagttttgggtccgaggtctgggtttgggtccatgtcc

SEQ ID NO: 68688 - DNA, 1669 bp, Cannabis sativa
aaaatttaatggtgtttggcacaaattttttaaaactatttttagattttttttcttactaacatattatattttacattttggttcacatactcggaccttggatccgaaccacagaacccggagcccagagcccggaccccagagtccggacccaaaccctagaaccctaaccccgaactcgaaccccagacccggaactggacttggacgccgacgtcagacccagaccatgaccctggaccccgaatcccgaactcgaaccccaaaccctgaacccggacttggacccggaccgacctcgacctagacccgacttaaacccggggccccgaaccccgaaaccaggttcgggttcaagtccgagtccaggtctaggctcaggcggggtttgattcggagttggataggttcatgtcatggtatggtgtagaatattaatttgtttttagaaaaaaataatctaaaaatagttttgaaaaacttgagtcaagcaccattaaatttttaaaatgataaaaaactattttctgttcttacttttgaaaacataattctgaaaacaaaaaacacagtcaaacaacttcttaacttcacattttctttaaaatttaaaaacaacgttcttctaacatgagaatgctacgttcttattctaataaaactaagatttatttatttatttattgaaaataatataaaacatcataaacaaattacggaagaagtattaaaagtttacggattgtaacaaggaaaaaaacaagcaaattatgtaattaaaaaaccaaaaacggagaagcaacggcaaaacaaaatacgttataattatattaaacgttattttttattggttataacataaatagacagaaaaaaaaaatacagaatttgagtccatccacatatgtatcattaatgccggctgtgaatgtattttctatttttaaaattttgttgtatatatcctattaataatctgacttaatgtatttttataattaaggaaaaagagaaaaaataatccatcattaattacatctccatatatactaacaacacagagatactataccttactaatagaaatccaaagtagaattaatataatgtaaatctctttccaaaatagtgtatagaaattaaacaaaagaaatccttggtaatagctcccagataactctctatttctgtcttaaagattcattaatttataattaatgtgtgtgtatatatatgtaagtatatgtatacaaactgaattatccctttttaaaatattagacattccaataagctacagcaggtgttggttttgctaggaaattaataatctcatcatcaatggagtattggtggtttggttctatgaagaatggtttattatctataatggtattggtaatcttatcagccatgcaactagtttcttcgagaaatcaaaggtttcatgatgacatcaatcatagtaatattggccagaacaactgtgacttttttgatgggagttgggtaatggataactcatcatattctcctctttacaatgaaaatagctgccccttcattggtttcaattgcctgaaaaatggtagaccagataaagactacctcaaatatatatggaaacccaacgcttgttatcttccaaggtatatatatatataca

SEQ ID NO: 68689 - DNA, 1736 bp, Cannabis sativa
  modified_base (1171)..(1180): a, c, t, g, unknown or other
ataaagacataattcatatcataatgatgatcaatagtagatcaacctaaattttgagtaatcatgaactcctgttcatgttattattttctttgattcatttgttaaagcttctcagagaaaatattcttacaacatctattttggtaatacaataatgtggataaactttccaaacggatcgaatgttggttccctttaagtgttaattctaaaactataaagttgtgcacaaattttgatgagatctaaattatacttctactaatgaattaacggtactaaatgaaaaagaagtaattagaagggtaaagtggtaatttgcccaaaactaattatgaacaaatgcatggagggctaatcacaagaattgattatatcaatggacactataatataacttagtaaatataattgtacaattactaagagtttaattctatatttatagtggagtaatcatgaaattaataaataaaggttatttagttgatgtgactcaataaataatttagtatattgtagcttagaattatagattcatggttcccgaattgccaccttgaaatactatgaagggaagggctaaaaagttacataatgttgtctgaaaaaatctattttgaattggcaaaatagtatatttttaataaataaataatttttttaaattaattaaataggaaaaagacaaaatttgtcaagacaagatttgttgagacaaaagttgtcaggacaaaagacaccattcttgtcttaattgagacaaggtaggcgcctgtctcccagtgagttttgtctttttggattaattaattatttagttaatttaattagataaatatttgaatttaagaagtggttaaagatattttaaagtagttaagagaatctctcataaatattagtaatcgaattcaattaaagatttttatttatttaaataattaaatatgatttaattaataagaatttaactactataaatagaagtctggttagagaaattagaagaggcttttcaacagcaatttttgaaattattagagaaaaaaagaaaacagttctctctctcaaattgttcttgctcatgtgttgagaatttcaacaagaacacattatacaatttattctaatagctcacactattccttgtgtgtggtggatcgannnnnnnnnntacggtgtgagtttctaatcaaccaaaaggatacaacatacgagacgtttcgaggataccttgatagtcttcatggggtatatattctaaacttataattttatatttttatttaatgtacacacactgtagatctattgagatatggcacaatgataatcagataatacctgtgtacctaatttagtaccataaaactaatataaatctatgtggaacaacctcaagggttcatggtgcaaggataaggatataaagttctcagaataaaaaaatgctttatatggcctaagacaagctccatgagcctgatacaatagaattgacagctacttcattaaataaggattcaggagaaacaaaagtgatcaagactcaaagtatgaatgcaacacttatcgtcactttatatgtttatgatctcatctacataggaaatgatgagagcatgatcaagaaatttaaaaaagatatatgatcaagagttttgagatgaccgacttaggcttactgcactacttttcttaggattaaaataactcaaaaagaagatggg

SEQ ID NO: 68690 - DNA, 2021 bp, Cannabis sativa
taattaccagccaaaattacaacatcgacaccaatatttatataactgctttctagatcattaacatacacatactaattcaaatgttgagaatcacaacacccttttaattctctcattctctttgtagagcattataatctctttaatcttgttgcattttgctgtgaatatattgaccactttacaagaccgctcgttatcagaatgaaactacaataactggaagaagaaaaaagttctcactattacaattagcataaaattaatataaaattaaaagaagaacaattattcataaaattatggtttctactgtccttctcaagtgatacaaaaattataaatgcaaatgaagaatgatatacttacatcagagtcacacataccaattacttattggatgttgttcctcctaatctaaatcatggtcctttgaatggccaaagtaaatttgtatttcagaatgacaattattccatgcttgaaatagtagataattaacaaaatgagttgcttctttgcatacaaattaatcaacgagtattatagcagatagaagagttatagtgcaatttaacatgtttaagtatcacaacctgtaatatcactaagaacgctagatatttattttacttctcatcactttatatgttactaaatcatgatatgaagtaatacatggaagaacaaaaacaaatgattctttctaaaaatcattgttcatgaaggtttatgaaaaagttggattgcttaagtcagctacaattatgttactgtcaaataaaatacaacaccattttgagggattaagccaacttctaatatatacatctacccaccaatatggataacataacagttagataattaacaaatacattcaacaatcacaaaacccaaaccatcaaatgtagaaactaaattgatttccacaaactttacgcccaaatacaaaataaaaaaaaaaacaaataacagaactatataatagtattcgaaaattggaacatgagagacacatataccactgttaatatatatataccaatgtatccagatttcaaaactaaaattataaagtcttcctattgttagagaacactatacttagtgtttgttagggatattgagctggttgttagttacttgagtctattgtttaatttagttagttttgttattatgatatagaattagtttctaaacttgcttaatagttctctgttctatggctatatataatcatctactctatcgtaatctttcattaatgcaataataaagtttttcttttctatcactttcactttcgttcatactctttacacctactacttaaagttaaaggcatatatcatgtaatccattgtaaattatacaaacaaaaacaaaaataatttaaacttgcccattctaatcactcataacaacaacatcaacaacaacaatgcaataattgtccttaaatgaattttacaactgagttcttctatttagttcccctattcctctgaagagaaaaaatttgaaagtctttgccctttgttcaagaaacaaattcacacatcaaagataatcaaaaataaagaaatattaaatataataatattgacaaaaattaatactaaccacgatgcggatctccgacgttacctacagtaacaaacactcgagagatattcaatctcaaatggtaactcctattggattgggcttcacaagaagaaaagccctaaagcttttccttccttaaatgggagactgttccctttattcaataaaaaaataagaaaaaaaaagcacatcgtaatcctctgttttgcggatggcacaaattaacatttattaaacgatgtgtcacaatattatttgttcagaaacaccccaatataatggcatgtttagtttattgtaatcaacattgtaatggaatcatgattacaattctaatatttgcctttaactcagtgacggacccagaatttaaagtgaacgggggtaaataaatttaaaaagaa

SEQ ID NO: 68691 - DNA, 828 bp, Cannabis sativa
agtgtttatggatgatttttctgtgtttggaaattcttttgatgattgtttacaccatctgtctcttgttttaattcgttgcaaagaagagaatttaattctcaattgggaaaaatgtcatttcatggttaaaaagggaattgtcttaggtcatgtgatttcatctcaaaaggaatagaagttgataaagcaaaagtagatcttatttcaaaacttcctccacttaagacagtaaaagaatatatatcattcttaggccatgccgaattttataaaagattgataaaagtctttagcaaaatttcatgccctttatgtcattttcttggaaaagaaaatgctttagtctttgatcatgaattccacgttgcctttcaaaaattgaaatcccttttgactagtgcaccaattattcgccctcccgattggaatgttccttttgaaataatgtatgatgcttatgattatgcaattggtgctgttttaggacaaagaattaacaaggtaccgcatgtaatatactatgctagagaaactttaaatgaagcttaattgaattacactacaagtctacaactgaaaaagaattgcttcctgttatggttgaattagagaaatttaggtctcatttgttaggatctaaaataattgtctattctgatcatgttgcattgaatatctcttgccaaaaaaagatgctaaatctcgcttaattcgtgggtcttgcatttacaagaattttatttagagatacgtgataaaaaaggttctgaaaatgttgtagctgatcatttgtctagaattgttgttgaaactaatcatgattcc

SEQ ID NO: 68692 - DNA, 1617 bp, Cannabis sativa
cacttcttaagaatgtaatatgtttcggtcattgtgtaaagttgcccgtggtcaagtacgcgtcctccatgtccctttgcgctatcaaattgcagatattttcacgaaaggtcttcctttggtgctatttcaagatttcagggacagtttcagcgtacggcaacctcctgcttcaactgcgggggtgtgatagaatatgtatatatttatttagcgtatatgcatatatttagacgatagttaattgtatttattaggtaatatttgtttcttcattattagcctaatatcaagcttgtaaccgttgacaattgttgtatattatgaacctttgactatcaatgaaaggcagggaattatattctttcattgatcactattcattatcatgatcattattagttctatttaaatttttaataccaaaatattcaaatcatagtcatcactaactcaaatccaatagctccaccaacaacaatgtcatcttcatctacaccagttatgtatacatatatatataatacaatctctattttataataaatacatatgactaccaaattgcataattcctcttcttctaattttcttctactattgtttcttattcaacctaataacactactactatacttacattcacaagaaagggataagaaatcgtatacaaatctgtatatatatgtcacaatgaatgaaaatcatgtattataatctaaaattaaaaaattttagaaacccaaaagaggaattatatatccattgaataaaaacaaaaatacatgtataaaaatatgataaaattgttttaaaagatttaagagagagagagaaggatacaaactttgatgatgttggagctatgatgccgacgacaaagaagagaatacaaaattagaaaagatgactgttgagtagtttttgatcagagaaggtttattttttttttttttttgaataaggatgaaattcaaagaagagaccctcaaattaattggtaaatgagaaattttaaaattagatgaggacaattgggtcaagtaaaaaattcattaaaccccaattatagcttctcgtaaaagctaaaattccaaagctagggtgggccaactttttctaaaactataaattttatttaaatttttcaaaaagctatttttcaaattttaccaaacacatattaactcataactttttccaaaagtaattttagctttttaaaaagctccccaaaatggggcctgcatcttcgtcattagatccaaaactcaaagatgatcttcccattgcactacgtaaaggtaaatgcgaatgtacttttcctatttcttcttttgtttcttataatcatctctcctcttcttcttgcttttttattgcttctcttgattccgacactattcctaaaactactcgtgaaacaatgtctcatcctggttggcttgctgcaatgatagaagagatgaatgctttagttgcaaatggtgcttaggttttggttaatttacctcccaggaaacgggccatagggtgcaaatgggtgtttacagttaaattcaatcaagatggaacaatttctcgcttaaaggcctgtcttgttgccaagggttatg

SEQ ID NO: 68693 - DNA, 708 bp, Cannabis sativa
  modified_base (333)..(337): a, c, t, g, unknown or other
ttttttaactatttcaaatgaatttgttcaatgtaattcaaccatctaattataatttggatgattatcaaggagcattgaagcttgtttctcatgttttggtatcttagaactcgatatcgatctacttgagcttgcaaccccctttgatgcaatatcaatagaaacgaagataatccgcactaaacatgtagcaataaattatatatacacatagagtttatagatattccattaaattaataaacatatatagggtgatatctcaaataaaacaagtgtaccttaacaaaaaaaaaaacaaatgtgctgtacaagttgtattgatacttnnnnntctgatttgtttgggctcggctttgttccaataattaatttctttcgttccgattagttctctgtttttgtttccattgagaagagattagaatttgacgcctaaatcttgatcggagattcgccatactctgaggaaatcgcttgatgtggctcggagacgggtttttggcactccttgtctggaatgaagattgtttggtcgaagggtatgggtgttagaatgagagagaggcagaacggagcagatatcgccattggagtcgtatgtgtagatctctgaacgtttttgctacttcaaaagcttagtgaataaatgatttaacaaaaaggaaaaggaagaagaaatagttgggatttcaccaagaacca

SEQ ID NO: 68694 - DNA, 639 bp, Cannabis sativa
aaagtagaggagatattatttgattctaaagtattctatcatcttatattgtataagatggtcccactgcctctgctttattgacacaaccgatgaggacaataccactaactaatattcctagacagaaagtcaaggtacctcgacatagtgggagggtttcaaggaacccaccttgttatgacttggaagacacttgtgataaaaattcattattagtttaaacaagcaatgtatagtcagaataaggacctaagaagcaaagccaagagaaccatggttaaaactattcatatagagtaaccaaaattttcctattacaaggacgagaagggaaattttgataataagtctattcaatggacttaacaaaacttctcgatcctagtatcataggtttgagattatcgaaacctatgatttgtggtatacttggtaatttatttaatcaagtgcaagcaacttattttagtaagatgctggagtatttttctaatggctaactctaaaggaagtcttttgactcctagacatagattttatttatctaaggaacaatttcaactattccaaaaaagatataggccaaggaaggaattccttaagcatcaacagtgagaggtctcatgtatgctctag

SEQ ID NO: 68695 - DNA, 1300 bp, Cannabis sativa
  modified_base (203)..(213): a, c, t, g, unknown or other
  modified_base (278)..(283): a, c, t, g, unknown or other
  modified_base (823)..(823): a, c, t, g, unknown or other
ataaatcatataacatacataaatcacgggttatgatcagacccccatacccctgaccacaaccctaatccccgtgccccacacagtggtgaggctcgaacgttcgtacgatggtacttttaacatggtaatagcctatactcggtacgctagtcatactctagccgtaccaatgtgctactgtatcagcctatactcggtannnnnnnnnnnctctagtcgtaccgatgtgataccgtcaaataaaacggtgctattgaccataatatcagcctatnnnnnntacactagtcatactctagccgtaccgatgtgatactatcaaatagcacgaaagccaacatacatttctaatgtaatctaacaggcttactaacatgcatgctaaacatgtaaatacataagcacactattatactaatcttacctcaattcttaatttaggtgtgccagtcaacctgagtggaacaatctgctcggcgagttacaggctcctaaatcataataatcacaacactgataattgacacgccaaatcacttcccggggacttaaacttgaaactagaagtttccctatcgataaacagcatggaaaaacgctaaataacacaaaaatgggaaaaactagggttcccaaatttgccccaaccgatagacctattccccaaccggaattccggttctaggaggaaatcctggaagccaaccggaatttcggttcctacaggcctctctgaacttgaaatccagttcaatgtaggaatcaataaaaatttcataactcgaccaaatcaatcccaaaccaattcaaactttccagncctgctaattagaccccaatgaacatttctaaagcaataaaacaaagcttcatgtacaaatacaaaaaccaccattgatgagccaagcttgagttcaaaaactccaagcttgctcatccaactaacaaacccttaaaaccttcttaaatcactttaaataaacataatataaccacagaaaacatcatttaatcacagcagcaagaacagcaagctaaactacagccaccattaaaacccaagattgagtttaaaactccaaacttgaatacaatcaactaacaaccactagaaccagcttaattccacatatttaatcacaattaagcttaagaaaacaacataaaacattaatagtagccacaacctcaaaatcacctagcatgcaaaatttcatttccttaaacttcaagaaaatacaaaggaggtgcaagaactataccttggcttggatttactaatcaattagctgagaaa

SEQ ID NO: 68696 - DNA, 739 bp, Cannabis sativa
atatggcaaagcaagcactgcctaggtgatattttattaacctcactggattagtaataagtagtgtacatagaaaaagccttaattatatatccaagttttattttctgcctatttagcttgtttgtctacctgatgtatttgtttctgcaattggtttagttgaattagcttctgcttattgcaaggctaacccaagcaatcatctttgaattgatttaatattgaagttgaagatgagtattgagtcaaatgtggggataagataagagcattcactaccacatgcaatcccttccctactaaggtttttccacaaatataattaagttgtctcttttctgaaacctaccactctttctttccatataattactaagatttttccacaaacaataagaaccatccatataattactaaggttttgtttttttgtttttttttttaaattaaattcttataaacaacaacaggagtttgatacatagataatcctcaacctaagctaatttactatttactgtaaggacatatacaactaatttatgagtagacaaatatgaactaggaatgttttaagaaagttgaaaaataaactagcactatcattaaaaaaaaatctaactcattacaaaagaaataatactttggaaaaacaaaaaccaaagctaaacaaataggtttgaaatgtgaaaaaagtttataagttttattaggtatgatttcaaaattacacat

SEQ ID NO: 68697 - DNA, 655 bp, Cannabis sativa
caggcattatgttgttcagaaagccagtattatgggctgtaaaattgcataaacccatgacaaaggaaaattgtagagtttctaaaattagggtttcctacatatcttctacagcaaagtcaaaggtgcattcaaaaattaaacatgcaaagtaaacataaaggaaatcgagaacttactcaagaatcagatgtctgtattcatgtaacgtcgaaccaaacgagcaattttgatgaaggtacttcagcaagcttgaagccaaaaacctctcttttcgctctgaacttacttagcaaagaaggatggtgaaaatgagtttgtgtacaaaagcaagttggtatttataggcaagcagcgaaaaggggtaatcatttcaaaagaaccttagacgcctcggttcgcccttaaaagaaaatatgggaaataaaaaaacaatcaagtgcaaccgtcaaccgtggtgagagagaatcggattccgaaatattaattgttagagcatttattagtcgaaaaccaaagggacgcccagtcagcctcacatcgtgtcgcgaagagacgcgcttgacacctgtcacccatccaaatgcagaagtagctcgtatgaagtctaaacgcaacttcggaaatcccgtatagacttgggggtcaaatgtta

SEQ ID NO: 68698 - DNA, 1917 bp, Cannabis sativa
aattaagcacattgatgagactctcaaaatacttaaaagcatttaaatatgtcctcttgtttaattttgtatcatcttctcagctgtaaatcgctttgccattgatgtagacaagtatataagtatgtatgatttaatcttatctcatctaaaactagagctgtcaatgtttgaaccttctttcgtatgtgaataaatgcaatcattttctgttcaatgtgtagtcaagcagatattttggtgcaattcatcaggaacaaaaaataaaagttgttgctaatgatttatttgtcttttttctttttaatcctgcaaggtaatgccttagtcaacagtttggccaatcacatagagttttgacttttgagggtggacaccaaatctaccatggcagccggcagaactgtgtccaaatgagctgcatgtatagcttgctaatcctaagagtacaacgtatgtgttgtgttttgttcccttttagtggtcctatttgcctttgttaactactattgcagaccattggactggccaatctgcaagtagctgaattctgaattctgatcattttcatctatttctactatctactctggttcccaagtaaaccgaagtctttattattttatttggggggttggggattttaaaagtcaatattatttagattttacattaatttgttggatacactactatatagtacataataagcttggctaaatcactgcagagcctttttgactgcattttatgtatatggtaactttatgtcaatcttatcagttaaaatagtctctactacggaatttgctaagtgcttcagatacccaggtctttttcttccaagcggtccatcccatttcctcacatatttcatcattgtgattgacattgtaaatagaaatgcagttcctcttgtaaaacctggtggttctcttcataacttccatctccttaagtgttttgtcaagcattgttggcactcccgggagcttaaacttcttgtccaccaatcgagacagccacatggaacgcatttctgatgaatgcaggttcgcaacagtttcgacatagcctataaatcccatgtttgggatcaaaggatggatagtacccctgtaaaaaacagagaaaagaaattcaaagataaataaacttgtaacaaatatgaaactcaatgttcaacgttcctttattgtcttcctttttatttgtttaacctgtagagtggtatgagaccagatggatagtccactaagctgcggaatgactctggcatgatagcttgaagctttttatttccatcatagccagttgcaaggattacaacatcagcttcaattttcgacttatcttcaaactcgattcctttttcccagaaccaccaatttgatgctttcttaaagacaatgtttcccttctcagcttctgggatgaatttttctggtataacagccatctggcaagatgcatagtcttccacaaaagggtgttctggttttagtccatacttctccaagggaagtttccttagcagataagattctatgagctttgaagccactttcctctgtgtcaagatgtatatatatacacattcaattaacatcacatcatcaatacatcaatatttgaactctatacattagtttcacaaaattattcaagggaattgattaaagaatagtttggtaattattaccaataatggagagaaaagagaggaaaggaggagccttagaatgctctggttgggcttttcaagggggaactgtaaagacattgtggaattgaaaaggaaaaacggcaaaccccaaatccagtaatggggaactgcccaatgcagagtccttactaccaatgtacatggtttcccttctgatcctattgaaccccacaaaacaaaaggttcagtgt

SEQ ID NO: 68699 - DNA, 3261 bp, Cannabis sativa
cgaagggtcctttcagccgaagtcctatgaagacctcggcagttccaggctaagcacctcatgaggacggtgggggcatggatacggccgcctcctcgccatttccaaaatttggcacaaattccacagtaacctccacacaattattcaatatctcgcttaaattcccaactgtatctccagcagtctcagccttttttttcctcctcccacttcgagtcttgacccccgagtgtcgcttagaatagctcttcctgcctcttccccgaatcttcttgctaccgttatctttaggttcctcgttagacccaatacagaattgggggttttcatccaccttaggctctccattcagctgaagaggacacggaggaagttcaaagttggtcacagtaggaacagggtgataccaagtgtgcgccttgcgtttcctattgtttcccagcagatgcaaaatcatttcagagagatcaggaggattacaaattaatgattgttgagccatgtacaaattgagaaactcagcccatatagttcccaaaacatttgttgggcttcagagtcctggttgggccagggaagaggagttggctcaggaaaaaggtggggcttttgagacaaacaaacccagtcatgggggatctcaagggtttgggctatggtaggcccaatatcaggaataaggtccaggttattctcattatgggcaaagtcgggctgaggaagagctaaataatcaggccccaaaggatctctatttccctcattttgcacattttgaaattcatcatatgccacctcagcaaccacctcacctacattctcttccgtatcagctacattcccactacttgtatgaattctgacaatagcatctcctgacatggccctaacgtctttgtccttttgcatgcatgaaccaccggatgtctcgccgctgggacactgctccagtgagccgaccgtaatgttcgtctgaaccttcttttgatcctccaacagggttctccttttccacgtacctttgcgtccaaatctgcctcggtcccactccgggccgttgtcgcagtcgatcacgaacttagagaaccctttcccacccatcgtgaaacagttacttctcccagtgtcactcttgatccaagttccatacatattgacagctttgccctccttaggaatcaccatcgccgtcgtagctttgcagaccttatcccagtgagctaatctcccacagttaaagcaaatgagaggaagcttctcatatttaaactgtatacatgattccggctttccatcagcagtaaggaaaaaacccgccggtaccgagtgtgccatccaaacatccacccaagcctttaagaaacccctacgaaccagttcttctctttgcttaccatcagaattgacaaaggagcccacctttttagcaatgattgatgcgttatcattagataagcatctgaccggaaggccatggaattggacccaaaaacgggctacttcgaactctgccaccttcacttcgccttccacaggccagggtttgaggtttaagagcaccccattaaccagccaaggtcttttctccattacatactcacagtcgatttcattatcgaaaaagaaacccattactccatcctcacactttttcatcctccaaggcccaaggcggcgccaaacccccgtcaagatcttcttgaccacggaagtcggcatgtctttgcagcctatgactttgcccacacaagctttatttgccaccacctcttccagtgtaatgtcttcaaacaactctaataactccatctccatctcactatccctttgcaaaacttttcccacctccacgttgatccctgccacctggatgtccttactcggcccagccatcgaaggagagacacaccctaataggacagaaggaaccgaaccaccaccgatacagggcagagcaccgagaaaactaccacaaaaaaactgaaagcactgaaacttaacaccacacagctagacagaccacacaaaaaaccccggggaaacaagaaaaaacagcactagtaaacaaacaccactaagggagagactctacaaggagccatacacaattatttattctactctgattggtattgtggagatatactctatactagccactgttttgtataatggcgtatggcattttttatgatcaatagacactttatttcaaaaaaggttagcttcgtccctagcttgatcatttctccattttctggattaagcatgatttctccatggagcaattctttgcaaacaacttggcttacactaaatactaatgttattctttggatctgattgtgctatggcaatagggctgcagaatgccacagtaccatttctggtccacaaactttatatattatgcatattttacttttttgctacaatggttctaatctattttgttgtttatttttatttttttatttttgttgtaattaaattacaattacatttaaaaaataattaattttttatatctttaattttcttttcaataataaattatatctctagctatttgtgaatttatattattgaaatatctctttaaatatatataataatcagaaatatctatagtaggacatcttgtttcttacctatagtatgggataataaagtcaaccaatcataaatttaaaaaattaaattcttctataggtacaatggtatattaaaattttctactttactagaaagtcgtgagatgcaaaacttataggaaatagaatgagaaatttacatcatacactgattttttccaatttattacctatatactgttaagcggtatttttttcttttttactatgtatatttttttgattttatacggcagtatactgccttttttgtacaaagttttgttttttttttttattaactgattgggacgtgggctgtcacaaaagtgacggttctttattttttttttattttaatggatttaaaaatattatttatattatttcaaaaaaaattataatctattatttttaatatttaataattattacattatcttttgattaaaatattgatggggacgtgggctgtcacaaaagtgacatgttttttacttttattttatttaaatagatttaaaaatcccatcccccatgtcccattattcatcttcttcttcatcttcatcttctagttttttacataaatctcacccctcatgtcctactattcatcttcttc

SEQ ID NO: 68700 - DNA, 594 bp, Cannabis sativa
cacaagcttccttgacttggaaacccaactgaaggactcccttatatggaaagctatgctactcgctagataagatatgatgggagggctatgtaggaaaattggaaatggtgagactacatctatttggtttcattcgtgggtgccgggtcccatacttcaaccccaaccacggcttgatgctacggaagggataagtttggtgagtaacttcatagaaaataattcgtggaaggaggagatggtgaggacatggttccaaccgacagatgcaagacgaatcctaaatattaccctttccaactcctctacaagggactcatggttatggctccctgaacaaaatggaaagttcagcataaagtcagcatacaaaacaatcaaaactcttcatgacactccaagccaaaacaccaagtggagatgcatttggggagctactatgcataaccggcttaaaatggtttggtggagaatcttagcagactgccttctaactaggggtaagctcatgtttattttcaacctcaatgatacctcttgtccattatgctctctacaagtggaatactctttccatatcttttgggagtg

SEQ ID NO: 68701 - DNA, 510 bp, Cannabis sativa
gttaaaccaagaaatgccgttagatagacacttttaatatataaagatatataaatattcataacttattttttactttggagatttatacctaaacataatatatatagaataatagcgttagaccttgtagtcattatacaataagtccaactgtaagtctgtaacattataacagtcatacaacttatgagtaaacgtccacttagtcacgtcataggctatataattacaagactattgggtgacattagagaaattacaaccaagaaaagtagaggaagtgcatcgacagtgacacgtagagttttcaatctcccatctgtactcactccctacaagagagttgatcactaccctaaatcactttcaactaagggtgttcgcggtgcgggtggtgtagtttttgactattttctcaaaccaacctgcacaagcagttttttttaatttcccaaaccacacccgcaccgcgaaactaaaaaaccgcagaaaccgcaccgcaaaaaa

SEQ ID NO: 68702 - DNA, 3314 bp, Cannabis sativa
  modified_base (2296)..(2299): a, c, t, g, unknown or other
aaaaaaagaaaaaacgataaactatagatgcatattcaaaacgtcataaatgtaaagcattaaattgtatttatataagagcattgctattaggtaccagtgtgcctagcaccttctcgacatgtcacgttgcgatttgctagcgatactccctaaaaactattatattaaattatgtgggacccgatacttagttagatcaataggagggtacgcaccactggtaccatttagcatttctctttatataattatttaacaaatactttaccttattccacaactcagggttgaaatgaggagccgagacattaaaagagtgaatagcaagcgctgcagcgtaatccacatgttcacattggtgggcatcactggtgatcaatgcctgttttttataagtggtggacgtccagtccgaacccgttttctcaacccgatccataaaatagaagaccgggttcttacacgggtcttggctgaagaatcgggtattgaaagtaaaaggaccaagattccacgttcgccatgtcttgaaggttaaccacgctgtggtgagatccttggccgaaaccagtgaaggatacaactgtaatgtatagccccaagacactgaaattgaccaattccttttcaagtcgtagcacaccgtttgctggagaatccgacccggatccatttcatatgcaccgattagtcttttgagagagtcaatccgggtctggttaggaaacaatggctccaggtggtttatgtggtggagtgagactaatggagctactgggtgcgctgccaatagcccataggagtgtcctcgaatatcaagctatcataataacatatatgatttcttcaatattgtaatatattaaaatcacaaaaatatttacacaacacaatatatatatatatatttacctggtgaaaaccaagctctctggttaagggtataccgatttcgcttaaacagccttgaactttctgatcagacccaaaaaacttgtggtatctattaatacaagaatccaaaaccctgacgagctcagccgctaaagggtagctaacggcgaaaccaccacctccgtaggccatggagtaagaatgtatcacattctgctccacactctccgagttccctcccacgtagtacatctggttatggtcgtatttccctaaaacgacaaccaaattctctgtaaagaaaacagtatcgtcatctcccatcacgaaccaccttacgttctccaaacctagttcgaagctctccttcaaaatcctagccatccgaaccgcggaccgggagccgtaagagcacgagtacttaaaatccgacgtgtctcccgagactctgtacggcataaaggactccgaagacgtcgtcgtttccggattctcgtcgagccagacgaatccacgagtgacgttgggcttccaccatagctcggagtaatggcgccggtcgttccatgtcttggctgagccgccaataccgaacaggatgtgggatatattggtcttttcctctttttcatcgctagatatcgttgggaaagtggtgatgtttcttggaatggcgtcgtatcgggagaaggaaatgatggagtaacggttagaagagataattaccaagaataggagaagagatatgaaagtcaatgcgaaaatagctagagttgacttgaatttgagaaaattagtgggatataataggacatatttcagggatttgaagggattattgaactcctggttgttaagagtactaccggtttctcttgcggtcgataatgataacatatctgaaattttaagaaaaagaatgatagaaaattattagttatataaatatatatatacagatacataaagtttagttatatattgatctgaccatatggtgtttatttatacactgtactttttctgttgcgtagatactcttcctttgatgatgtgttacatgggtacacgagtcgagcattagtcaattcgggtggcaattgtgctcatgtttataataagtttatgtcatgtggtagtggtgtatttattattaccatagtaaatctcttgagtgtaaatgggtcggtccaatttccgggtatgatccgacttgatttaaattatatatgtatggatttgttccgccccactccattacatcacatactcgaatcggatcggattagatccaaaccgatttattcggatcggatctgatttgactcagctttttttttttttagaattttaattttatattttcttttaattttgtattagtattatttaatacaannnnatgtttggtattgacttgtattgatagattgtataattgtataaagataataaagataatatatttttaataaactcgaccccatactacaagaattatgggtatcaatgacgaaaaatttcgtcagtgaaaggtacatttttcgttagtaatgtccaacaattgtgacatttcattggtgaaaagttgttggagaaagttcgtcagggaaatgtaatatcaataacgacatttaatgtcgttgaaaaaaaaatattaatgacaacaaataatttttttttttttactacattaggatatcaatgacgataatgtcatcattaataagctcgtttaaaaaatattatgattttaaattagattttattaaatattttcttttcttttaattaattaatatatgaaatcatttaattaattaacattaaaaaagtaaacatttttcataataaatatttagagtcacaaatattacaatatcattaaatactgcttactaaaaacataaagcgagtgttcataaaacatctataaacataaaaccaatagttcataaaactaaaataaaaattctaaaagaaatttgtagtatcaccatcatcatcactaggatccctaggaacattcggtatctgtgggtagtatgacaacgtctgcgaacttgtcatcatcttagttgtttgttgcccatgtggtgtcaatatcatctgagatgtctactgcccttgctgtgtcagcatcatctgagatgtcggctgcccttgttgtgtcggcatcatctacgatgtctgctgcttttgttgtattggcatcgtctgcgatgtctgctgatattgctgctcttgtggtgttaacattatctgaacattttgtggcatctgtgtcatttgttgtgatgacatcatttatggcatccgagactgtgacacctgagacttctgaggcgattgcatcatcatattcatcattacttgcgaattgttaggcgactgtgccaaaaactgcaagatcgaat

SEQ ID NO: 68703 - DNA, 807 bp, Cannabis sativa
tcagcattcccacaacttcggatcagttcaaatatcccacaaagatagggactctccgtcaacaaataacaaccctattccatagggattaattatttatttactttgtatttcacatatacgttgcagcttccctattttcaagggatatctctacgtacagcttgtaagtcctactactatataaagggcaagatccatactttgaacttacgatgcaagtacgctcaaaagcactatagtaataagtcatacttctcacctggcaaacattttgtaatgctgaaaggagcctagctggaaattacaaggtcttagcctataatatgcttggtattatctcaagaatgaatacaactaaaagggaagtatgccattacataaataaaaagggtctaacttctataaatccgagtgttttttacatttattatccttcctcatgaggcagtcataagcaacgatcctagtcagactccgcatcggtaggcaaaatccacagtcaacagtttccaagtcaactgataagtgtgttcctatagtagaggtgttcatcaaatcgcctacaccacacaaactgcctacaccgcaccacaccacataaaaaaataatttgaaatcatttgcggtgcagattgctattttgaaactaataatggcagttcaaactgcaccacactatatgttacaaagttatgaatttttataataattttttattttatttttcatataagaacaaatatatgtaatatatgtgtatattatattattttttcttatagataattcaatataatgacttga

SEQ ID NO: 68704 - DNA, 678 bp, Cannabis sativa
acatgcatatggatatatatcgaatcctatatatacacataaatttactcaaatgcatatgtacatatcactacatagtatatactcagctgtattgtatccatctatagtttgtaagaaatcaatattgataagcacatagcataatatatatgtctgcatatttatcgtgaaagtatgtaagcttgttatgtttgtctctttccactattaagtttgtctgtgaaagtagatttttgcatgaaaatatagacgactgcaactaattgcatcaaaatataggtattttaacagttcaaaatattatttggtaacctatgtactaatacaataaaatatcttatatgggattttaaataatttagtttttgataaatatggaataattttgtttatgcatattttatggtatttttatctttttttttatggtatttgttttgtcataatttaaaagtccgtgtatttaaatttgtaaaatttgagtaccctacatctttatatttacattttttttttggattagtttacaaatacaaaaagcaacaaaaaaaattacaaaaatatagttatagtaaattttaaatatttttacgatttttatgatattatttacagaaaatacggtattttgatgtattttcatatgttggactcttgttaatttgttgttgattt

SEQ ID NO: 68705 - DNA, 1290 bp, Cannabis sativa
acagatcacgggactactgactgtcacagtatttatccgtgctttagaaaaaaaaatgagtcatgtcgtgctgtgtcacaaaaaatatgggacgtgtcgtgtcgtgctaatatttttaaagggtatgcctaatattttcgtgctgtgctcagattcgtgtcgtgctttgctgtaccggcctgtattttttaaacaggtcaccccattttgatatctaggctttaatttgtactttactttttcatttatattttttttacaattactaaattatatatatattaaagttttaattatatttatataacttttgaacaatattttacagataattatataaaaaataaatattaatatcattagaatttgaatatttacttataaatactctaatttttattcacaccctataaataaattaataaataattttagctttttatgttttaaaaatttaattatagaattacaatattcaatactatatttaagttttattattattttaacttatttataattgataaattcatattttattattattattaaattataaggtttttaatatgttgtattgtgcttttcgggcttgttgtgtgatgtgttttttgggctagtttattcgtgcttacgtatcgtgctttttatgcttctcgtgtcgtgtcgtactcaagcccgtattttttcgtgcttaatcatgcttgtaccttctgggttcatgccgatttcgtgtcgtgtcaaaaaattcaactagtatttaaagcactataaaaaaatagttaatatattgaaaataattatgtatttattttggaatgcacatgtaccagtgtaataatctgcttacaggtacaattagtagtatttaatgataatttgccaaattaaaaacaaaaaacataattacttgaaacattatacacagattatggtttataaagcttctcaatttaattttagtatatcaattcataatgatttgttattcttttattagttagagataaataaaaacaataaaattggaccttcacaatattgattctgtaatactctaccccataagtagaccaaaagattgtgttattgctccaagaaagaagtaaatattttgaatctagttcaaagccacagaaaatctttccctttatctttctctttcttttctttctttttttcagagaaaggaaaagatcaaacttatatgaaaaatgtcaaaaaaatcatgaacttctcaatctgattttacacttgtgccaagatctccatggctcctctcgaaccttt

SEQ ID NO: 68706 - DNA, 524 bp, Cannabis sativa
gtagaggatatgttgtgaatctttaacccattttctttcttttattttattgagtgaaatccaatcataaacccctttctttgatcactgtaagagagtttccgaatatttatcatgttcactctgggtccagttctcaagatagttaacctccctctaggatgaaattcttattggctagctatccatccttgaatagtatttctggatagttgactccagctcaatcctatccgaaagcatctttagcaagtgttcctggtccgcgagtccagaagctcgtccacgttccgaggccctgatacttaagtttacgtggagacttcgctcaacgagaagttggttaagttagttatttctaactaacttaacaatctcatttcttacagccattgactttaggatcttgatcctaagcctataaataccaccttgtctagctattttacatgacacaaaatagagatgagattgtgagattgagattttgaaagagaaatgattgagaggtagagaaagatgtg

SEQ ID NO: 68707 - DNA, 634 bp, Cannabis sativa
aaaaaaaatgaaaaaaaaaagaaagatagaaaaaaaaatctaaaattaaaatgtctctcttagaaaaatattacttcacaagtgctaagcatcattgatgcttttttagtatttatctttattttctatgttgtttttttatttaatggaaataatataatacaatattaaactcttaagttctcaatgtgggacaacagtcctaccggaagagatattattatatacaataataaaaacatcctaatctttatgcaaattaaaattataaaacataacatccaatgatataattaattatatttttttttccttcaaaatgatccaatcatataataatcaatcttatcttcatggattgtcatgtggaggggatcaagtggtcaggtgaagtctttacccaaaaagagaacaatcaaaacctaatccattggatcataaatgttagatggagagaagcttttgtttggtagaatttagcttaccttaacctaattgccaagactctaaaatttgatttgtgttttgagttgaaaccaactatattaatgataatattaaaaactatattttctcataattatgatatttttcttttagtcaaatactttctagactttcttgtagtttttgg

SEQ ID NO: 68708 - DNA, 1043 bp, Cannabis sativa
tgaatttgatgatgtttgttgtcacattaaggacaagaaaaccaagcaagttcttcttcggggtaacctgtgtgaaggcctgtacaagttacaagttccctcccctaaatccaaggacttctctacaatcactgctgcctccaacactcctcaagccttcaattttacaacaaccagcaatcctgtttacaataaacatcagactgctactgtttggcaccataggttgggccatccctccaaaccaatcttaaataaagtgttgtccactgttgtacctagtcattccaacattcaacctgatttttgtaatgcttgtcaaattggcaagctttatcaatttagttttaaaagtaccagcaataataccactatgccattcgaactaatattgtctgatgtttggggtccttcttttcacacatctactgatggttacaaatactatgttagctttgttgatgatttcactaaatttgtttggctctttcctatgacaaccaaatttgaagtcaccaacatcttttgccaacttaacagctttgttgaacgattttttcaaacaaaaattaaaagtatacaagttgatcttgacaaagaatatgaaccactctataagatttgcactaagttaggcattctcaaaagaaattcatgccctcacactcatcaacaacaaggctgtgttgaaagaaaacacaggcacatggttgacacaggcctcacccttttgacccaagctgaaatgcctttacacttttggtgggaggctttcacatcggctgcttacttaataaacaggttacctacccctattctcaattttgtttcaccatatgaaaaattgtttcatcacaaacctgactacaatcttttaaacgtctttggttgtagttgttttcctcttcttaggccctatgagagtcacaaagtatctttccgatcttctaagtgtctctttaaaggatatagtatctcctcaaagggttatcgatgtcttcaccctagtggccgcatctgttgggttttatggcctaaataaa

SEQ ID NO: 68709 - DNA, 1079 bp, Cannabis sativa
ctataaccatagaataaatcatgagtggtagatacctgtttgggatttttttttttttgtaaagagagttgtttttttttttgttctcctcctttcttttttaatagtttaaaaacactgtaagtaccttgtttttttgtaactgttgttgataagaagaatacgagactctagctcgtttttattaagctttttgttttaagtacttcaaattaactcaaaaaaaaaagaaaaataaacacgacaaaaaattattatatgtatgtttcatcgtaattatatatttttataattctagatatttatattgattttttcatcagtagtattcttaaattaagatttataacatataaaatttgattatactaataatgttgtggtaccacactatcgtcgtcaagctaatgaatatgtgtaagcgacatgataatgaaaattaattcatatacgtttatgttttttttttaaaaaataaataaataataaataagtaaaagaatcaaataaggtgaatgatgtcatgtgatcactctcttaatttatcaccctttacttttatcactcttccttttttatttagtagaattttttttttttttttaaaaaaaaacactttattttaaaggcagtggctggctacattgatctataagatcagctaaaaaaacaaaaaagaaaagaatcttttatttttagaagggttgtggtgctacattgatctataagatcaactaagaaaaacaaaaaggacaaaaaaacaaaaaaggacaaaagatccaacattaatctcatagcaaagaaattagagttgtaggattttgtgctgggccaaaaatattagcccaaaaaaaaagatgcttcccttatcatatatatatatatatatatatatatattggggaattataaggtagggctgcttgtttttaccttatgctataggaaagtaaattgaaccaatcaaacattatagaaaataaagtatacaaaattctttgtgaaacaagtgtaggagattttttcattaattgatattttactttatttgctttatttaattgatgtttaattccacc

SEQ ID NO: 68710 - DNA, 2210 bp, Cannabis sativa
aataggtgactgaactctcaggtaatgaacacactaaatagaatgcaaaatacatataaatgtcactactagcttcaagttgacaaactagtcactcactatattaacataatagctaaaaaggatccacaaacaaattagagactccagaagagaacatgattcaaaatttgactctttagacatgaaaccatgcagctaactatgtaagtaagcacataaatcctttaccattataatcaaatttccagaacaagatcaaacaaaaaaaaatattaaaaatgtgatacaggaacaaatggaaaactgacataccagaagagttcacactttccaagagaattttgaagcatctatgcatacagtttatctccctggtttgaatccccttgtgcggagttgctaaacaactaatgaagaagagaaaaggccttaaaacactgcacgatatctgtgtccgtgtcaacgaaccaacatagtcctcgtagttcttgtcccaatcttcttgaagctgcaaagccacttttaaagtaacaatgtaacttctccagactctctgaaataattacaaaaggaaacgatcagagttaggctgtttctgttccaaagtcaactcaaggatagagaaaaaaggttgaactccactgaatctcgcttccagtagtctccagatacaggaactcctcatttcagctataataaatggatattaaatgtttaaaaacagataacccatcatactcaaatcccaaatcatgaacggtgctctcaatcttccattgcctctaatcattatagcacagaatcagaagttacaatgttctaatacaaaacattctcaataaacaaaatggtatctggaatagcaacttctacaactcttcactctcccatgtcataatatggcacttttttttcttattcaaaattttatagtacaccaaacagaacccaaaaaatcaaaaaacgtgtcgaacaacatcttcaataaatttgacacaattccaaagattaaaaataatccaacaataagaaaaattctacattccatatacctgaacgaatatggcagctgctgtagctcgtttcgcataatggcgaagctctctttcttgagaaaccttttgaagaagagcgtctctcgttatctctttcgcactggctcccctcaaggacacctaattgatcaaaacaacaaggaacaactctcagatatcgagttagagatcgttaatttcggagaaaattgaagcttaaatagtagaaatttaaagaataccaaaagaagttaattggaaagcaagagaataatttggtcagaaatgggaaagggagtaaaaacctgatgcttgcgaggttcatccatgaggaaccgagtcgatcttcctttgtcgtttcgaaactggaggaagtagaatctgattcgattaaaatattttagttgagtttttttatatctattttaaatataatctattttatatcatctttcattatattcttttttttaataaattttttgaatttttgttatttttacattttaaaataattttttttatatatttttatgaaattcttataacaactaaaccatcaacttaaattgcaactaaaatttatataataactcacataaaaattaacaaaacaataaatttaaacaaaaaaatattaaaaaataagatatagaataattcactagatttaattgttctgaaatagcattaattcaattatttttaattacaaaaatcatatcatgaagttaacacatcttattactctcctttctcacttaaataaaacaaaaataaaaatgattagtttttcagttttaaccaaaaaaaaataacaatattataaaaatacttccagctggccaaataaacaaatatacatttcaactaaaaaaattacacaaataccacttacacatacatttaacccaagatctatacttcctgggcaactatcatgtaatcatcgcacaactatcgtgcaactacgcagtaacccaacgcaaccgaaacgaaaattcaatcagaaagagaaccaccattaattctggcgacttcacctgagaagacgaccagaatcaatcaaaaccgagactgttttaaattcataaaaaaaaaaaagtgtagaaaaactattacgaaactaaaattcaattggaaatccaatttaatttgcataaaactaatgtc

SEQ ID NO: 68711 - DNA, 660 bp, Cannabis sativa
tattaagtttttattgaaagtgtataaaaattcaatatataaatatataaataaaaggtaaataattattaattacattaataagtcgtaaaaaaataaataaaaaagtgatatttattgtgatgtaaaatgtagtctatattttgtactaaatttagcataatttttaatatgtgctaaatttaaactactttatatactactattaaaatttatttctataaaaatgagctaaattatatatatacacaagcaaacttaggatttaagttgagggggcgacacttttttttgtatgttaggggggcattttttttttacattgtataatatgttaaaaatttgtgtaaatttgtattttagtattaaatgtagtataaagtaaaaaaaaagtaacaataaaaatattagattcaataattaagacactaaatataagtcttattggtagagatttaaaaagtaaaatgcaaatactaaagcaaacatgcttttattaaaattaaaactatgagctccattatatatatacatgaaataattttatcattgtaccaaaacttattttatattcataaatatcacttttatttataaatatatgttgtaaccagttaaaatgtttaaatgtatatacatttattttctcgattttttttc

SEQ ID NO: 68712 - DNA, 678 bp, Cannabis sativa
atttggagtttaatagggtgctgagatttactccaattcctaatagtggcaacacagttagattgtttgtcgagaaagagcttcaagggagatgaaacagaagtcccagagtaagtccaggaggagataagaagatttgaaaatgagggatctttcagccaatgattttcaaagtgaaaacgattagatctttgagtagcaaaatgagggtcttgaaacatgatctttaaaactctatgatccgaaccataaaaccccagatggaagagagtagcatggggaaaaaggtcacgccagagctggtttgaggtacaccaatccagacgttcaaggatagaaccatgcttccaagtaaatttaggcccaacatgaggcatgggaatatgattacgattatccagaaaagcatggaaagaatgcataacatgaggagggggattaagagtagaattcctatcatttagggagagataatcattaaaatcacccataactaaccacggcaaaagaggagcagtatcaaataaacgattgagtaaggtccaagtaacagatttaagattaacatagggagaaccatagtagccagaaaagtgccaagttttgccattaaaattatttataatacagtctacatgattaagggagtaagatattacattaacatcaatacagtct

SEQ ID NO: 68713 - DNA, 1520 bp, Cannabis sativa
agttcagtttgtgtatatcaatttttgtagggagatcgaaaattgtaggtggagttggtgttgtggctttcgttgtgcttcagtggagtttgtagtgtgggatttcttagtgctgaggtaattagagtaatcaatttgattttttttttttaaatattgatcaaattgtgggtttcctcttgaggtcaaaaaattaaaaaccttgaagcataccacttcaacagaagtaacctctagcaatcattttttttttatgaagaaactttacaaacattattccagccaaaaaaaaagctctataaacattattaaacgccacacggatttctatgtcaactttcaaccgattctaatacaatctactagctaaaatttgtaccctcattttagttcacttgataatgtggatcccaatatattttaatacagcaccaataaaaaattattatttttgtcatcaaaattatagttaataatgaatgtaaaattttataatggtcaattaatcaaaataattaatgtgaaaaagtagaatttattataagtccttaatatttttgaaccaaatttaagataagttcttaaaacactattgtaatagttttcatatttttcttttaaaaaaaagtgtgttaaaatataataatataatatttttttgaataataatatatttacagataaattatagacaaacttcttgttgacattcagatgtgtgacaaatttacgtctaaatattaattttaaatttgttaaaataatttatggtctacatatatacttcaaatattcaattataaaaatcaaacacgtttctattagaattttgcttttgaattaattattacagtctttagacatttttttaaaaagatgttcacatatttgtttgtattaagtaaatttttagtattgtttaatgcatataaaaataaaggaataatttgttgaataaataaataaatataaaaaggataaagtaatgatatgtgcatgtatttgattgtacactcagaaccactacaggagtatatattatattcgtttaataaattattaattgcggttacgtcgattaggtagtctacagtacacttcctatgttttggtacacttgttatttattttgacatcggaagagtattttagtttaaattgttttatgatattgagtactaattatttaggactataacttatttaattttttttatgaatttttagtaaattaaaattaatttatagtgtcaaatatatgtttaaataattatttaccattaatataaaaaaataatcacacatctaataaaataaaatatttcgatatttttaatacggtaaattatttaagatttacaagtgccataaataattacatatacaatcataaaaaaaatatactaaaaaactatttaaattaccataaagatgttccgaaaaattagtattttagaaaatgactaatttgcagcataaataactaagtttaactaacagttgcaaataaatatctaagt

SEQ ID NO: 68714 - DNA, 718 bp, Cannabis sativa
aaatctatttaacgtgtcatactacttaattatataatacgttaattaattccacttttgattatttttctgaataatcttataaaaaaaacccatgcaaattttgttaaaatatactatgtgttcaatatctttttctgtgtcatactgatattattggttaaaaaaataatttttaaaaaatatcgctaactaatagtgaaggcccaataacaatactcgaaattttagtatacaaaatataaatagagcaaaataattatattattattaaaagaatgattagtatttttgtttgacccgacgttgctaaatgatgatactctaaaatttactataatgtggtcttaaaaaattaggaaaaaaagatatagaatagtttgaactcttgtgattatgtatagaatgtgtgtaatcatgtttttgtattaggttgtaaaatgattttgaagtaatacaaatgagctgatatttgtagtaatataatcattttgcagtaatgtaatgtggtcattttgctcttgtgtctcttgaaatataacataatgtgcttatttttttaaatttttctgtacaaaaatgtggcaatgcatctaatatgtatagtgaaatgtcacattactttattactaaatataacaaaaataacataagggacacatttctataaccgtattcaattgagaagtttttttttttttttaacaaattacatatg

SEQ ID NO: 68715 - DNA, 2551 bp, Cannabis sativa
gctaaagagaggcaaaagaacttggagaagagtattagagaggaagctcgaagattgaaggatgagagtggtggagatcctgaaaggagtaggagagttgacagagattcagatagtggttggttgaagggtcaattgcagctccttgatcttgatagccttgcacttcaacatggtagactttcttcaaatcataaatgtatccttcctgataaatcattcagacaagcaggtaaagggtatgaagaaattcatgttccagcattgaagccaaaaccttttgatcctgaggagaagcttataaagatatcttccatgcccgagtgggcacaaccggctttcacagggatgacccagttgaacagggtgcagagcaaggtgtatgagactgctcttttcaagccagacaaccttcttctttgtgctcccactggggcaggaaaaactaatgttgcagtgctcaccattcttcaacagctcgggttgcacatgaataaggaagatggcacaataaaccacaacgattacaagattgtatacgttgcgcctatgaaagctcttgttgctgaagttgttggcaatctgtctaatcgtttgcagcattatggtgtgaccgtgagggagctcagtggcgaccagactctaactcgccagcagattgaagaaactcagatcattgtcacaactcctgagaagtgggacatcattacaaggaagtcaggtgatcgtacttatacacagcttgtgaaacttctgattattgatgaaattcatcttcttcatgataatagaggtcctgtgcttgaaagtattgtagctagaactgttaggcagattgaaactacaaaagaacacatccggttggttggcttatcggctacactgccaaattatttagatgtggcattgttcttaagggttgatcacaataaaggactgttccattttgacaatagctataggcctgtccctctttcgcaacagtatatcggaatcatggtaaggaaaccactgcagaggtttcaattgatgaatgatctctgttatgagaaggtgttggccgtagcaggcaagcatcaagttctaatatttgtccactcaaggaaggagacagctaagacggctcgggcaatacgtgatactgcacttgctaatgatacaattggtagatttttgaaagaagacagtgccagccgtgaaattctccacacacatacagatcttgtaaaaagcaatgatcttaaagatcttgtgccttatggttttgcaattcatcatgctggtttgaacagagctgacagacagcttgtggaggatctctttgctgatgggcacatacaagttttggtctccactgctactcttgcttggggtgtgaatcttcctgcccatacagtgatcattaaaggtacccaaatctataatccagaaaaaggagcctggacagaactaagtcctctggatgttatgcagatgcttggtcgtgccggtaggcctcaatacgattcatatggtgagggaataattattactggacacagtgagcttcaatactatctttctttgatgaatcaacaacttcctattgaaagtcagtttgtttccaaactggctgatcagttgaatgctgaaattgtacttggtactgttcagaatgccaaagaggcttgtagttggcttgggtacacttacttatacgttcgcatgattcgaaatcccactctctatggtttggaagctgacgttctcaagagggatgtaactctggaagaacgacgagctgatctggtaagttcctatcttttctacataagcttgcttagtgttattcaggagtaggtgtcttatcttgcagcaggaattaaaaaggtggccagggaattatctttgttcatagtgttgtttatttgtctatttctctgttgtttttcttgaaaattacctaattcttcttccagcttaatatcataggtcttattttaatatcctcacttcttttctttttgtgattctttgcagattcattctgctgctaccatcttggataagaacaacttgatcaagtatgataggaaaagtggatatttccaggttacagatttgggtcgtattgctagttactactatataacacatggaacaatagctgcatataatgagcatttgaagcctacaatgggagatactgagctttgtcgtctgttctcactcagcgaggagttcaagtacgtgtctgttaggcaggatgaaaaaatggaactagcaaagcttctcgatcgagttccaattcccgtcaaagaaagcctggaagaacctagcgccaagattaatgttttgctgcaagcctacatctctcaactgaagcttgaagggctttcattgacatccgatatggtgtatataactcaggtttttatcttagcctttgttataatttctttctcttttctcatcagtaataactgcctgcagtttgttgttttgttatatctgtttattattattattatttatatgtgtatgttttttctttttctttttagagtgctgg

SEQ ID NO: 68716 - DNA, 2048 bp, Cannabis sativa
ctttgtacaggtactcaaactaaaataattggtctcaattttcattgttttgattactctaaaaaaaggcttttaccaaaagatgtttttgtttgtcaaaaaggattaggattttttttctcttctgacatgtaacaaattgtgtcttgaactttttaaggcattaaagaactctttcgaactattgagattgttggattcagtccaattctgttcaattttactaactgttaaatgtccaagtttggggaaagaaaattctaattagccattagtttttaaatgaagtattaggtgaagcttccgtatgagaattttttttctttttacatattatcattctgaatatgatgtcaagtatctggaatgattcaagtcagtaaaagcatacttttctatgtaactaaccaatatacaccatttgactattttcccattcaaatctactattttggtaggtaaatctagtctcactcttatcaaatttattgtctatctatcattgtcattaactttttgctcttttagggtctgtttggtacaccgtattatatcttattttattgtatagtgttatattaaattagtttatacgtcatatttttatataatactatgttcggtattgactgtatataaaaagtaaactaatttttccatttaaccataacaaccagatagctgcatatggaaaaggctttgtaagagcatcccaagacacatggggactattcgaaaggcaagaaatcgtgcctgttgttgacgccgacatgacaagctcgatttgtttcctcaccggggtatgcagcggctccatttgtgtcatcgtagcggctgcttggacagctagagttcaccaaagtttcacagcaacaatctcacttcttgttttcatcattggataccttatggttagtaatccccacttcttgaccagtcttttacaaagttattagctttattattattgtaataataaattaatattatcttgactcttttttgcattcaaatcacatgtttaactgagtcagcatttttcctttttctaatggcattattcagacaagaattgccatggcagtacctcatgcttgtgtaggctgttactatgtttgttatgctgagaatccagacaataggctatttgacaaaacaatcaaggatagggtccacatgattcaatcgggtcgcgatgtggttgtgcctacacctcgattaccccgtcggtatacaacttgagaaataccaaagtattttaaagtgtccaacataactccgctactttgtatgatgttgagcaccttaaggttaatcagcgagacagatcgactcgtagagcattgtaatcctttcaagattctatttttctttttgggttcttagtgatttgtaaatacattaggttgtttagatcatttgccatagatataacttgtaccatatatttggctaagtcttaattggggtttttgggcttaaccaaagtttgaagcttttgttggtggtgataatgacaattttgaagtgaaaaaaaaaagaagagcaaatatgaggtaaggaaaatggagagcctagttgttataccactcaacaaagctatgaagaagaagaagaaaaaaaagtattttaattagcactaatgtgaccccattagtacattattataattgcataaacttttagcatattccatgcagaaaagtcactgaattatttaattatttattattagtttctctatctcaataaattagcttagcacaccccaccaaatattttttatgtacctattcattatttaatactatgtgatcttgtatgaatctccatgagttttgtttcagactttatttcttcattttatacatgtatatgtaattataatatgcttgtatattctcaagtgaaataatgcacataagtgatagttgagttaggtttggtggaaataaaaaaaaaatgaataaataaagaaattggtgcctaacacatttatgtcattatgttatttcaaattcctctatatactcttttttttttttttt

SEQ ID NO: 68717 - DNA, 1819 bp, Cannabis sativa
atccaaatcccagattttacaatagattttcccagaaacattttcaataagaaataaaaaaaacatgaactaactatataacaaaacacttctttttaacatatttcttaaaagtggcagcaggtaatgcatatttgaattgatgaagtttgcatcatacataaaaaagaaactcaaatgaaaagataataataataaaaaagggaaaaacttacatcatccaacagcatactactgctgtgacaaccaatgtcaagtgaagcctgcacaaaaaataaagattaaattagttatctgcggagttaaaggagttccaaaagagcaagcaattcaaagaacttgcgacctaagtaatatctgggatataactagtaacttctccaaaaatctacaaggaaaatataacaaggaactagcaaatttcacactttcgtgttattagtttcacaagttacactattaagtttgacaaagttatggttacataaatttcgtcaataaatttgattcagttacagttcctaagtgcacagaaaacaatagggagaacgatcagaaatataaaaggttacgctttccttgaatagatgcttaatcaaattcttcgcataaaatcgagagtactcaaaatctcaatttcaattgttacaacattccttatgaccaagttcttaatcttctctcataatccacaaggcatagctctctaaattccaaacaatgctaaaatgcactcaaatcatattctatctggtcattcattattctagaatgagatatgtgaaaaccaagatgataaatgaattaaaaggggcctcaaacaaaatatctataaatcagacctagaggaacaatcagtacattacatagaaaaccattaattaaataaggatggaaaacatacagactggtagagctagaagtgtttctgctgaagcagagttggaccagaagagatgcaattatacccacaacagcaaagattagagttgtaatcacgaaacccatcacggctgtatctgattccaaccctttcttcaagaaatcaaatcggcgaaaggctggaacagtcgatctgcaaacccaaaaatcccagccacaaaattctcagcactcaaattgggtattccaacaaacacaaaatgagtaaaatagtttaagaatggtaactaataaaaaatatggagcggtatagaaaattattataatacatgttttatatataaaatttgtgtgtagtatctccattattttgtattgtgagctagtgagattgatcttagattgttttggagtgtgtaactctgtttagatgattcacacagagtggatgtatgctattaggagccgaaccagtataattttctgttgtcttttacttacttgcatttgcatttagttctcctgtttcctaagttttgcaagaagattctatgtgatttgttttagttttggttcacattttggtagtcttacagtagtatttcctacaacatacttattgaatttcgtttatgaatatgcatataatatacagatttgcaacaaaaagatgtacaaagcaaattaaaaggatacattgattgccacactagtacattggttaaacactactatattgtaccaatggcacttgataagcaaatgactaaaaggtaacaccattaaagaagaaaacgatattcgacactattcaaaattcatatactgaaataacatcatctatggtataaatgcacatgtaacgacataactttcttctacaattattctctctttatttgattattgcttcagtggtctgatctgatcataacta

SEQ ID NO: 68718 - DNA, 827 bp, Cannabis sativa
ttacacctctaggaggctagggcaggatcaaataggctcccacacactcttccatcccgagttgttccaagccttaagaagcttctctaggacaagattgtcttttgaaggtctccgttaggaagtcattaagctaattcctttccttaaacgccacgtgtcatacatacagaaatgcaaataacatttaccccaagcttttgggactctctacagtcgagagcttgtagtacttctctgcttctttatgataagcccttgacacgtggtactgactgagatcaccaatgtatcctaggaactgtcatcaatcaatgggtcattaatcgcagttattattgacacagcacatgggggatgccttaaatgtgattgttggtagtatgcgcacgtgggggcatgcttcttggaaggaaatataatgatagcaagtcaattgagatgaccccttctttaatacaaacatcatacgaggcgtgtaatgatggatgttaaacattgggactgaacattgaatgcaatctttttaactccccatctgtcggatcaagatatgctttttggcagaagtggtttaagccatttattttgaattgcaaagacttaagctggcatataaataggttttaagagcctatttttttccttttttttcatcaccttcaacctttggaaatccctttggattttttaaatcaaagccctaattctctcagttctttctaaaccctcgtgcatttcattttctaaatgttaaacccataaatcctaacttgctccaccccctttcaaacaagaactctgacattcaggctagctacaactga

SEQ ID NO: 68719 - DNA, 765 bp, Cannabis sativa
agattaaacagtttcccatatgttggatttttgactgactcgacttttaaaatgcatgcaatagtaggaggaccaaaaggaatgcgagtacccctaacaaatgcactaacataacctggatgaccctcaataataacagtcctatctagatttgcatagaattcacaaattaaaatgggatgaggtgcagacaacttagagacagtgtgaacccattccctaatttttaaaaattcatgaagttcagaaaaatcatttaaaatcactatttgtttgaaccatagctcacgactaccaaaccatcgttggtacacagacgctttggaggcatcaacaaagcattgaacagatgatgtgtcgacatttaagatagggattttagaggttttgtcttttttgagcctttggatgactattttggagatgatctgtagataggatgggaatagactttgtcttggactttatgacaggtggttgataagtggtattacacgatgattttctttttggctaacttctttctttgctttgggaaggtatagagaccttagatggaggacgaggtggtcctatggggttcgatttaggcaaagaggaaggctggacaggggatgaaggagactttaaactcgaagatgagcgagtgactctctttgaaacagactgagtgagtgacgataaagaagaagcctttttagaaaggggaggggccttacgttgaaatgtgcgagacttttgactaactggaggcaatggcggaga

SEQ ID NO: 68720 - DNA, 1182 bp, Cannabis sativa
ctatgtagaattccaaaaatgccaaaaaaaaaaaactgttttgaaggataaaaataaaaaaaacccttatttttataataaaaaataccgtctttttataaaataacagtaaaacaattacaacagcaatgcaacaactaaaaaataatcctacaacaaccgtgataacttttattaattaatgaaataataataatggtgtgtccagtgtctactttggtaactctttccagactccagtactttacccaaaccaaattgtcttaattaatttcactcttatctaatcaaccaaattagttaattaattaattaatgtgtttttaagtgatcaatcaaccaaacaagttgagcgaggtcttcctgtctgcgagagtgagacgagacctatttggcctactcttttttggagcttcaatatatattatcatcaatggcggtgacaacctttttgtgtaaacctttttgagagtagtccatcaatctgcaaatataaagcttgaagagtaggtattgtggacattgtgcaacatggaataaatggtagagaagtgagccatatataagaagctactcgactcattgtcaattggttttgagatggaaccccattattctcaactctaggagagtagtaggagaggtttgtgtttcttaaacacgacttttcttgattgatggagcggtgatgatgatggaatcattcccacttctgcttctcttggcaattacgttcttactatacttaatattataataacattaatcttctttctttcactcttgattttctctgataatttcaataagaaataattacaatttatttccttggtggattcaaccataagaagtagctactggtgtctcagtttgggaatggagctgagccatcaagaatggtaattaatgcttatcatcctccattccattccattcagtcgtcttgtcttgtttagtttcatgttggtatgtatactaattatatagagcaaagcatttatacaaacacattaattttgttgcaattaatgcttttatttagcatagagaatgatatttgttgaatctggatgtactgaatatgatataagaatatttttatttaaggaaatatatttttatttaaagaaataaatttccatttaaggaaataaataaataattgattttttgataaat

SEQ ID NO: 68721 - DNA, 607 bp, Cannabis sativa
cggctgctgataacttcttgttggccacaaatattgcatctatggtggcccagaaagagtttgaagggttggggggagtgattcgtggccatgatggtgttgtgtggatggagtgggttttagtgttcatgtggtgaaactccttgctctcacaacggggttactgtttgcacaccgatttgagtttacttttgcctgtaataattttaattcaactgtggttgttggctaggtgaataatcctcatttaaatattatttttaattctattatcttgaatgttaattctttaatagctgctgtcattggtggttcttttaatcttctctctctctctctatatatatatatatcttctttttttcttcttcttctcgctcagattgtctcaccatcttatcttcttcttacaggtcgttgttgattctcgaagaagcggtcagatctggcttgaatccaatcaaatctggactgggacaagtcgaatttgggctgggttcccttgcccttcttctcggctccaatggcagactgacccacaaaatcgagatctcagttattctccatagagatctcaattgtcctccctcgatttattttttagatc

SEQ ID NO: 68722 - DNA, 1464 bp, Cannabis sativa
  modified_base (826)..(830): a, c, t, g, unknown or other
tttttatttttaatttttaaatatttaaataataaataataaaaaaaattaatgacatggaccaatgaacgagtgacacgtggacactaacctgccacataacggggaggtacctacggaagttccagagtagtgacggaaggtttttttaccgccaaaaataggacttaagtatttatctgctactcggcataaaacttaggtatttatgccgtaaattactcattttttttctccattatagcccaaacatacttggatagcatagcctggttccacttggatccctctttgaaaccgaggcctccatcgacttttaggagacaaactttctcccaagaagtcatatagattttgctcttttcatctttatttccccaaagaaaacctctgcataatctttccacctcttttgttacatgttgagggagaatgaaaatgctcatccagtaatttctgaggccaagcaaaacagtgtgcattaattgagctctccctgcaaagaacaggtgtctactagcccaattatgtaagctttgcttaattttagagataataatcccacaatcttcaaacttccatttcgtacatacctatttctttattattaaaatatttttattttactattttttctatgttaaagcatatatatatgatttatttaattgtcatttatattatatatgatatatataatttatgatatattattacaaaaatttattatttaattttgtgatttaaatttttacattatgttataattatctatattaaaatatattctatatttaattggtctttatttatttatttatttatnnnnnttattattatttaaaaaaaaatagtccaatctattttaaaaccaaacacaagattacattcaccataatctaatctgattgtaaagtccaatcctgcatgccaaacgaatcttcaaggaatagaaaaatagattatttcataaatatacaaaaatgataataaaaaaattacggttgtacgaaactttaaatgtttttacggttttttaagttttatttacagaaaatacggtcttttgatattttcatgttctttttattttgttatttatatattatttttatattgttttgatattttttggatgttattttgctttacttttatttgatttttttattatttttgtattatttttaaaaaataccacaaaaatatattaaaacgatattattttctgaagcaaaatatcttcaaagaaggtcctctcgagtactatatacatatgggttgagatgtaaaatttccctaattttaaaaactaagttagtaaatgtctctttttaaaaaaaaaataattaaattgttaaatataataaattggctaataaaaattataaaaatatatttattacgtattattttttaaatatatataataattaaatgaagttatataattttttttagtat

SEQ ID NO: 68723 - DNA, 770 bp, Cannabis sativa
gttcttcctttgttccaaataattgttcttaatttttactgtgtattttgttctgtatcatagtttgatttgcatgagaaaggaacacttggatgttataaaagaaatccaaaataattctaatggaaattgtatcaatacacttcaaattggatatttttttttttttttaacatttgtacagtttttttttttttttaaagtttttcacttttttttttttccagagaaaaacattaatttcacgtcgttttttcatggctgcaaaatagaaacaaaggaaacacaacagtccgaatttttgtaaaaagaaaaacttaaaaatccataaaaatgtaaactttttgtcatttttttaatatttatgacataatccctaagcccaaacccaaacagaattgagcccaaatagcaaaaggcccaaaacccaaaaccctgttgcctttgtcgtcttctccgtcgattcacacaaaccaaacataatatatctctctttctcactaccccaacggaaccctaccccctccgccacccaccgccgcctatcttccctctccggaatcctcatgatacggtacgtgtatgatatgtagttcttttctgtaattttcctttatattgcttttctttgtgatatcatttgttattgatacaatacaatacaatacttagtaaattgctcatttcattttatgactccattgttggatagtgatgagaaagttgaagctgcaaccaaaatttttattgttatgtttaaaaaattataa

SEQ ID NO: 68724 - DNA, 2280 bp, Cannabis sativa
tagatcaatcttgacatctgcttttgactatcagcaacttatgttctgatgcatatttttatcatatgcaattccatcatctgtagcatatattttatctttctaattagttactatctcccatgtacagaggaaaataaaacagtagtaaaatgcatactgagaagtttgtaatttgaataactaaagttagtgtactaaaatatggttttggtttggtgtagtgtacatgaaagcatttgtttgtgtggtagtagtgaccccttaccaaataaattgctccattcattcatgcatgtgattgggaacctcactcattgttttgagcatttacatttgcatcccaccaaaccatctaaacttaaacaccaatccacttgtttgtaacctcatcttgggccaaaaaagacacctttagaaaggtacacacgtctttggaggaatttcaagtcccaacaacaactataggaaaccaacccttaataataataataataataataataatataatatgcttttttggtattagaatataccatttagttaatagcacattattactttcttaacagttaacagtcagggaattaatcacatctcctattgtggttgccaaagctccgagtgaacccgaaataggtcatgaacttggatctaccaaatgataagaatgcctttgagattcaattaccgataaaatgttaaaatagcaaaggtaattacgttacgcaaggagaaaggataattaatcttttggttagaaattttacctaatatttataagaaaattactgggtataattaacaatcatagagcaggttgggggattaaattggattgattatgattgttataaacatgtttactctaaagggaacattgctcccactagatgaggaagtaggcctgagtcccatacaatcattacacgtgtcaatagcttcataaatatgcattattatgaaccttctccttctcatgatacggaggacagcgtagtttccatggggaagcatgtacgggttcactatctctgtgggcccccaatacagcgaaagatttgggcctactcgtaattgaactggataactcaaaattacgaatatgccatcattggcccattgtcttgagattataccatttatgatttatttagtgagaaaaaaacaaaaatgttttaagtaaatttatttttaactcaaggaaggcgtaaaatagtatcatgcgccgggcatgacagccggccacgtgctccgagcaatgttcacgtgcgtgcatgtgagctctccttgtgaaatggaaggaagttaatgaaattggtgcggttactttagaatttccatgtgattactattactattaatattttatacaattagtaaattaaatgaataaataattttaataaaatatattacacatgtcgttttcccgaattttggttcctaaagaaaataaaaacatgagtaaatgagttgacaagagactattcaattaccatgaacatgtttgtaggtgatccaagctaaattacattacaattatttcctcaattttcatagattcttgaatctagttttggtcttcctactaaagatataataaatattcccattttcaaacatatgtctgtcaatttttagaaatggataattgagtataatatattaaataatttagttttttttgccaagccatattttatttagacttaatgtcattatttatataagtaaaatgactcaacaactttatttgctttagtgtttgtaccaaacaacttaaaccatattggcaaaataataataattattaatcaatatgaattatgaaaaaggacaataatgaaatgtgtaattttttttatattataaagtagggaaataataataataatctttaaagtagctttctttttattaatcttaagtagatagggtagcccatgaatcataaagtaggggtgccctataacattctcttatttttccacgtccatccactaaaacaaaccttttaatttctattgttattattatcattattttttttaaaactctaattaattatttttataataaaaaacaagaacaagaaaccagaataaggggctttcttagaggcaaccctccaaagttaaagacgtttttttttcctttgctttgcttgtgaagttggccttggtttctcttataatcaatctcatctatattttttctaagcctacaagaacacgaacgataaaatataactgaaaaccataaaaaaaaaaaaaaa

SEQ ID NO: 68725 - DNA, 1212 bp, Cannabis sativa
ctctatactctgtatttccaaacttggtatcagagctccgcctttgacgagtgtcaagatctatggaaggtgacggcagaccagctacaccagtagaaacaaattcagcaaccaaccaacactcatcagctccaaatgtgacgaacgctacagtgcaacctccaacccagaatgtggtggttcctcagttcggaagcacactgaaccagccgtttgccttgaagctggatcgcaacaacttctccttatggagaaccatggtgacagccattgttcgaggccatcgcttagatggatacctcaaaggtacgttacccagaccacaagagtttctccccttttctactgattcagatggtgttgtaagctctgtaggtcaagtaaatcctgcctttgagcagtggattgtgaatgaccaactgctactcgggtggctgtatggttcgatgtctgaaggcatagcctcagaagtgatggggtgcgaatcctcagctgctttgtggaacgcattggaagctctctatggtgcccattcgaaggcgaaaatggacgaatatcgcaccaaaatccaaacagcaaggaagggagcgttaacaatgcctgagtaccttcgtcagaaaagacaatgggctgatgtcctcgcccttgcaggcgagccatacccagaaagccaactcgtctcaaatgttctctccggattagatattgaatatctacctgctgtgttgatcattgaagctagagaatcaacatcctggcagcaacttcaagacatgttactcagctttgatagcaaaatggagagactccattccttctctggatctaataaacttgctgctgtagcaagttcttcaactgctccttctgctaacacagccaacaagagtccatactctggaaatggacgaggagcgaacagcaacaacaaccgtggaggctataacaacaataacaacaacagaggctcaaacaacagatctcgtggaagaggaggtagaggaaatggacctcgaccaacttgccaagtctgtggcaaatatcgtcattcagctgctcattgctacaatagatacgatgagagctacatggggcaagcacctggtgggacaagcaataaccagcctaagaacccaaataatgcagctgcctacacagcctctcctgactctcttgaccatgatgcttggttcgctgacagtggtgctagca

SEQ ID NO: 68726 - DNA, 923 bp, Cannabis sativa
ggttgagtttagtggtgcattgcacattggaattccaaggtaattaataacctcatcacccatataaataaaatatatcaaaaagattaattaatttttttaaaattaatttactaaatatatatattatcaccatatcatcatcatcatcaactagaaaactacacaaattatcaataattaaattcctaaaaagtaagacaactaacacaaaaacaatcccatgtctcctctcccttaaaaaaagaatatatatttgaataaagtgactaaataataataataatcttatatataacccaactttcatttcatatagtgatttttatatatataggtccccaccctctataaaatcacacatcatttcatgtgggtcattattgtatatatatatctccaaccccacatatcttatttccttgttctactttgtttaacccctctaggctctagtgattcatattcattggaaatcattaatgtttgctcttattttatataaattaattaaattgaataatgataattatagtaatattaattaatattatagatcaaagagagagcgtgctcaaagctcaatctcatcgtcacgtacaaggctagctagctaagctataaataataataataaattaaaaccaaatgccaaagaaagtgaaagtgaaagtgacacttgatccaatgctatttttctttgtgaggacataaaggtcactaggcccccatgcttttctatgcttttttttttttttttcttctttataatccttccaaaagagaaagataaaataaatcaaggaattatgagagagagagggcttgatgatgatatgtgatcaagttagtacaagtagctagctagggcaaatggaaatgtgtgacacataattacttgtccattttggtgataataataa

SEQ ID NO: 68727 - DNA, 586 bp, Cannabis sativa
tttcctagttttcatgtattgcaaactatacattacaactctttgcacatcattaactatagctctagcagtaaaagagtaagcattgtaaacacatctattcctattaatccaaatgttataaatcacagcagcaagaataacaacatttactctttgcttcccattcttggactgccgagccaaccaacacctccagcctttaaattccagcgccataccttgctgcctatccatttctgcaccagaatattcacttctctcgacagccagcaattgaaaaataagtgttgctgcgtttcctcaaccagcccacaaaccgcgcaatttgtggtttccaactcaacatgaaattgaccaagtttatctcgggtcaagagctaaatattaacaacctgccacaagatgaatcgatgttttgggatgtttaaagagctccaaacactgctgctatagtgaaaaggctgttggtttaagagactgttatacaaccagttagtcttgaatttcccactagctcctgcagcttgtatgttcctttccgagaacttatctctcaaatgacataactgttgggttttatgcc

SEQ ID NO: 68728 - DNA, 1062 bp, Cannabis sativa
  modified_base (109)..(112): a, c, t, g, unknown or other
atatatattaaatcatcaaattatgatccaataactaataataaaagagaaatttaaatttctatatttaatttaattatttacttaaaaaatatctctttttacactnnnncaaaaatatgttcatataaaaatacttaagtcaaacttaatttttacttgtcctttttttgctgaaaatttttttcttttaatttttttcctagccgatagaataagttcagtttaatatgatgtaaaaataatttttttttttctaattagatagaaaaattaagcataaaaacttaaataattctaattttacccgttcgataatatccattaaaaattgacctttaattgttaacggaaatttatttatttatataaaaattaacaatctcatcttattattaattaagaatattttattttatgtttgttctattttttttttaataaattatacaattttaacagtactttttttactaaaaatatatttacgtcaagtattaatacatgctctctttttttttcctaatagatttaattaaatattaatacatgcatgtgtttctttacaaacgacccgtaacaatggtagcaatcacgtaactagtaggaaaaaactttttttttttaattaagcagaaaaaatatatatattacttgaaacataaaatttatacggcaaaatcttctaatatatccaattaactcatttctttttctgtgaaaaaaaaaatcatttcttttttattttatctctttctttttattattttaattaataattaattttaataataaaagttaatgtatgaaaataaaaaataattaataatatattctatagaatagagtagataagaatttacgcgcaaataattttttttaaaaaaaaaatgcataaatgattaaaatcatacattattttgtagtggccaaaataaaaaaagatagtaaaggctcgtttggaacgccatattaggtcgaattgtattttatacaatattttttatgtaaaattatatgtggtattaacttttataaacagctaaatatataatattttag

SEQ ID NO: 68729 - DNA, 2766 bp, Cannabis sativa
caatccaaattgtaacttcatttaaccccaaatctaactttgcaagttcatgggcgaatgtgtttctcgtatgcttaacatgtgagattgaggcattgggtaagtgagataaagacatattaatttgcttgataaggtgtccaaagtcctataaaagctaacctaaacaaggttgtattaaaagaacgtttttaattctcaaagctaaaaaaaatcgtatagaagctaaccgaaacaaggttatatcaaaagcaacgtaagtgttacttttttaaaatttggaatacatgaaattttaagaagcgtgactttacattttttttcttgtatttttggtaggaattagtattgacgtgaaaattggtatttttataaattaaattgattttacgtatagaattataaaaccccctaaagtattggttcttcataggattggactggattttatgggctaagaagtaagaatgggcttctgtaaactttgaagcacagactaacaataagtcaaaacaaaggttgggacttcaagagaaggacaggtagcttatcttatgtgtcaacactagaatgttagttcagtttagcctcctacaactggactaacacgtcactgtcgtaagattcgtttagatgtaccaactaagctgttgacctttagataatgttctttcagtctaatcaattggtgggagcactgtaagctttatactcctccatacactagaactttcctctgctcattgctttctctctaaggctccgactctgacttaacttgctttgtttcattctcaacatttcaaaattttctgcacttcacctctcaagtctcaacccctactcacaactaatgtaagtttaatttcttcgattgatccaaaattattatttgattatttgatagtgtttatttctgtggataaatttatccaattcgtatacttttatgtttattaaatattgagaaaataaaatgttgatcgcttaatcgatttgttttttctttttatggattaatgtagttgtattagacttgttttttgtgacccaaaatttctactaaaggacttgatgtcgtattcaatgctgtggtctgttggttaattctgtgcaatttttttgctaattggaggtgtaatcgttatagaagaaaattctcaaaaaaagttggcacattgaatatgtgatttttgaggaagattgtgttcaaaaattgcttttgttgctgttccagttatagtgattgatgggtaccaaaaacgatgctcgtttggttgctctttttctttgggttcttctgtcacctgtggtgttttctgctgaaaatgacgggttgatcagaattcaactgaataagaaacaattagatcaaagaattaggctccatcgacgaaatgatgctacagaacaggagagtccaagtggaaagtatggtctccatggaagctctgaggatgctgagattgtggagctaaagaattacatggatgctcagtattttggtgagattggcattggcacaccttcacagaagtttactgtggtattcgacactggaagttctaatctatgggtgccttcgtcaaagtgttatttctcagtatgtatagtcttttttccattattatttggagtttttgaaatttttcaacaattgtccttatgtccccttaatttcagattgcttgtttttttcattccaagtacaaatctggtcaatcaagtacctacacaaagaatggtctgttccttttgtcccagttcaaaagattcatgcttttttttctttaccattgaatttctgaactttcttttaattcttgatgcagggaaatcagctgcaattcattatggtactggagcaatttcaggtttttttagtgcggaccatgtcaaagttggtgaacttgttgttcaaaatcaggtatgtttcttttcaaaaagataaaatttgtatctggttgtttcataatatagagttgcacttaatgaatattacttaaactattaggattttatcgaggcaaccaaagagcctggcatcacgttcgtggctgctaaatttgatggaatacttggacttggatttcaagagatctcagttggaaatgctgttcctgtctggtaaaaatctatccatctcagcctctacacatgccataaaacttcatttgaatctttcaatcctagctgtacaatgttcttagcggttacaactacttgttcttataggtatagtatggtcagtcaaggacttgtaaaggatccagtcttttcattttggttgaatcgcaatatcgaaggggaagaagggggcgagatagtatttggtggggtggattctgatcatttcaaggggaatcacacatatgttcctgtgactcagaaaggctattggcaggttaactaaatagtctcccaacctctcatattttttaggccatttttcttgttaatgtgataaaatttatttctcaactcagtcaacctttttgttttgtcttgttggcagtttgatatgggtgatgtcctagttgatggggaaacaaccggtaattacatggaaattccctctcggatcttgttttgttgagatatttattggttggctttctgtcttaatgattggttatgatactaagaaattatcattatcactattttcaggattttgtgctgatggatgtgctgcaattgccgattcgggaacctccctactggcagggcctacggtatgtgtgctttgtaaatcaagtcttatat

SEQ ID NO: 68730 - DNA, 998 bp, Cannabis sativa
tatatatttatattcttcgtactttgatggaaacaccatgttttctttgaaatttctgctaatgtcactgccataattaattatgagctttagaggcagtttttaacccttttcagtgtcaattttagtaaaattcgctactggtgttgatccagagaatgctgtagaatcaaacataaccaaaatcatagttggttattatgcaataagtgacgccatagtataatcagaaccgacgacttaaggttaaaaatcaacgtcatagtgttaaaaattaatttattttttcaatttaaaatctagtataaattcaaaaatttaatttatttaaattaaatatttattggtttaaaataattattatttaaattaaattatatattatttaaattaatttcatgactgtccaatatacttaaattaattttatgaaagtaattaaaaaaattacaattatattacacaaatattttaaaattagtccaagtgttaacaagctaatatatctaatcaaacatataaaaattacaagctaacctaaaaaaataagctagggaagaaaaattcttatacattttagcatcaatcgtctaagccttcacgaatcactgccagcaattgttctatccattggcgctgtaataggaataattcaatttttgcatcatatgtcttctccccaaactgtaaaaagatgtaaatatgtatattagtatatatattattgtttgtcaatagtggaatcaccactctccttgctaggactagagatagggagagtagtggtctcaccagcaccaggggtctctcgggtttcttgtagaaatattactgctcttttagctcgaagagccttgtcaaccatctctgcatatgtcgtagtgtcattggtggtaataactagatcgtgccgaatcttggcgttcaaccctgccaagtacttttcctttttactgaaatccgtaggcacaatcctggaggccagcttggccaagcga

SEQ ID NO: 68731 - DNA, 615 bp, Cannabis sativa
ttaaaaaaaccacattagataacataaacagaccatgcgccttcgcctccacatgtgtgtccacaagttcaaaagttcattagttcgtaaaggctttacaagatagtctgcagctccaagcctcaagcacttcacaacaacagagatctcatcttgtgctgacatcactaaaagaagcataaaagtatatgttgaggatatatatacatgaaaaataaacgatgatgaaagaaatttcagtgaatgaaaaagaggatatgctgagagcaagatatcttactgatcacaggaatgcgtcgcaagtctttatcccgagtgatgtacttcagcattttcatgcctttagccataggaaggtcaagatcagcaagtatgatgtctatatcaggtccctctgcattcagtgcatcaattacctgtctagcagtcctcacagaaatcactgtagagcaaacaattaaaagttgtaatgtaatagataaatcatcttcgaaaagcataaccaaagtggataaagattgaagtaaacgcattcgtcaaaaacaatgctattgcaaatgtaacaagacaaaatcatggacaattcttcaaatatattttctttgaacagaacac

SEQ ID NO: 68732 - DNA, 903 bp, Cannabis sativa
atattctgttaaaccaagaaatgtcgttagataggcacttttaatatataaagatatatattttttttttccttttagctatgacaatactttttttagtaaatgaaaaaatcgcatctaaaaatcctttttattgtaatgctctatttctctctgtcttgattttagtcactaaaggctcgcaattttactaaattaattttagaattaatattttacgtatttttgtttataatttttataacttccatgaatctaatgatcttacattttgccctaagggactcttgcttttgtcttcctctttttggcgcatatggtggaaatgctatctcgatcgattcgtttttttactttatgcttattaaaagcttaaccatgccttaccactaagaacagattctcgtagaacttctttttcaacaaaagaatcatagtttctattccgacagttcactctatatattgttggaaagagttccggcatactactctattatgatacagagctcctggggaactttactactttgaaaatagagttaagccttttattctgctatgagtaatttttattaattttatttaattatttagatattgaatatgcaaaatttaagcattttttagtatattttcttaaaaaaaatattgggtatctaaattatattgtatattcactttttatattctattttaattttaatttttattttattattctttaatatgtagttttataggtatatccttgtgggttgggattttaattttgatcaattatgtgagattatattgaatattttaattataaaaaatatttatcatttaaaattatatttagttaatatgtaataaaaaaaataattttcaacttatatgatgatgtttaatcaactttta

SEQ ID NO: 68733 - DNA, 586 bp, Cannabis sativa
gcagcaagcagggcgttatatttaggatgttaaataatatatatatatatggtagtaaatcaaaattatgttaaaatatattccctaacaggtacaactgtagctcataaaataagagacttttttttcttctaattaaatactaaaattaaacatcgaaactcaagcacaaataaaatataagtaatatttaaatatacagtaataattacataaaaaaatctcagtttcatgtttatcaaacgcaatatatatatatttgaaaagtcattgtctaattggaatcaagtgtgattcaaagtaattactagaattggtaatataaaataaagtaagaatttgaggataagatgaatgaggttccatcccaaaactaattggcaatgggaggagtagcccattcatcttatatatcacaatttatttccacaaattagcaatgtgggactaactctaatacaccgtcctcacgtttggacttggaaagtgtgggtataacgaacgacctttaagaaaccacagggccgaacgtgacatttgaaagaagcccacaaggccaaatatcgcgaaatttgtgggtgtacac

SEQ ID NO: 68734 - DNA, 1355 bp, Cannabis sativa
tctcttattttaattgttttactatattcaatatcctaaattaataaaaataataataacaaaataatttctcatgacatggattatgcatgtttttgtaaatcatgatatatattaatatactcaatcgactcatcgtaatatatataagaacattaaatactgacaaatatttctaaaataatttcattttattatgaaaataaataaatagttaattatataagaagggaaaaaaaaagaagaagaagaagagagaggagagatattgtgtatatagattttcaatgagtggtcaatgcatgcaacgaccgacattatatatgtgtactgtgattattttgtttgtttgtttttttgtcaaatatttacatattttaaccctacaattttatcattcagatttgttaaaaataactaattacaatgaaagatttatttcaatttggaccaataaaaacaaaacagctaattaattagtggtatgggtgatttgaccttttttttttttttgttttaatcataaatgtgggcaataatagaattttgtgtgtaaccttaatagaatatatataatttatatgtattcacttcattaattactcatattattattgctatatgtagtttgattttcctattagctgtgatgattattaaaattaatagctatatttttattccctaaaaaaataattgatgtaaaataaattatataattgatatatcattgcaattgtactcttcaatacaaatatcattgcaattttcctgtattttattagttggaattcacatatataatataaattacatatgtatacatatagaaattatatgtcggcaataatgtttattgatttctatgctagcacatatatggtgtttttcttagctcatgtttattctaatttcaaatttaatcaattgattaattttttttaatatagcttaatagtaatactatttattaataacttagagttattaattaattaaattaatattatacataattaattagacagtctaataaatttacactactaagtttttttttatgggaattcaactttattaattaaaactttagctaccaaataatgtagtaaatcaattgaaacattctctaaactgaaacgataatcaagaaataatatagcaattaacaaaattatcgatcactaaattaacagatcgtttaacaataataaccaagatattttattaaagaaacaaataaagttttaccatcattaatatatgttcaagtttaatatatatgaacttaaaattttacaataccaaatatgattttattaaatatttaaagtattaaatatgtgttacgatat

SEQ ID NO: 68735 - DNA, 825 bp, Cannabis sativa
tgccagtgctatgctcacacaagcagcagaaaacatatcctataagtgatattctcacacaaatagtcaaaagccttatcactattacatgcaaataacattagtataaagcaccaatccaccatagaacagaacatgtaaatacaaacccataatacagttgtatgtttcaacatacaccctgtgcacaaatgtccactcttcttaccttagttgttgagaacacctttttgctacttcaagcacctcaatgaatttttttgttgagaacaagatcctaaacattcattaacacagcaatactctcaaaatacattcaagtatgaatctctgtactcatacaaaaatctacgtaaaaatacgtaacacataagccaattacatttgcattccacaccatacataataatttgtcattttgattcacacaaacacatatgatgtactcaaacgaacattttcaaagtaaaacatgaactcatacaaacacttcttatgtgaaattttaataaaataccatttattaacaaaatatataattatgtaattcattaccaaaatcagaagctatcatatttcttaatcatttatatatatcaaaaaacatatccaatctacttagaaatatgtacaaaatactacacatgattatgtataaatttatgtgttaaaaacgtataacattaactaaccaaaaatagcaaaatatcacaacatagtctccaattaattctagacactataattatattttagcattatattgatggttctccaaacactgaacacaatttttactaattattctatttgaaacccaattaa

SEQ ID NO: 68736 - DNA, 1314 bp, Cannabis sativa
gactatggagcacttgtttctctactgcaattttgcgtcccacctttggcggtcttccccttggggagttatgcccgttatggaatctggaggtcgcatgtgggattgggttagttttctctggaaccttaggtccagaggggtggacactgatgagttgttcctctatgcttcgattgtggttgacacgatctagagggctcgtaatgacaaagttcataacaacactatgggtagcttgattcattacattggctctatctcttattgctacgcagattatggttcctgtttgttaaagtctcaccaggttgttggaacttctgtttggtctcccccgcaggaagattgggtcaaaatcaactgcgatgtcagagttggaggtgaatccatgtgtgttgtggcgattgcgagagaccatacagagtctattttgtgggttgcgacaaacaagcttcacttcgttgacactcttatcggggaagtgggggcttgtctgttagctttggagacggcggtctcaatgcatcattcttttgttgaggtggagagtgattcagagagtgtgatcaagaacctaaaacgtgtcgaatccttttgggggattgagaactatacatgacaatgcaaacttctctctacttttatgactagctgtaatttttcttttatcactagaaactataattttgcggcccacaatgtggccaaataggcgtttgccaataatgtttctggtatggtagaggtttccgctatccccgaatgctatcttttgtaatgaccatgaggtctaattccttttaatctataaacgcttttattcaaaaaaaaaaatactcaaagcaaacatcagtcatgaactattttagcctgtggagactgtttaaagagaatcattaaccctaataaattagaaacataaatgcatgtaatcaacaatggtgggtatgaaattaaattaaaaaatgttggtttgaaaatagagtataataaattgattaatgaaaataaatttccaaaattaattactcactcaatacttgtgttctctttttgaagggcaattgcataagagttgatcagttgctcacacaaaatacttattatatatcattttcatctgcttgatagtgagtttcatagtgaaaaacttgtagagaaggcgaaaggcagtagcggtggttgagaagggacttagtcaccggagatcacattgatcggtggtcaaagagagagagaagaaaggagagaggcaacgactgagcggtgtggcctttgattttagtccgattggagagagagagagagaga

SEQ ID NO: 68737 - DNA, 1748 bp, Cannabis sativa
  modified_base (286)..(299): a, c, t, g, unknown or other
  modified_base (662)..(669): a, c, t, g, unknown or other
  modified_base (1657)..(1664): a, c, t, g, unknown or other
  modified_base (1713)..(1723): a, c, t, g, unknown or other
agcataaatcatataacatacatacatcccgggttatgatcagatgcccatacccttgacaacaaccttaaccccgtgtcccacacggtactgagtctcgaactttcgtacgatggtacttttgacatagtaacaacctatactcggtacgctagtcatactctagccgtaccgatgtgttactgtatcagcctatactctgtatgtcagtcatactctacctaaacgatgtgatactgtcaagtagtacggtactatcgacaataatatcagcctatactcggtnnnnnnnnnnnnnnctagtcgtaccgatgtgatactatcagattgtacaaaagccaacatacatatctaatgtaatctaataggcttcctaacatgcacgctaaatatgtaaatgcatatgcatactattatactaatcttacctcgattctcaattcaggtgtgtcggtcaacctgagtggaactatctgctcagcgaattagtggctcctaaatcacatcaatcgtaacataggtaagtgacacgctaaatcactttctaggtacttaaacttgaaactaaaagtttccttatcgatgaataacatggcaataccctaaatatctcgaaaatgggaaaaactagggttttaaaaactgccccaaccggtagaccnnnnnnnnaaccggaattccggttctgtggggtttcttagggaccaaccgaaatttcggttcctacaggtcccactgaatcagaattcgggttcagtgcagaaaagtttcaaaaatttcatatctcattcaaatcaaccccaaatcataccaaaccttccagacctgctaaatagaccccaatgaacatttccaaagcaacaaaacaacaacccaagtacagaatcaaaatccaccattaaagctccaagttttgagttcaaaactaaaacttggttaaatctaactaacaatcaacaaaacttgcttgaatcaacttaactaaacatatttaagcttcatataacaacactaaacaataactgtagctacagcaagcaattcctcagaacatgcaaaatttcatttccttaaaacccaagaaactaaagagaaagctagagagagagagagagagagagagagagagagagaattctcttgaattttccaaattttagctttttgaataaatgaacaaataacataatacctatcttatttcagctaacataaaccaaaataaatcaactaatcacttaacactaagtgcactaaaggacaaaagcttatggtgcaaaatgaccattttgcccctcccaaactaaaaggattaaaaggtacttaagggtatttttaggaaattctaaattcccgaccaatcatgacattcccaatgtctaaataaattgccccgctatacaaaaatactaagatgtgattctactgagccatacactgcgttccaatgttgtcgggcactgaacatgcaaaaatatgaaatttctgtatatgacatataaaatgcattctgaattcaaataaattatcataaataattaataaataattttcataattaatacctaattatctgctaatttccaaatttaaattaagcggtctttacacatattgactctttgtagagaagatcttgtcaaaaacactatgaacnnnnnnnnaatgccatagatttataaaatatttggttgtggtcttttgatgacttannnnnnnnnnnattaaagagttcttagaatagtgca

SEQ ID NO: 68738 - DNA, 527 bp, Cannabis sativa
cctgacgctggaggtgtacttggtattttttggaattcttctccaactgagcttcttttctcttttcccgtcgagatttttctaagagaacatataatataacaggaaaaagaaaaatcaaacacaatgtgtaaatgatagcatctctcaatcattcgaaaaattaaagtgttgaatcacatgtgttgaggtggttgttgaatagctttaggagattaaatggtgatttacttatgtgagggtattttagatagattactaataaaaccaggtatatttgaattgattttaatatgctgctatttttggttaattgtaaaagaaaagagttattcctcaatttctcccctttatttaagagaaagttggcccatgattgaattggttccattcccagggggttcctctcttccatcacacactgaagcatgcataaagccagcaataaaagcgcactacatgtccacatgttccctctctctactattacttcatttatatcagcttttaatgctactaaatcaact

SEQ ID NO: 68739 - DNA, 1040 bp, Cannabis sativa
ggagtctgtattttgaggttgcttgttagcaagcttttaaaaaaaaaaaattacttgtatattagtaaaatacttgaaaattgtgttttgatattcgggatcccgacctatatagttataaagttataatttatattaaagttaatctttcgagtctggtaaatttaaaatacgggcgttacaatactagcctgcttctgtgtcacaataggccctctaaccaaaatcccagcctccactgaccttctattctccataaaattccaggaaagctgtagttatcaatgtaggatcatgtatcctactcccatcctgttgttctattgcaagaattcgattttgcctcagcctatgtttaatactggcatgaaagaaagtagtattacaatctccatcttgtaaccatgttatcttagctttctgttgcaaaaaagaagcataatctttttgtgttcaaatcaaaatctcccttgtctcctgttcatgtttatgtaaattggcatcaagcggctgaaggtggaatttactttgcaaatcatctagttcaagtttaattttgttaactgttgcctagaggttagcaaagccttccttatttatctccttaagcttgattttgaattgctcaagctttgagatcacctggaacataacagttccctcaattctctgtgaccaagtctcttttaagtagccttcatacttaggatgtgatttccacattctaaagtatttgaaaggcttcttaccacatgctaaaccaggataaagggttagaatacaaaaggagtgatcaaataaccattcattaagataaacagcttcagcatggtcatatttgttgatccaagattgattggccatagccctatcgatcttataaaatacgttaaatattactatcaaaataaatagtatatcacaaaataaattcaccatgcttatccatcgatggcttgaatctcttgccacatgttttgcttctcatgatcttgattgatgctctcccccatggataattttctttgattgtatgacct

SEQ ID NO: 68740 - DNA, 575 bp, Cannabis sativa
ttagtcacaacatagaaatgatgatttataattagtcataacttttcacttttagtcacaagttttgttgtgacaaaaagtaagactttttatagtggattttaaagaacaaattactttggacatgtctattttgattaataaggcagcaaaagataaggaacttctcgtgactacgtgggcaagtcatcatctagacccctttactaaggaggaagaggtacaagcaaggttttttctagcatacctggacaaaaatgctttcgaagcatgtacttctgaaagaggtgaaatgcccttccgcgtaatttgcacccttagcctgtctcgaatgtcactgagagaccaaggggatttgacaattacttcctaaacttggatctgcgtaggtatccaatgaaggattatcttgatagggtagacaaaatagttaggaacccagataaacttgagtctttctcaaatatcattatagtagatacctttctaaccatgctcttcctgagcttcagggaacacaatagcttcattagctgggaagaagtaactgttggatatatattttaccaggatct

SEQ ID NO: 68741 - DNA, 808 bp, Cannabis sativa
ctttggctgtgtctgtggctgaggcttttggtggtcaatggtatcagaatcacagcttggaataacatctctaaaacgagtgaattccacattttggcacacagctttggtatgaccttggtttttatagtatgtgaagtgaacattttccattttaatgtctttgcaaggaaaactctcactgcagtccaatttaatagcttctttggttacacttgtacccttaatgttttcaaaagacactttactaacttgaactgccgatgatgatgatgagccctgttgtttgcaaagctttttactttggtcacagtagttttgttctattacaatggggttctcaacattattcatttgaatatttttaaatctaatattgcttgcacttcctgaaccaccctgcaattattagttaaacaacatcaaaatcactttatagtatgatataatatatatgttctaatattgataattaattgtgtatataaatatatataatattaattacctgaacagtttttattctaactccaaatttagtttcataaaaattagctctatctacaatcacgtctgtaacatgagcttcagagtttcccgaacccaagtctccaatgctttacaatataagttattaacgttagtcatcaaattattaaagtcaaataaacataattatataaatatatatattattttgtatttattaccttatcccataacctggtccacaagttatatctgaagctcttacttttttagttccactcttaattgagatgcagtccgcacctgaagaatttataat

SEQ ID NO: 68742 - DNA, 1042 bp, Cannabis sativa
tttctttgtcgaagacattataacaatcctaatcagaagtttccaggtatatataatatcaaatatagcaaacgatatataaaattttgttgatttatagattattacagatatatatatttttacaatttttttttttatatatataataataaatataatgagattagaaaagatgttttagaaggtggtggaggcggagcctcaccttggtctgaggggaaagaaatgttacaggagtgggaaggtatatatatggtggttgagttttgtaagactttaatggtggtttctgagatgtccctgcttaataatatatcagaaatccattattaatatatacacttattaattatatagaccaacaatggcagtagggggattaagtacagttggaggaattgaatatgaagcaaaaattactccaattgttgttatttcttgtataatggctgccactgggggtcttatgtttggttatgatattggaatttcaggtaatttggtaatcaagttttttgtgcattgtttagtaattattaatattaatttggtaaagatgattagtaatgtgtttgttttgtttttgtgttttgaatataattaaagggggtgtgacacctttggtgcttcttacaccaccagaagcctcggaagaaggctgaccatgttgattgccggcattttcttcataattggcaccattcttaatgctgctgctatcaacttccttatgcttgtccttggaaggctcatgcttggttgtagtgttggttttgctaatcaggtacgttttcatttcatatccatatatcatttttgtttatattatttcattttttcaattctaattaattattcaatgtatatattataattataattatagtatataacagaatgttacctgttgtttctagaaaattggttaagattaaatttaaacgatttcagttattaaatttaaaatataatatcatttcatgtataattatctcatattctatttttttaatttttttttttcaagtttgggtttgta

SEQ ID NO: 68743 - DNA, 1390 bp, Cannabis sativa
ggagaatatatattgctcgaaatgtaatctttaatgaccaagaatttccagcaaaatgtacatcaccacaacaacaggtacaatcctcaccctccacactatttccaacaacttcattctttactactcctatggaaaatattttatctaactccaatcctactgttgttgacacacctactattggtgatgtttctgcaagctcaacatctctccctactcatctccagcgtactgcacctgcaccagatgcacccacctgtgagccacatgagccaaatacacatgcaccagatgcccccccacaaatcctatatcacatgaaccaataccaccatcagacaccaaccaaactaccatgatcccaacccgtggtcagttaccagttactcaaccacccacaaattctcatccaatgacaacaagatccaaaaatggagtccataaaccaaaagcataccttgccaccaatcaccctttacctgaatctctaaccccaactgaacccaaaatacttaaacaagccttggccgatcctaaatggtttaaagccatgcaagatgaatacataacactcaaaaaatggaacatggaccctggttccttatgattcatcaatgactttggttgacaacaaataggtgcatcggatcaagctaaattcagatagttcaatcaataagctcaagtctaggcttgtagcataaggctatcttcaaactccagggatcgatttcacagacacattcagtccaattgtcaaaccagcaacaatttgattgctactcaccattgctgtaacaaacaattggcccataaaccagttggatgtctcgaatgcattcttaaatggctcactccaagaaattgtgtacatgcctcagccccctggctttgtagatgctgagaaaccaacttatgtatgcaagcttcacaaagccttatatggcctaaagcaagcaccacgtgcttggactgatacactgaaacaaacattatttcagaaaggtttttctgcattcattatcaacaagttaagtaaattcattcacgctccaacaatagttcattgggaggcatgtaaaaggttattcaagtaccttaaaggcacaattcatgagggacttctcatcagaccagcaccacaattctgtcttcaagcatactcagatgcagattgggcaagttgcccagatgaccgacagtccacgggtggctatgcaattttctttgggggaaacctggtgccgtggtctgcaaaaaaagcaacctgtagtggctagatcgagcacattgaaatctcagaataaaatctcagaataaaatctcgaatgaccattaagtatgatgaattaaaaggagtgcgagattttattctgaaattggtgaa

SEQ ID NO: 68744 - DNA, 982 bp, Cannabis sativa
ttttttttttttttttaataatctttcgatttcaagctctttctactaaattatgattaattctctttgtctgttgttaattctctaattttcgggtgtcttcagcttcaaatttctgtctcgaatgtgaattcattttatgtatttactttttttcttgtttttgttaagttgtttctcttgtatttgggattgaattgaaatcaaagtttccttaacctaattttcaatatttttaaaaaacatatgtgaatgatggatggaattgtataattatttgtaaatgcatgctgttataattcatcagtcatggatctaggtttttctttctgatagcttaaactgtaaataaatattgatagatttaaagccctgattatgatttttttcacattaattttggtggttgtagaatattataagcaaatactatatgcagacatgtagtggaattataaaaaagagtaatttggtagatttgaagccctgatctttgttctcttgcattgagttttgacgcatataatgtgacttgtttacatttatcattgctggttgaggaataatacaagcaaatactatatccagacaccttttggatcagtgggtttctctctatgttacattgcacacttttataatgtcaaatttaagatgggtttccgtgttattggttaccacgaagatgtggattaaaatgctatgagagaagctttagtttcatggtgacactacatatactctgaatttttgctcttaaaattaaatttagaccatggtttcatatttgctattacttcaaataggcaagcctttataggggaccatctagaaaggaaaagcccagggggaggcatcatgggttgaatccgcagaagaaacaagagattaaggaagcttttgagttatttgacactgatggctcaggtatacttttaattactgatgtgtttctcttaataatgtatgtatcagctcatat

SEQ ID NO: 68745 - DNA, 598 bp, Cannabis sativa
aatgaaatcaagattcagccattagactactttccattaaacatgtatgcaaagaatacattgtacatcaattggtgattcaaactagagaatgagtgagaggaattgaactcaaaactgagcacaccaggaactggtttctcaacaccagtcctcaacaatctcacagcctctctctctctctctctctattatttctgtaaattgaaatgtcaaccacacgtaagctaagagttagttgagtctatttatagacaaaccaacctaactaacttaaccataaaaccggtaaagcagttaaaaaacttaaagaatattctgccaagtcttagtttctaggccatattacaacaatatgaaactttaccaaaacacctctttaattatccaaaaataaacttaaatcacaagtaccccactcaaattatataaatcataagagtatttgtgtttagaatagtggtaagtcattttaataaatagaactcatcttaaataaaaataattaggtgaaattacgtaaattatgtgtgaacacatatcattacaaacatatatgatgtgacaaaagtattttacaaatatattacataatgtt

SEQ ID NO: 68746 - DNA, 1058 bp, Cannabis sativa
aaagttgaaaatggaggaagatgaggaggagatctagctgtatattagagatgacatgacactgaaatatatgcagtatataaatccacaaagaatagagaaaaaaatatataccaaagatcaagacaagacatcaatatcgatagttttcaaaagccccaaaatagagcatacctattacccactagcaaaaaaaaaaaaaaaaacaagaagatccactctcaaatccctgccaaatttatctccaatattattttacccaaactacatatttagttacacttaatctttagggctcgtttgataagcaagattggactggattagatagattaatttgtctaatccagtatatgagcatgatagaagtatagataactaatccagctaatctcatttatcttgatttatttatcccgttcagcaaagtgggataaataatctcatacatgtgagatttttgttatcatttttttttaattttagttttgttaatatattttaaatttaataagaatttaaatgaaagaattattataaacttatttataattttttttatcaaaaatttattcatttaaaggagtgaaaatgtatgattttgaatgatcatacataagctttcaaaatttaaaataatattaaataaacaatagttaattaaattgattctaagagaaacaatatgacaataaatttatatattctttttaaattactaaaaaaattatatcaatattttaaaaaaaaaatatttgtattaaattattgtttagcataaataattttttattatttaagtatttttaatttaatattttaattatttattaaataaaaatatgataaattattttattatatatttatgatatatatttgattatatataatatattattttattttatttcataatttgattatttttatttttattattttgaattatttatttttatttatttgttgttatatattttttaaaaatgaaataaataaaatagtttagtttattcttaaaccaaacacatgattactttcagtataattcaatt

SEQ ID NO: 68747 - DNA, 1321 bp, Cannabis sativa
gatcgacacaccattagcaaaaaatgagcatattacttgagtattgatattacactacctaggacgcagacagatacaaaacaagtccacaaatactcttcaaataattaaggaatgattaaatcatatggctaaaactcaaaatggggtaaattcaatgtgtggttacaccagaaatgtaagatcattagttaaaaaacttactcccgttgtagtgatgaactccaaccttagccaacatagcataatattcaatctcagacttccttagaggagggcaattgttagcaatgataattagcttccctgcagtaaataaatttatgtgttaaaacaatcgaatatgagctgattcacatcatcaacaaatgaactcactgattcacactatatctacacctaaattattaacggtcaacgcctcaacttaaaaattaatccaaaaagaaaagaacatcaagacagaaaataatattatactatcataactatcaatgcaaccataggattgagctgaaaagaataacccacatcagagaatgcacaaacattagtcaaaagaaaaaaaaattatcctttcatattaaaaaatttgaaatcgaaccatagtcatacaatgttcgttaatataatgcatttgaattcgctcctcttaaagtaaatataaaacatcattaaaatgaaaagcacctttggagttcctgagagatttgaggactgttttgtagcccaaggtgtacttgccactcttcatgacgagagcaagcctgttgttgatgctctcatgagtcttcttctgctcgaatcaaattccacacaaaaatcaaacaaagaaaaataatttataatgaaggaagctgatgaatctatgagtcaaatcggaggatctccataaaaatggttgccgaaacattgattagggagaggaactaatcaaacaatgtttagagaaagagagcttacggtcttcttggcggccaccatgtttgggtgcttcgttgaggaaaatgtgtgcagcggcgaaaaatacacagcgaagaaaccacagaagatgagtcgatgaatctttataaagagaagaagattagggttttgaggctattattgtgtgtttggcttctaggatataactatccccagtcgtggataacaacaaaccagtttaagggtttttttaaaaaagaaaaagaaaaaattggagcaaaacactctcaaactctcaaaggaaaatttgaaattgtatacttaataaataataaaattggatccctaatacaatactagacataatttgtaaagtgggatacattttcctaaaacc

SEQ ID NO: 68748 - DNA, 653 bp, Cannabis sativa
gacgattggcctctgctagaggggcatcacttctaaaacagtctcaatgacttctccttgagaagaagattctaccgcaacttgaggagcctggggatggacaatagcttctgaagttgtaaccttaagaatcacctcatggcccttgaccggaggtgttggcttcttggatccagctagaaggttccatgtccttccccttacctctgtcaaccttggtagtttccatgatgtcatctaatctcttggcaatggtgcccaagaagttatctacgagacctctctggaaggtatgtggattctctataaaatgaaaaacagaaatgttaaaaacttagaagcaataaacatctaaatgaaaaataatgcaaaagtttggtccagaccgtttattctaacatacagagggtgccctctagcaaactagtagatgtctttcctgtttaaaaagctttaatacaggactacaaagaagcccaacttcttcaaccaaattgccaatccacaccaacagatgcacaagcagtagctcctactagaaagtcaactccaactacaaactttagagactatcctaaactccacccacagcagttcatattgaatattgatgttgccttagatgttcttaaccacaaaaaaggtattgggtc

SEQ ID NO: 68749 - DNA, 777 bp, Cannabis sativa
agtcatcttattcttacaaattctgttattctgcttgctgttgcattcgggacatgtaataacgtttcattatcataaaaagacttgcaataacgttatctatctatttatggctttccttgtatatatgcaaaaaaatctattatagctaaagtgattaattttcaatcacgattcgaatgatgttcaagctttggtgatgaaaaattatgaagcagctcccaaattctgtagtttccttcaaccaaggcacgaaaccagttagaaaattaatttatattttcatgaaaattctaggttgattcctcttcctttttatttaagatcgtctttattttagttttgaagagtccacattttgtaaattagttaaaaataatattctgaaagctaccccttttaattgatataaaaagaaactacccttttaatcaatttaaattaatttttaaaattttctcttagttcttttaacaatccttaaagaaggcttggagtgaagtttcttggacaacatttaacaaaatggggcaagccttcaagagttgatttgatttctatattaaatgagtggctccttgttatttgatttctaaattaaatgagtagctccttgattgaatttttaaccaacatcaaatttttgttaattttatttttagtatattttattggggagttttcataaatatgagaattttgagggtatagtttacttttttatgtcataaaataaataaaactatggggttatgagttttttttaatttttttttt

SEQ ID NO: 68750 - DNA, 1418 bp, Cannabis sativa
ctaaatttatttgacggagtcttttacagacccaagagttacttcgaaaaggagctaggaagggtattgatgatggtgcaagtacttatatttttaaagatccttggctttttgcggaaattaatccaagactttctagtggttattttggcttgtaaatgagaaggttaatattctttttattattagggaacgagtttgggattgtgatgttgttaaggacttttattttaaaagacatgaaatcgttgttcttggtattcttttttcaaaatcgattatggaagattatttattttgggagtttgataaaactggtgatagtactatgaagaggtcgttcaaaattttacaagaggagagggatggaagggtggatcagaatgtgatgaggttttgaaagaagttttggaagatgtgtttaccaccgaaggcgaagaattttttgtggcgatccataaatgggtgcattctaactagagtctagttgaagtcgaagcatgtggaagtgtcgttgttgtgtccagcgtatcatttggcaagtgattccatcttgcactgtttggttatttgtaagtttgttcagagttgttggcggttgctgggttggcctttgttccttttgttgacgactcttttaaggattgggtcttgactttgtttgctcggttagataagagagaatgtggtcgggtgatcatgttgtgttggacaatttggtataagtgtgaccagtctttgtggaaggggaagaagaatgtggtagagtatgttgttaatttagctcgggtcactcttgatctatagagaaagctcaagataaaaatctttttctttcagtggatacttggtgtcttttggatagggttgagctttggtctaaaccataggttaataaactcaaggtgaatatcgatgctgccattttttaggaggaaggaaagtatgggtttggtggagtggttagagatcacaacggttatgtggtggcttatatattaggattaaatgcgggcattgtgctagctgaagttgccgaagctataacactggaggaaatgttgtcgtggctgaagatagacttcccaacagtcagtaatgttgagactaattgcttggtgttggtccaagcaatttgcagtgctaaggtgatgctttttacgtttggaggtattgtggaagattgcaaacatcttttgaattctttaaataatgttttagttacattttatcaaacaatttgctaatcgaattgctcatcaaattacaagagcttctcgtttaaatattgattttatttttttgggctctaatattttgagtgatgtttctgtcattgttgaggctgagttggtttaattgaataaattttttattgaaagaaaatgtattgatgaataatattatataatgaagtt

SEQ ID NO: 68751 - DNA, 920 bp, Cannabis sativa
tgaacacccctagttagatagtcttagtacaacacattagttgtgttttgttgttctttgtaaaaagttagtagtttgcaataaaattcttacttatcaaaaaaataataattgtatgacaactccattgtaatatgaaaattaagtaggcatcataaaacaacccaatgattgtatcaactcgaagaagaaaacaaaataccagtattttattgaaaaaaaatatgtgtacccataaaaaactaagtatatactttttttgttgttgttaaacaacttaaaaaaacaaataaacaactcgataacaatcgcactttaatatgaaaatagattagacatcaacacattgcaacaacttaaaaaaatataccaataatctcaaaaaaaaaaaaaaaaaaaaaaacttaaaagcaactacaaattacttgtacatcaacttaaaaatatatgtacctaaggaaaactaaacatatactcttttagtataatttaatttgatattttatattggtaatattttttattcacttgaatttttaaggattagcaatatggtagttagaagttgtgttaagtgtcaaaaatgtaaatacgtgtaaaattaattttatttaaaattttaataaaattaatgtgatatatttttctctgaaatatttttgtataaataattacttttgtgacacatttgaaaaataattagaaaagagcaaatatctttttaaaagtaaaacaaaaatacaattttaggaaaaaaaaaaagaaagagcattgctattgggcaccagtagtggccaacaccttccataggtgtcaccatatgattggttagtgatattccctaaaacttattttcttaagttatatgggactcgctatttaattacaccaatagtggtatgacactaaggagggtgcta

SEQ ID NO: 68752 - DNA, 834 bp, Cannabis sativa
atataataaaagcaattatatatctcttttggaataatttttttattatcaatataataaaagcaattatatatctcttttggaataagcaattatcatatagatatattgacagcaattaataataaggattcatatttggaataagtactcgatcccactacttaaatagtggcattgttgtttgatgtaggccactcaacatttgatttgaaactgcatagaaaagtatttgttgccattgtggttgtgagtgtcccctacagcctggccctaattcaaaaagtatatatatatatagataaatattgaatcagtctatagggatgactaagttttgtaagaccaacagtgaacactacatgagaaataacaatatgcctttgtaagcatgtaaacattttttccattagtgagtgtgagtgagcttaatatacacgtaccgacagctttcattggaatatatgtcattttacattattctctattgcgggattatcattttgccatttgtttgtgtgaaaaatttcacaccattatcacacccaaaggtaaaaccacactatagctagaaacatatgtagtagtatacactacacaacaaattaaatcctgcagaaaaataataataaacacaaatacatataggaataagaattaatgaaatagaataaaatttatttttttcctttgctaaaattaaaatttaaaatttagaaaaataatagtacattggagactttttttacatttcaaaatggaatagacattctaacaatatgcaatcaaattaaaaaaatgtaataaaaaaaggtaataggcgacataagtacc

SEQ ID NO: 68753 - DNA, 1351 bp, Cannabis sativa
attagtctttcctcaactatttatgatattatttcttataattaaagtatttttttttgtctgataggcttatctttgataacatttttattgtgaatgaaattattattgccatcaataataaagaaggggtaagattgattgggctgctcaaaaaatagatgtatctttgtcattatttcctggtgtgtctttatcctttgtaggctaagattatgaatgtttttgctcataatttaactaggattgcattaggattagaggtagtttggaatgtttttgattctaacatattgtaattgctcgtaactgggacttattgattatttgtaatgtaaagaaaaaagaagttttagtggctaaattttttcaattatcgtttgacttgtacttaatactaatgaactgttagcaaatttaagatgtcatccggttaattaccaccatagattgttatgtgtacagtcttatacacgtgacagcttgaaagattttaccactaaaatttgagtttaaagagttaagtgcaattaaaatgatagtagacaggatttaaccgcaaaaaactcaaaaaaaaactagcaattaattttcaatttgaaactatttttactaaaaaaaagtgtttataagagcatcctatagttgacaaaatacacacatcatcctaaaatatatattttttattttctctccatccatataagatttgtcatcttctcttaaaaaaaatactgtgatgatttataagtctaaaagttgtctactatggtcctacattacgttgaattaatgactttttaagtaaaaaaaataatatttttctaataatttttttttaaaaaagacacacaatcattgtctatattaagcaacacttcacataaaattactcttgcaaattaaatcatattgcatttgtggcaagactacttcaatgggcaacccccattggagatgctctaatactattttgatttgttttatagcacaaaaattaaaggaatttttacaaaaatactgaattttagacaaaaatttacaattttactatcacacggaattttttacaaaaatactatccttttataacacaaccataaaacaacaaaacagaacaattaaaacaacatccaaaacaactaaaaaaataacagtgaaaacttgatgcagtacacaatatttttgaaaaaaaattccgtgatacagtaaaaaaagtaaaaaatataaaaaatttagtatatggtgtaaaaacccgaaaattaaaatggcatttttccagtcgttagtggaaactaagaattttccatttaatgggcccttaataaacttttgagcccaatttaaaaaa

SEQ ID NO: 68754 - DNA, 1123 bp, Cannabis sativa
cagtgggcagcggcttcaaagagggatgaggtgcgagagagagagaatacgatatagagagagagagagagagagagatctgatgagatctagggttgaaggtagagatctgatgagatttggctttgaagatagagatttgatgagatattggctttgaagaattcaaaaagagaggaagtttgagagccataccttctcgtcaagagaagaagcgaaccaacagtgataaaaaaaattataattataaaaataaataaaaaattataatatttaaaaaaaaatggaacaaaaaaaaataattagattataaaaataaaaaatatatattaaaaattaatttaatacatttaaaaaataatttaatttaatcaatataatacttttgccaacagttgtaaataatcatttaaattaatttttcacaacagttataaaccatcatttaaagtgactttttccaacagttataaaccgtcgtttaaagttccgtatttttatgacacccacatagccaacggttttaggaaccgttgggaaattatataaaagacagttataaactgttgggaaaagccaattttgtagtagtgcacggtcggtccgagatatggagtctgaggtatgacctatcacggtcggtctgagatatggagtccgaggtatgacctatcacggtcggtccgagatatggagtccgaggtatgacctatcacggtcggttcgagatatggagtccgaggtatgacctatcacggtcgttccgagatatggagtccgcggtatcacctatcacagtcggtctgagatatggagtccgaggtatgacctatcacgggcggtctgagatatggagtccgaggtatgacctatgacggtcggtctgagatatggagtccgaggtatgacttatcacggtcgtttcgagatatggagtccgaggtatgacctgtcacagtcattccgagatatggcctacctcgatcagtttcaactcacttatctcgggtggaacaactcacatatctcagatgggatgactcgcatatcccaaacaagataactcacttatctcagacgggatgactcaatatctcagacatgatgacccacacacctcaga

SEQ ID NO: 68755 - DNA, 782 bp, Cannabis sativa
  modified_base (26)..(28): a, c, t, g, unknown or other
  modified_base (216)..(218): a, c, t, g, unknown or other
atgtcctggaaagaacataacacttnnnccaagtgtaagtatacttcatcgatgattatcatgtcagtgtaaatccaaaacacaaatgaaagagggacttagtcttttgaatcatgtaatcacaatcacattccactgtgttgacaatactgtagttgtgcataaatatatgttctggacttaactgattttatgcatatattaaatatatatatnnnaccataagcatgaaaaatacatgcaaacataaatcacttcaaatatcttaaattgataactaattagattgtaatgggttttatttagggcacaaaacccaacaatattatcatttatatacaatcagaatcaaactattacgcattattcataaaataaaatctagatcactactggcatcttccatgaatatgggtcgagcctaatacatgatttcttagtatggaggcatgaaacacattatatactgcgaacaacgcaggagttaagaatagctgataggctacctagcctatttacctcagtaaataggtatctaatatttctcttgtaccacacttattaaggtacctaaccagtggtacatttaattatcgcttttagacaaacactttgttagggaaagagattattctaagataatctaacctttatcaaatatggtcacagcatgtctctaatattccactaattttctcatgttacccatctttcaagaataaaacatcatactattttcgctttaacctccatggttctcaataaccttctttaattcttaa

SEQ ID NO: 68756 - DNA, 1673 bp, Cannabis sativa
ggatggtgaaacatgcaaaaataagagaaatgtcaaatatgaatctccaaaacgtaggatgtccagatctattttagatcgtgctcgtctatatcgatcccctactaaaaagtttgattcatcttcattttctaaatctaggagaggagctcgttgttgtaacattgaaaactctgaatgttctttgtgtaaggtaatatacaaaaattattttttattttggtatttagagtagtccatgaataatttcttttacacttgtgaacttcgctgtttttatttttttttgtaatgatagggacataattgtcacaaatgtgttcataatgaagatgacgatatacctattcctccatggagttttgtgatttcggatgaagatggtgaagctacaatcattaatatacctacaaatgttaacatgaactctcttaaaattccgaaacacataaaatgtgtaagtatttgtatctcctgttggagtgattttagtgtagtcctacatatatattacatttttaaagtattcataagtttttttttttttggataataggttagtatgcaaaaggtcaatactttgatgacaatgattgttggattgcacaatgttttggtcacgaagatccttgaatctaaagaacgattgaatggttctaataatctcatacatcaactacgttgtcgcctagtaagtttacattgaaatttttgaaacctcgtatatcattacattacatctaattctaactattataatagttattgactcttcttgccacttttcattttttttgttttacttttaggttgaaatcgatacaataaacttgcatgcggacaatagtgtggaaaatacaccacatgagagtgttgagtaatattcaaattactaagtataaactaatattgaagatgttagatgagtgtatgtattattgattgtaatctttggactatggattttaaccatgttttattgtttttacaattggttagcattgtattctttattttttgcacaatgcatattttttactgggtttggatctcatactcaacccaacaaaggaccctccaatctcctccaaacacacttgaggtattctcaagttttgttttcaaatttaagtttttaacaaaatattggttaataagatatgtgaattttggtagtactcatgtaaaggcaaaaatcacaaagtatagatgaaaaaaaattaattaaaaaagcatttgaatataatgaaatcataaaccaaacataatacataaactataacatagtttaatataaatttaaaaaacatgaacacatattttccaaaaaaagataagcaacacttaattgtcttcactaattctaatcctcttgatgggcaactcaatttcagtttttttaaatgcatatccacctttttcgttagttgaactttcatattaatcttcctaaccatcaaactctagtttttgaataacaattattcttgattaaaaatttgtcattaatgataaaatattttatgtaaacaaaattgtgttataatatttctttattatttttgcatttatcaaaattaataattaaatggtaaaaactaaaaattaatctttattttttgtaagatagataaaaaatagataaagtcttaaatcatttatattttgaagat

SEQ ID NO: 68757 - DNA, 2455 bp, Cannabis sativa
tatataaatacacaatctaacggtttctgaggtaactttgctgaaaagtacaacgatcaaatagcacttatggtatgaagtagagatgatatcaagaagtaaaagaaaagaatcaaactacatcacataaaataaaataaatagtcactcaaaaacatacaggaggaagcaaaatattttagtcaacagaattcaaaattatttctcagcaacaaaacaaatagattcatatcttacaaccatagcaacagatcacgacgacataaaacacatttcggaacagaaagagagtcagcgcagagagggacagacgatcatttccatgaacacaaaacaaaaacaaaggagaaaaagatattaaaaggagattgactaaccatatgtactctgcgatgatcttctcagtggagtcagagaggtttaggttaacgagatctgaaagcagcgccatattacacagagacttaaaaatcttacacgcaaaaagtaaatgaagaaagaaatctctctctttctctctctctctctctggtatagaatacagagtcgtgaaacagggagtgctatacacctccttttatagtgcggctctgcctctttagcaatgttggtttggaattataaaacaattccaaaccaaaattgcattatataatgcttttttaataattttacttataaatatcaattagtcagtttcgtatcgttgaaatatttaagaattttttataactataaaacacaaaaatctatctatttgataattttacatttttacttccatatttatattttagattccgttcaaatagaattttattgtattttagattctttaggaagtaattcaaaatcttactggcgagtactgtctagattctcatgtattttgtatgtttctttttatgttattttcaaaattaattatagatgcaatttggatttttttttatttaagagagcaattttttgtttttaaaccagaaagagcaaattggttcagtttaacgaatcatattatcataaacgaaaaaaaaaatgaaagtcttttgttttaaggaaaataaaactgaaagttgaattttcacccagaacgaaaagtgcagttgtagtttggggaaatgaataaaaaaatagaaaatgacctataatcgcgcgtggagggaatctacaccacgcacggttcactgttgtgtatgactttgaagtttccgtctacttgctctctgctttaaccggtaactgaatctgccggtagcttttactgcctctaacctttttttattaaagaaaatatgtaacttccatttttaatggcttttttagtctctctaaatataattaaaaacgcactactaaaataattttaccaaaatttaataatataaccttgtgtcttactccaatcgctcaatttatctaagttatgttaataaaacaagaaatgttaagggggcatttaggtgtaatacggttattaatataaattaatgtataattttatgtatttcttttttttgacaattataattttatgtattttaaataaataaataatataaaaaatagataactattcgtagcgtgtcacatcagtattgtgttaggtattataaaatatagggacacgattttgttccgtaatagtaattaagagtatacaatctgtgattgtactgtagttgttggattaggaagttgcatgatctgagggtggggttaatataggagtatttaggcttaaaaaacttggtaaccgtttgattctgtattaaaatattaatacttttgaaaagtgaatagtgattgatgtactgacagtttctcttttcaatcatcatttctctttccttctccttcgtcattttagtttcaacgtcgtggtagttcgtttcattttagggcaagtgacgatttttcttctttaaggcataaaattattttcaaatttgagggagaaaactcaagtaattgaagaatatctggtgcacttcgtcttttgtgtcttcggctctgtctccgaccgtcatcgtgggtttgtgcaagtaagtgtctatgctcattcaaaaattcttcttcttttgcatgttatttgttcttcactctgggtatgagaaaatttgtctaccatggttaaaaaagagtaaaagtttggtaaataaaaagtgatgttctttaatttgggtatgtgcattactactatttttttctattccattttttgtttattgagtagttttattcctttttacaggcctaaatcttcttcgtcatcaagttttcatttacagattgctataaatcgaaggtacatttgctgttctccatttctatatatagagtactaggaaatactggtttataaatatcacttttgcttaaaaatatgtgtcaaaagcctcattcgatccatgtgtttagccattttgtgtccaagtgttttgcttttgaattt

SEQ ID NO: 68758 - DNA, 1633 bp, Cannabis sativa
  modified_base (293)..(293): a, c, t, g, unknown or other
aacatttttattccattaaataccaattaaagtgttggtaacaaccatgtgatgaaatgatttgattttcaaatgtgatcctatcaaaacactataaatagaagtcttaaattcactttgggagtgcactagtttctatcaagagagcacattgctaaaaatattataggcttgataaatctagaaagctatttctattcttttcttttccctaagtgcttgtggtagggggaaataagcttttggacaaaggtgtaagacattattcaagtttggtgattctcctattatanatttgtggtgtatgtggtgttgagattgctctcacatgatcacatctcttttatatttatattatttatatattatgttttaggtgtagcttattgctttgagttgtaattcttctctcttctttcgatgtattctctatttaatgtgtatattttatttagtgttgtaacattatttaatttatgattttgtcttttgtattatttgtcatagagttgtactcttattggtttgatcttctattggagcacaacaattttccaacacttgttgttcatcatatttagagaatatatctattgaaattttatttttactaaacaaaattagaaatacattaatgggagcccatagatcagtttaattttactgaatgcatgatatatataagaatagattgttagacttattatataatatttattcttttttttttaagtgttttatcacattgcattttgcttaatgctcgagttggaagagagatttattagagtttgaattatctttatatgtgatggggtcaccagaaatattgtatataatttatctgtggacgtggatatactataaatatatggggtccaatccaaattagggatcaaattttccaacccaaaatataagctaacaattaattaagatgattaattgatgaaggcatacattgttatatgtcacaatccacagtccttggccataggataataattctacattgacttgacttgcataaaaaatcttctatatataatttttttgtgagttatatatattattcaactaatttaaatagaggatttttacttatatatgtaattaacaaactaatattacagatagcgattaaaaaaattatatatcttatgattgcaccttcttactgaaatttaccagtcaaattcctacagaaccgaaaaaaatgacatttcaaaaatttcagacaactacactatgttctaaatagtgtgtatatcacacccctattgaaccatatataagagcatctgaaaacaaaaacaaaaaaaaaaaaaaaaaccaaaacaaaccttcgatcattcgaacctctaccattgaagctatccaaaaatgtcaatcaaagctagctaccgaagaaattcaccattaaagttacacaaagcttcgatcctcaaaaatcaaaacaaactctaccgttgcttaacaaaaaccttcaatcggaggcgtttggttgggaggaatgaaaatataggaatagaaatgggaatgggaataggaataggaatgggatggaataaaatttaaaatacataaaagaaattaataaaaaaatcagtaaattttttttgttgttacatta

SEQ ID NO: 68759 - DNA, 952 bp, Cannabis sativa
cgagcaaagcatgaaagatgaaaattccagagatcgattttgttgtgtccagactcgaagacaatcgctgtaattgagtcagagaataacgacaacacattctagtttcctatttcttgcattgtaatgatggaattaatatagtttcctattttactcattataagcaaaagggaaacaatctctcatgtattaagtccctataaatagcgacctaacctcactacgaaggggatcgagaatgttgcttcagaaatacattcaagaaagaaaagagtgatctaagagagaaagtgactcagagatcaattgtaagaactttcgagtggaagaacactttgttccttctctcaagtcaatacaaatacaaggggagtaggctattaccatacttacggggttgaacctctttaaaatctagtgttcaattcattttactatttttgctttcttttacttatcttatttaattactttatttttgactcactgtcgttggctaaaagcgaggtcaatattttggtttgagagtaaaaacacaagcctttgtcttaagttttgacaggtaaataggatgattgtccaaactcgaaggggaggccttgctgatcaggatgatctaatggtgataggtcccaacatgcaaactcctgtaaacacaagaggaccaccaaggacaaaccccgagcaggttaatacacaacctcctactacaggccaagaagtgacttcccttctggctgcgatcacaccaggcatataggagactggaaataccaatttggaagccgatcaatccactcccagcactggggtctcgtccactactaatactcaaaggtcggctaaaggcaacactgaactccagaatctgtgagaagcacttgggctcatgcatgaccataataacactttgcatcatgattaggaggacctctaggcagccataaac

SEQ ID NO: 68760 - DNA, 946 bp, Cannabis sativa
actgttaatgcaccaaaccagaaaagtatcttcttgttgtactgcagtgcctattcctactcggtcccagcatctcttagcagcagggcatgtaacgagtgcgtgcaaagtagactcttcttcaacagaacagatgggacagcaagcatccactggtacatgcttaaaacaaagctgtagcattgttggtagacagccacttcccgctcgccacaccagatttttcatttttggaggaagtttgagactccaaaattgtttccaaaacttgttctcaattgtctcaatcaagtccgtctcaccttttagctcctgcaataaacggtatgcgctctttacagtatacacacccgaaagttctcgagaccacaccaagcaatctctgtaagtagacggatcaagagttatttgcaggatcaactcacggtctcttggttcaaataaatcattcaaaatctcctcatcccattcgaacctgtcttgtttcatcaaattagtgactctcgcacacatgagacttgggtgattagacacaattctgggatttgtttcatcagggagccaagcctcacccaaaacagagatagtagtaccatcaccaacctgccatcgaactccattagccactaacttttgagcttctaaaatactcctccacacatagcttgggttggaacctaaggtggccgaggtgaaggtaccattgggataatatctagctttgaagacctgtgacactaaagaatcttggttgattaaaagcctccagcattgtttgcccaaaagtgccacattaaaatctcttaaatttcgaaaactcattccaccctttgatttgtgttgacatagccttttccatgacatccaatgtatacccgaactagttgtagatgaagattgccaccagtattttgctattaagctttccatttccctagtagtttca

SEQ ID NO: 68761 - DNA, 1936 bp, Cannabis sativa
acaaattaacgtttcaagatatatgtactcaattttatttattttatacatgaatatattcaacattcaaatgaattacagaaattaaacaattaatcaacaataaacattcattgttatatataattttctttaattttttagaatcaaaattttcaatcattagtaggcaatcctcaacatattattcaattagtaattatcaaattaatctatatattaagtagtaatctaatattaagtagtaatctaatattttgttattatttttttttatttgataaggagctccgatcaataattttttaagtcattttctagtatcatctacaacatttaaacaacaattttatgtcatgtagtatacatctttctctattcatttcgagttttgtgcctctgagataaatttggatttagtagggagctccgatcaataatttgtcaactctttattgtatgatctgcaacattgaaatgacaattttaggttatgttgtatagatcttactcagttaattttgagatttgtatttcggatgtttcatacctgtttttgagcaaatttattctattgcaatttttttgtcgatcgattgacgtttgttgatgttttttgttattttttgtcaacctataactaatagattaggcaagttttttgttttttaagatttttcattgtgttgttgattttttgtttcagaaactttcatccaacaacaatggcttctccgaaaaaacatttctgggcaaagagtatcgacggtgtctaagatgataacactgtattttatgtaatttaatttatgaataccgtataaaagtggtttttccgatataactttatatatgttaattttatacccttttgtccacgtatgaaaatttcccttcatataaactagctttttttttttttttttaaattaagctcttattaacaaaaatgtttaatacaaatgaataaaaaaagatgaacaattctcaatctaagtgcaattaactatctagtctaagtacaattaattatctaatttaagtgcatgcacaactaattcacgagaaactagcttttttagtaccatatttatgtaaatatttacatagaacatacaaaatttggagccatctgtacacattttgaggcccaacaatgaacacaaaacctttgaacataatggcttttgttgtccatgtctatagacttacaagatacccactgttcaatttgggcccagtacctttatcggccgacaaatctaccaatttggatcgaacccactttctttttcttttttctttttcttttcattttttgaatgattgaaataaaaaaagagtattactttggctttataaaatcaatttaatcaaacggggaggaatcatgtatttcatctccaaatatgtatgtatgtgtgtataatttctctccatataatcttcaattttttatgtatttatataatagtttccctccttaggattctttttgtttgagatatagttgtactaaagaaaggggtacaattaaacataacaagcatgtttataacaggaatagaaaataggatcccctaataagaacaaaacacaaatattgtattggtcggaaaaatgaatataaagaagaagaataagaaaatggctcttaaatcttattaataatattgtcaatatacatgcacagcatggtccaacatttccaacttataatgtaaaatatcaaattcatggcacctacaacataataaatatacattagtcaaaataaaaaccccaatttgaagaatcttttggcccattttccaaatcttataggtgatctttatatttataagtatttatgtgtttgttttaaacgacattcatttccatggtgcacctcacgactagatgagcagaaccctctttaatgagagagagagagaga

SEQ ID NO: 68762 - DNA, 1433 bp, Cannabis sativa
ggaacttataaattttactaaatttgagctttgctttggaaagcatgtcagctggtgtaaaaagaaggccttggctggtatgattaatgtcaagatggtggataactttagcaagtatctagggctgccccccaatattgggaaaaggaagaagggtgtgttccaaaatatcaaagatagggtatagggcgaactcaatgggtggaaagcaaatttgttctaggttgcgggtcaggaaactcttatcaaagcggtggtacttgccatcccaacttatactatgagttgctttagacttcctaaaaacatcataaacaaaatccatagcctcactgctagattctggtgggggtcctcagacaaaaagcaaaaaattcattagtgcaagtgacaaacattgtgtatcccaaaggaaagagggggtcttggctttcgtaacatggaggccttcaatcaggtactcctgactaaataggtcttgcgtcttttgagaaagccaaattccctttgtggcaaagttttgaaagagtgttacattcctaatcaaaccattctaaatgctgaacttgggttaagagcttcatctatttggtagagccttatctggggtaaggagattattgtttaaggtcatcggtggagaatcggtgacggtaattaggtcagagttctcaaggacccttggtaccacgcctttaagtttcaaaatttatgacaaactccaccttccttcaaatatgtttgttattaatgttatgcttctgaatggcttatgggacgaggacttaattagacaaaattttaacatagaggatgccgatctcatcctccaaatcccttgcggtgactcccatattgaggataaaatcctttggcactattcaagaaatggtgaatagaatattaagagtgggtatcgagttgccatttctgaaaagaaagttattgaagcctagactatggaaaaaatagaagcttggtggaatagtatgtggaagatgaaactacctctctagttgaaaatatttatctggaagctttgccatcattggctccccacccaatcttgctctttcctacaagggtattaaacttgagaaagattgctccagatgtaacccatggactaaggagaataaaaatcaaaccttgtggcattgcccaacaatttgtcaagttctagaaattggcgggtctttggaagatgatcaaaacttgttggcccaaggatcccattaatttcctaatgacagtgcaacaagagtttaaagacaattttgaattcttcatagtgaccacctaacagctttggtatgtcaggaattcggttacccatggtgaatcttctcccaatccagcctttttgatcaattggtgccacaacttccttcatgagtaccaagaaaattaaagaaagaaagatcatcacaaag

SEQ ID NO: 68763 - DNA, 661 bp, Cannabis sativa
  modified_base (27)..(53): a, c, t, g, unknown or other
ctagcagtgtcagtcacccatcctttnnnnnnnnnnnnnnnnnnnnnnnnnnnagcatctgggatcggtgccaatcgcccagactctgaatcacgttgtgacataaatattttttttattattattattcaaagtaataataacaaaatacaaatatgataattatattataaattaatcatactcctttgtaacacaaagcatgtatagattgagatcctccatggctcaactcctttaattttttcctatttgctacactgatctctgaacgtttatatcaaaaataaatatggagatatcaatatgtgaaattaaaatggtttaataaaaattcaattggggttgaataaaactaagatacctcacttcaggttgtttaaaaaatgtgatggcctttttctattggtctatagtgcacccaacatatggagttgcaggaccattagtttccaagtgttctttgagttcatgtttgagttcacaatattttttggcacaagatttatcaatgcctgttaagataccaaagaggcaatctgttccatgtctttctcgaccaatatcgaaaaaatcgttctataaaacaaacttcattagttaatgttatatataattaatgaggatccctttaactaaaataatccatctctactctaga

SEQ ID NO: 68764 - DNA, 1516 bp, Cannabis sativa
tcattgttcatagaatcccaacaagcttttatcaattctaaacataacggttccttcagccatgcattctcaaaacgaaatttacgaggataaagattaaaagattctataataggttcaaggaaaattggggagtgatcagaagaggaagtttcaagattacttagcttagcttggggaaatagtcgaaaccaatccgaggagataagcgctttgtctaaccgaacctcaacccaattcgaagtccctctgcctctttcccaggtgaacgggtaaccgaggagctccatatccgtcaaatcacaatcgttcaaagcttgcaggaaaccttcgatcagggcacggggataaggctgtccaccacgcttgtcttgctgagaaaccacgttgttgagatcgcctaagatgcaccacggcaagcttgaggattgttttaaagtacgaagaaggtcccaggtttcttgtcgatgagtccttcgagattcgccgtacactcctgtcaaacgccactctttctttccttcctccttgaccacaaagtcaatatgatgatgagagaaacccaccacgtgaccctcttgattagctttccaaaataaggccagacccccacttctcccttgggcctccacagtaaaaacaccttcaaagcccaatgttcttcccacccattcaactctttctttagcacacttagtttcacataaaaataccatcttgggtttcttttgagtgataatctctttaaggaattgaaaagcccacgggttcccaagcccacggcaattccaacttatagcattcataatgcttggcgggtctgagaaccagaacccgccccaatcacgttttttgaactttcctcgttgacaggaagcataattgcatcaagcccaccaacagcctcctcatgtagggagtcaccattccccttatgagaatccaaagctattaaaaaagtttgcccaggcccaatttcgtagctttttggcccacatgaagagtccataaacattctcttcctttttgtttcgtcagtgggtatataattcttttgaattaaattggttgacatagaattccctcctaattgagactttcctttcccatcctggagagtaattgctggccctttaaataaaattgattgagtatccccattgccaatcaataatttattaccatgattcatgggattgccaccttgaagaccatgattccctccacttacattcggatcacgttcagactcagacaacccctcctcttcccccactggtggccgccgaacatactcttgacccccatcattcgtctcactaggtgaggcagcagcagctcttggaacagggcggttacgtaaccatcttgagccgatggtgtgattccttcttcgtggtgcagctttcatctctaaactgtaaggtctttgaagtaagtgagacggagtatcaaagagcttctcacaaaatttctctgcatgaccgattatgccacagatgaggcaaaaagtcgg

SEQ ID NO: 68765 - DNA, 1210 bp, Cannabis sativa
  modified_base (1185)..(1185): a, c, t, g, unknown or other
aacctacaaaattgtgagaaattcagaataatttacaatatagaaaacaatcttaaaacagtctattttacacgcgtataaaataaaatagtcactcgtgtaacgtactgttatttgaacacagttttcagcgtgttaaatttttctgaatttcttaaaattttgtagaatttcttaaataactataatttacatgattataagaaaaaatttgactaaaaaaatatttcagatactaaaacggatagagatgtatcaatgcattcaaaattttctataattatatatgttttgatttcaatatattgttggggttgttttgtaatttagatattgagcaatgggaagtacaaaagtgttgtgcatcgagccgtagtgaacaaaaatgacacaagaatctcactagccatagccaatggaccagcccttgagacagttgtgaatccagtaccaaagctggttgaaagccatgattctcattcatcagcatttgctggaatgaagtataaggattatgtgcaacttcaacaaagtaacaacctttgtgataagtcaatcttggatcgtattcgaaattattagctgtgatcttttatgaaaaaagaataagaaagtaattgtaatggagctgtttgtagcaaagtgttatatggggtattgatattcttagtgttggtaactctgaagattattaatttattagtgtttttatggttatttttaaaattttcatattgttaaattgtcttagggcattttcaatagggaaatttaaatttggtgttaaaaatattggcatcttcaataggaaaacttaaatttagtgttataaatactaaaaacctattattccacttgcaacactaaaaaatacacaaaatattatattatttattattctattattcattaatataataaaaatattttaataccaaatattatattctttattattttgttttttttaagtattatataattattaaaaaattaaacaaaatatatagtgtgatctacagcccagtagataaatctatttatagtgtaatttatagtgtttagttaaaatatttatagtataaattacaatatatttaatgttatgaagtctcatccaagtttatcaatttatatatatatatatatgggtgactattcaattgttacatttttattgtaacnatatggttacatttttctttaacct

SEQ ID NO: 68766 - DNA, 1426 bp, Cannabis sativa
gcagaggcattacaaaacaatatgaaaaaagcaaaaatagagacaagacaaagaaggtgtgaacaaaaaaaatctaaagtactactacgtcgttttattatgcatgattttgtctcaagtactctaaagttgttttgttttttattaatttctttagtttttgttttcttttggagtgaagttaattgatgatgttttgtgagttaacattaagctatatatctataacaagcttcgatcataatcatgatctcttggaaaataacaaccaattaagaaaataaaaaatatcacttcaattatagtaagcttcgacaaaacgatagatacgtatattgctttgctttaatatatttatatatatattattatatttggttatacctatttttgcttctactaatggaaaatctgagaagtggaaagctttgtcataataataacgccaatataatgacgtgggttaatgcatggcttttctttgtcgtacacaaaaaaaatgctttaattattgttttaatagcctatttttactattttaaaaacatttttatatattaatttattttttttgaaacttaaatttttaagaaaattatttctaagaaaccataaagacttcaagaaaatattatgacttaaacaaaccacgcttctttgttttgctatcttattcgttctttcttcatcttctcttatggcccaggcccactttcttttgtagtattcgacatgaaactcaaggcccattcaaccacaataacgggcttaattttaatccgaaactccaatgtttgggccatttaaatttaggataagttgaaaaataccacttttttgtatctattaatcaaaaatactctcacattatttttttattaaaatatactcacttttttgagtagattgcctaatataccctcactctttatttaagtagcatataatttacataacctaaagagtctaatggggacatcatccataaaagtaaatatatctaaaaatatatgaaaatagaggtaaaaattaaaacaaattaagtaaggtgagtatacaatgtaatttcctctttaaaattcaagaacaattgtctcgggtgaatggagctttgttccatcttgtaatctttgaccacgtgcttgacttgttctagtctacgatctatttactgagctaggtagaaagagggtggagaatgctccacccatatacatctttttaactattttaatactcattaaaaaattttaggtaagagcttctagtttatattctgaatgtaatgttagtatgggaaatgtcttatataattgagctgctatcatgtttggtagctaaatttcaagtttaataaagctaatgaatattcattcaaaaaaaaaaaaaaggaatgcaccgattttatctgttttagtattcaaaa

SEQ ID NO: 68767 - DNA, 1068 bp, Cannabis sativa
ggcataaaacccaacaattcctaccatgcttcctccctaccatgcttcctcttcttcaggcttcctcttcttcaggaggaacactaggaaaactgagttttagtccattgtatactaacttgtataaacagttaccggtcgatgagcctaataaaatggactcatggactaaggatagttaacgcttgaaccacgtaaaaatctcatatttgttattctgttatttcttccttaagctctaaaaatatttagttgtcaaaaatcttggtaaacattttggtgctttcattgagagttgaagaaagaaagaaacatgctcggtggtcactgacccaagcctgataaaaggagaccatgtgcaaggaaataagaaggaagtccgcctactcgtctattgaggtccggccagaggtcaggagcgtgctggtcaggggtgttgtcgagagtaaaggcctacacccttgtccaaacaaagaaagtacagaaggtgaacgcatatggtctttaaacattcattgtactcatgcttgttcctaaaagctcagatttggctatccaactctctgggaagatgatcggccactggcatcctcaagctcgagttccctactgtccactaaggcataactacgcagacacaacgaggtgcaagagacgttggggctaggtggagaaattaagaccagttgcgtcaacgatgaacaactcacgaagggctattagatataatggcctcgtctagctcataatctcaacccctcaacctccggtctcagcaccaatactgatgtcagtgccagatcagccgccgacgactacttccactaccttttcgctgagccgtgaagttgatcagaagctgatattgctagattctgcagttgaggccgctcgggatctcatcccagtgtagtcaccaccttcttagcttctgatcaggtccagttatggtatcatggggggaaagtgcactgtcaaggcaaatcacttttggtaaagtttgctgagagggatttctgtcattatgatgtagctataactctgaagttacatcaaagaaattaactc

SEQ ID NO: 68768 - DNA, 753 bp, Cannabis sativa
ttaattagagtttcatgattcaaaccttcatgaaaatagcatccccatttggaatcttttcgaacatatctcctcccacgtgttctacacctataaatatatatatatatatatgtatatataaaatatacaattaaatagtatattaatataagatgttcagatgtatataggggcaggcagcacttacacgccatttcaagttttatgaaaataataatatggttttgagtttcgaagactgtcattttgtaaagaataagaaaaaaatatcagtggatatatattataatcagataatgtatataaacatttttaggcagtggtacctaacagcacttatagatcaagatgacgcactgtaaatatttagtgatattctataataatggttattaattaaattaaattttgtgatccaatatgtaatcttagatatggttttaaaccatctctcatggacattgtaaattatgggttaaattcagctaaaaaaatgaatcaatatgttatatttagttttaaattttataattgtcttctaatgaacttcatttttaataacaatgtgtaaaaaaaattaacaaatgcattaaattttaattgaaaatatataaaaatctaattaaatatataaataagaaagtcattaatagtactaatgagtggtaaaatttgactcatgctatattttgtgccaaatttgacacgacattttagtatgtgtccaatttaaaccacattatatactac

SEQ ID NO: 68769 - DNA, 610 bp, Cannabis sativa
aagtagaaacaaaaagttttagattttagaaagaaaccagtaataaaactcaaagaggcaactcatgtcaaaatcgacgcaaaaacacagcatatagcacaatctacattatagccaatgactttgaatttgttgtctccatggcaagttgttccttcccatttttcactaaaagaacttggtattttcatgcataagggtcttccaaatatgctttcaaactctgtcatgagatccttgccaactcttaatcaaaaacatatcataaacccttgatagagaaactaccattcacataatctttccatatcagtttgctcatatgaaatggcagactctaaattatttctatcattttcaatgaatttggaacaaaccatggccttaaaatcttgagaatccatcgagtataatggtttaaaagcgaataatttacgaaaaacactacttcctcacactcttggattgaaggaaaacctatatatactactccttgttttgccatgaaatttaagggagttataaatatccatagagaggtcattaactactaagaataaactctcacaacatataaactcccatcccttttgcaacataataggtagaa

SEQ ID NO: 68770 - DNA, 1299 bp, Cannabis sativa
tgaaatcatgtagaaattcctcgattgttagttaataatattttgatcattttgcaggcatcggacttagttttctaagcatttattatattcaataaatgtttgttgtttgttgtttagttgggtaaacaattaaacatggtatgcttttgaaaattgcacatgatgttttatccttagcattttaagcatgtatgtaaaataggagctagctgagagagtatgttgaaaatttcttcatgtttaattaatacaccacttttgagtagccacaaccttttaggatcatcacctagctagtccttattactttgtcccatgcgattgtatatatgatcatatgattttgataggagctggggaaatcaaactcacaacatatataacatgttcaaattgaattaataatgcattttgaacatacattgatagtagtgttaagacaaaacttgaagttattcatatattcatatataaaattgttttgtttataattaggatatatatatatatatagaagatagtaaaacgttctaactgcaaacgttgtccaaatgctgcaggtggacactaatcttggaatgaaggagtagtacctgcctggcaaaatgcatccaaattattcattattatttggatatgtaattttattaaaaaacggtagtaacagcactcttttgataatgcagtgcattgagccctgttatacgtggctaaagcctaaacccccaatttttctttttgaatacgtggtattctaaaaagaacaccacccatccaactgtacaccataaacttgtcttaatttgtctttacatcttttcacaagagcctaccttttcttttttaacatatatttacttgtatgtgagctgaaaactttatttaattaaaatctccttttataatattttaattcatttttatatttaaagttattagaatatttttttgaaagcaaactataattatagtattatttttgtaaatttttaaaaattttgaataatttacagtactgaaaatagaatttcagatattaattttagtttagcacgagtgttcaagaaacttcaaacgtcttttcgatactgtaaattattcaaaaaatttcaaaaatttataagaataatgtcgtaagtacaacgaacaccactatgaaaaaaatatttcgacatgtatttttgggtactcctcataacttgcggtggtgataagcactggcggacccaatgaaagaccagtgtgggcttaagcccatgctgaaaaaaaatatttcttttacatcttaattaaaaa

SEQ ID NO: 68771 - DNA, 593 bp, Cannabis sativa
aaaaagggttcaaagaaagaaaggcaggatccaatggctgcaatcctgagaaaatgttggaggaggaaggctcttttgagtaaggtatctggtttttgagtagggaagacataatgcagaaaggataaacgaaaagcacagtagaactagcccagaaaaagaaaagaaagttgaagaaaattcttagataaaaaagaaggagctcaacgagaagcctatttatacaaagttgcatgcaaaataatgaagatgccataaaaatggaaacgaagagtcaccccttttggcattaaaacacgtgccaaccaaaacacgtgcacacaaatttcgagaaacacccttaagagtatatatgtctttccacttcccaaagcaccccattttaaaaaaaaactcgaaatgagaacgtataattatatgtataaatgataggcaataaatacacttaaaggagccaaagctcccccaacattacttaaagcaagcataaaacataggaagagacaacaagggtaataaatgcgagcctattcaaagattacaagtacgagttacatgaatataactagaaacataaaaaaaaaaaaagaaat

SEQ ID NO: 68772 - DNA, 658 bp, Cannabis sativa
attctcttttatttatttttacatatttaatattacataatcatattactatttagctttttctatatacattgtttaatgtttctatttgattacttgttagttatctctatgatgcaattacagctgaaataatgattaaaaaagttaaaaatataatgactaacttatatgctttttatcaaaagattgttgtgcttcctaattcctccaatgatcaacaaacaactgaaaatgccactttcaaatccaatgcaagctcaagtagcacatcattctttatcaagcttaggtttttgtcaagtgaagtagccagtaatgatttggatgattatttctgacattgctaaagatgttttggctgttcaaatatctagtgttgcttctgaatcagctttttcaactggaggatggatacttaatccatttagaagttctttgtctccaaagacagttgaagcattaatttgctcaaagaattggttgacttgtgagtatgctgctcctgttgtgttgagacaatacatgaatgaagttgaagatttagagatctctgaactagttaaatttggtaaaataaatttatcatttcatatacatatatatatatatatagtttaatattcttatcttacaaataatttgtttctaatatatt

SEQ ID NO: 68773 - DNA, 1155 bp, Cannabis sativa
taaatatcaatattatgagtttagaaaaaaaaagtttaagtatatgtaaacataaaaaatcaaatttccctttccttattaatatatacatatctattagaatttaactttgtgttcaattatacataactttgtcaatcttttcttacttgttgtgcaccgcataggtaataaggatttcttatgtgcgtgtgtcttttttttttttggtcatatttggaccaattattaatactttagtcaatcttctgtatattttttttaccattttttctcctgttttttcttcaatttttttattttttttttatttttctttttattaacttattagtaaatatataattgtgtagagaattatatgagcatacatataagattaatctttttttgttattattttactttttcaatacttttttgttaattattatttttctttttcaaattttacatatgcttacatataaataagatgactgatgaccttagttttataaatgaatcctcttgttacatatatatttttttttttttaacaattgtgtaaatataattaacgaaaataaaatatataattataacttacatgttttgacgagaggtacgtgcgtgtggcatgtctaccacacctagtgtgtatatatatatataaaagttagctttgaagaatgttctgtaagtttagttagagaacaataggaaaagatcaacatcagaacaaatgagaaagaaaatgaataaaagtattaacttaaatgagttaggtaagtcttttatctatagcaatagagattacacaatcaagcactacaaaaaaaggtcattttttgggacaattttttagttacaacattttttttgtaactaattaaatgtgacttttagtcacaacaaaaaagttacttgtgactaaacatagtatttaaatgcaaatcgtcactaatttagttttagtcacaagaagtattgtgactaaaaataaatttagtcataacaaattgtgatttttgtgactatacttttagccacacggaatttttagtcacaacgtaagaattataatttataattaattacaactttttcacttttagtcacaagttttattgtgactaaaagcaaaaaaatttatagtgaagatccaacaacaaa

SEQ ID NO: 68774 - DNA, 1125 bp, Cannabis sativa
  modified_base (1087)..(1099): a, c, t, g, unknown or other
aaatcattaactatttctaagatgttatatagatttctatatgtatggtgatcaggctctgcccttggtacaggtggcttaagcttatgcctagagctcacccaatttttttttttaaaattacactttttttattaattttgaaaaataacatattttttttttctaaataagagcttaaaatatttttttttctatgacaattatatttcaaggccggctctgatggtgattgagtaatttggcaactaatttttgcaatagatgccaaacaatacacaatcttgataattcatcttcttaatttttttgtaattgaatgatcaattgaaagtatcatttattcctatatttgctttgtttcttgtgctgtgcccttttaagcttttacattcttttaatctcatcacaacctatataatatatataataaaaaaccaataatggtgaagactttgccacccatttttcatatgttttgataataattaggttaattattttattaagtaaaaatctaattagtaataagaatcttactattagtgtatttaattactgactttctcacaatttaatttaataattaatattattaattatttacaaatggtcttagtgcttaagaggaatgttctattactattattattattattattattttatatgaaatagaattttataaaatgtttatacatttagttagccgcaattattaggctgcaataaaaaaaagtcagatatgtaatgtatggaaggatatttttgttaaagaaatagtttgaatatattcgtatgcatgtacttagattttttattttatttattttttggcagaaatacttagagataataaaaatttaatgtatgaatttgaatttggttgattacaacttggctgcaatgaaatttgtaaggaatcaaagtgtcaattctattgtttgctttacactttaatttctctacactataactctaaagtaatgttatgaaatttcaattacttatttttagaatttttattgggtataagtggtatttagtactttttagacgtgttattgtgacagttagtagtcccgtnnnnnnnnnnnnnaaataccgggtaagctgtgcaatccc

SEQ ID NO: 68775 - DNA, 973 bp, Cannabis sativa
attttattttctcatagaaaaacttggtgtgactcaatcatcgctaagtttgagaggaggtgttagaaaatgaccctgtccaagtcagcccttatgtccaactctgcatccaccgcagcagtcaatatcaacctcaattttagtgcctacatcaacaatctgtgcaacacccttttcatttttattcttttgggaatattccattttttgtaattctctgacaaggttgttctaaaggtgtacgaattctagattcttctgtaaccaatttcatctttaatataaatggagccctactctctctagctcattgagcagatttttatttattcacagtccttatttttaagtatgagcattactattgggctttagtggttcctagcaccacctaaagatgacgttctacgattgttaacgatattctctaactctaaaagttattaccttatgtaatatggaactcgatactaaattataccaataacgatatgacatcgttgagggtgttaggcaccagtagtgtcctttagtatttctctaaagaaaatatagtaaaagtaaccttccattaaatgagctaaacttgaggcattattcattttttagctcattaacatgtagagaagtactattcattgagctatcaatattaaatatttttatgaaaactttctttaatgtatgcgtgggtggtgtaattataattatataattagtttttataaaataataaaatacattataaataaataatttttaaatgatataaaaaatatatagaaacattgatatatggtataatgtaaaagtgtgagataaaataaaaaatttgaactttggtgagcagggcaggtcctagaggtgtgcaagatgggctactccagagggcccaaaaaaataaaggatctaatgtattttttttttaatgccttttaggttttttttcttttttgtatgaatccaactttct

SEQ ID NO: 68776 - DNA, 827 bp, Cannabis sativa
agagtagcgtactcgtctataagagccattcattccgtgggtgtaagggcccaatagaggcttgaagcggggacgttacaagttctctgtcgtggccaagtccctaacgttgagatcgttcttgtcgtaagtggagaaggtcttggcatgttggagaaacagccgggtaggagccgtgcggagaagaggtggaatcctaacccactccgtgagggtgaaaaatccgtccttaaacttgtcccccttcttggggacagaagcaagctcgtaaaaacataaaatttcagccgggctaggtgcagcccagcctttggcaacataaaaaataaataagcctgagaggaggtggtaagcttgtgggatgagttgataaggcgcaaggccaacaaaaacaagaaaattaatgaagtagtcttgaagagggagcatggccccagacatgaggtgggtttcgctccaagcaccgaaccccccgtagttgtggttgggcgtctcctcgtagtgaggcaagcgatgaacgacctcagacgcagacggcttgatgcctgccacggtcacaatcttcttgagctagtgagcgcaaaccagagtagaatggagctcgtccacttcccagccattggcacgagaagtatagttctcttggggaaccggtcctttcatgatctcctccaaagtagccagggtgttcacccccttcttagaaggtttattcccgaagataggggcagacatttttctgtaaaaagaagaaacccagcagttaggccccaaaccaaaccctattgtttaaaaagggaatgggggtgtaacaccctaactatctt

SEQ ID NO: 68777 - DNA, 2893 bp, Cannabis sativa
aattcaccaaagacaataatgtcacaattgaattcacacctgatctttgttttgtcaaggacaaggattcgaagaagcatctttttctgggcactcttaaagatggcatacaccaccttcaatctcatcaacctgctgtcacaaacccatcttccagatccaagatttacacctctgctcaagtgtccatgacacaacctattgatgctagctctatttcacattcctgtaacaaagatttttcagttgtaaatctatggcataaaagacttggccatccaaatataaatgttttgaataaaattcttacacatttgcatatttccaattttactgttgatttttgtcatgccagtcaacttggaaaattacatcaattcacatttcattcatttgaaaacatggccaaagcaccctttgacattgtgcatactgatttatgggggccctcccatgaagcctctacagaagggtacaaatattatgtccactttcttgatgaatttattacaagatacatctgggtttttccattaaaacttaaatatgaaacaccaaatattttttgcaatttaattcctatgttgaaagacaatttggttgcaaaataaatactttacaagctgagatggctctcactctcttagctcaagctgagttaccccttaaattttggtgggatgttgtcacttctgcagcatatctcatcaatcgtctacccatccaaaaatgtgattacataaccccatttgagtttcttttttacaccaaacgagactacaactttcttaatgtttttaggtgtgtctgcttccttgtctaagggcatatatatctcgcgagtttgattttaaaacctcattatgcttattccttggctacagtcttgctcataaagggtatagatgtctacactattctcgtagattaatcattgctagaagtgtcacttttgatgaaaaatgttttccatgtaaaaccttgtttaccacctctgaatctaaactcaataactctacttttatgcaccaatatctgccttttccacagaccaacattacacctgatatgcctattgtaccaccaaccactccatcaacctcagtgtcatcaaccacacccgatacacctctgccctcccactccccccacctgggttcccacaccccatctacccaccatttccaggccataatattcccaggaccaactccaattcagcatccacaagtatcactcctaacccccttactacaactcatcccctgccacttcaacctccacagtccctcacctctggataacctgcaccctatacaaaccagatctaaaagtggcatcaccaaacctaaaatattggcagctaaactaattattactaatgttgatttttaagaacctaaaagtgtgaaacaagacttacaatctccaagatggagtaaagccatggacaatgaatattatgctctaaaaagaaatggcacatggactcttgttccctatacagatgatatgcatatagtcgaaaacaagtgagtctataaaaagaaattcaaggcagatggctccttagataagtgtaaagctcgattagttgcaaaagggttcaaacagacccctggagtttattattttgacactttcagtcttatggtcaaggccaacaccataagaattgtattcactattgctgtcacctttggttgggaaattcaacaaatagatgttaacaatgctttcttaaatggtgatctcaagcaaactgttcacatgtctcaaccacaaggatatgttgatgaacaatttcccaatcatgtctgtaaacttcataaagccatctatgggctcaagcaagcaccacgagcttggtatgacaagctcaaatattctttggaatcttgggattcatcaattctatctcttacagctctttattttattcaaaatcaagacagtcaattgatcatagtacttgtttatgttgatgacattcttgtcactggtgcaaactcccatagcattcaacaacttatccttaatcttcatcaacaatttgctcttaaggttcttggaccagtcaattatttcttgggatttaaatgtcaagacagggctctactcttcatctatgtcaagccaagtatgctcatgacattcttagaaaaacaaatatgcttgattccaagacttgcaccacccctatgagccccgattacaagttatctactataactagtgagccattttcagagccgactcattatagaagcattgtaagggctctttagtgtttgacacttactagaccttatctgtcctatactgtcaataaactcagttattacatgaaaactcccacaacaagtcacttgtgtgcctgcaacctcatatacattcatggcacaatgtctaggggtctggtttttaaagcagctaaatggctctcccttgaagggttctcagatgcagattgggcttgtgacatagttgatagaaaatctgtcactggcttttgtgttatgctaagagggaatgtatacatgggcatcaaggaagcaaaaagcagtgtccaaatcttgcattgaatcggaatacatagctttatccaccattgccacagaattagtatggatcacctccctcttacatgaacttggaattagcttaccttaaaaacctaagctctggtgtgataatcggggagctcaaatgttggcctccaacactttttttcactcaagaacaaagcacatagaggtggatgttcattatgtttgagatttggttatgtacaggcaaattgaagtatcttatattccctctgaagaacaacctgcagacatgttcaccaaggctctaaccttcctaagttcaattttttgtgtagtaagtt

SEQ ID NO: 68778 - DNA, 850 bp, Cannabis sativa
ttctctcactttcttacagctcaatagtataatcgtattttattagttgctgaaaacctcggtcaacaagtgtcaagttgtattttttatgtaataattctattaaaaaatgctaaaaatatatctatgtcatcaaacatctcgcatagcatctctattggagatgctctaaactaccctaagtaatttaggcaagctataacgaaagccgtaaaatgtataaaagccataaaatgcacaaaaatgctggtaaaaggcatataaatcatccaataattataaagattattgaaagaaaaattattaacaaaataaatataattaatacattttaatatatgattctaaaataagataaaatagataataaatcatattttggactaaatttaaatggtataatatgttaaagtagaagacaaaatgattgtgtgaggtaaggaacagcgcatcacaaatgtccagagtccacataaatagacacatcgctctacgaactagtaatatttagccacgtgttcctgaattggtccacatcaacgtgccggggagtgagcttaacctttttaagaaaaaagacggaccgtctgtagacggtggccccaccaaacaatttattttttaaaattgaaagcaataattaaaataaaaacaacaacaacaacatcatcggcgaattccttccatctttccttctctttctctctctaaaatatatgtgattttctctctctactttctgtgattctgattctctctcctcttcttcctccttgatcatcgcctcgatcattgttcctgcctctaattcttcctccgagccctagttcccccattacggtttagcttt

SEQ ID NO: 68779 - DNA, 844 bp, Cannabis sativa
ggcggttcctcataagaggcaaggtgccttgggtgccaggtgggtgagccctccgtccaaggtcacttaggcacacctaagggatctagaccagtccggcgacttgggcgagctggaatgttatgttcctacctcaaacaaccgagccacaaacctgaagaaggggatgtgtgcctggtaaggtgctcattccaaacaaggagatgttatgttcttccgtctctgtctgacccagtttactcacaagggcctcaagtatatgtatgccctgatcggcatacttctatttttcttagccaaatttaaagtggttgacgggcaccggggacaaggccgtgagcaaaattgggaatttgttgacgagtattacatggtggatggcatgggcaccacctatactcagttccagcagatccctatatattaccgtccacccttcacgctagctcttagggatagagctcaaaggatcactcagctgccgaatgatgcccgaaatatcacattgttgatctcgaaagccaacttcgtggagtacgggctttatccaaaggatttcattccccagcttgtgaaggagacgaagaggaaatccagtgctggtcaggctgagagagctcatcaggagaatgaatccattcaactgaaacgtgaagctaagtttaagggaggtgcgggagccaagcaatatgcacaggtgcattttgagcaggaagatgaggttgaggaagagctggaaactccgctcaaaagtaagaaaaaaaactttcgactgagcacaaggctatcaaacatacgattcagatcaaggagcctagttcacctgctaggtcgtccactcttg

SEQ ID NO: 68780 - DNA, 1068 bp, Cannabis sativa
agactgtctctagggcattcactttcctccgagcctctccacttcagatttctgttgccccgcctctaacttatacttctcaatctcgactctaagctcctcctccttggctttcttctcttcttccaacctgcggaaaggagtctggagaacctccctttcttcttgaaggctggtcatttccttagataaggaagtaatatcggcttcaagctgttcggtggatggcatgacttgtagatccttggtcagtttggccaccttgttctcagcagtaagaagcttcttattgacctctcccagctccatctggacagccccaagttgaaccctggcttccttggcgtccttcttggccaagtccacttctgtccgcattgtattggaaatggcagggttcttagaggtagccaacttagctcgggaataagcataagccatcttcaaaccggtctatacagagagaaaacatcagaatctaaactaattgaagaaggacaaaaagaaattgtcagaaaagacttaccctagaaagctccttcaagactccacccatcaccagctctagagaaaggtcgttgtgtgccccatccagtttctcgttcacctcaagaatcgaccgagtcacatagtgagtgagcatttctctgcctcttttagtctctgggtgcattaccggaggtggagcgggggccttaatctgttcggacacgcttttgaccagcttgaatccgaccctcgcctgctctggcctgtccgagctacctcctcgagaatccttggacttagtcatttttgagataggagggtctacaatggtttgttcctcggagagatcaatgaccacttcagcaggtgccttctctctgaacggagttgtctcaccgctcttggacttcttcaaggcttcgagtattttctgagacatgtttgcataggaaaaaagtaacataatcagaaaaaatcgtaagaaatatgaaggcatgctgattaagaaagttaaaaacaagatggagtatcctgcactttggcaggggcatttacccgaacaagtactgatggggcatc

SEQ ID NO: 68781 - DNA, 594 bp, Cannabis sativa
ggttttaatttttctttaaataataatattgtgctgcaatatttggcagttttagtttcaatgtataaatatatatattgaattttttggttgatattgaaaaattttgattcatgaatacatgatatattctgattggtgttatgtatcattgattggaaattcagtattgtttatattctttgatcggcgttgtttgcttcaatgttaagtgtactgatatgtatatctttagaattaatttcggtgtgtgtatacatcataatatcattatgtaattgccgatttttatatggattcaaagatgccgatttatatatatattttatgttggcttcagtaatcaacttttccgtttttttttgttttgttctggttattgatagaataagaagtatatatatgatacgtttatatatatgcgttactctaattaaagccccagcccaaaataaattagattgattcttgtttagcttaagcgtttgagcacatatatgttttattaaagattaagcatatttatatataatgtgtttcagtactgtataatatatatatgtgatagtatattttagtaaatatatattttgt

SEQ ID NO: 68782 - DNA, 614 bp, Cannabis sativa
taacagtgttctttcttataggggactaaaaattgatggtctttggagtaggtgtaatggtgaatagagtgaaaaggatattatccaaaaaaatatgtgtaagagagaagtttgaattgttttgatgttgttgtggaatgtctggcatagcaagaactattagatgcatgatgatactattgttcctaaggtaccatgcattactcttatatagtttcttttttttttttttttttttgaaattactcttatatagtttcatttcatatataaatatatataaaaatttgtggtatatatatatatttaagtttaatttttggttataaataaatatttaagtttaattttcggttataaataaatattaaagtttaatttttggctgtaataatacctatattatatttctgaaacttcgtaggtacctaaccattaaatgtcaagttattatctacgtatcattttcttattggtatatttaaacaatttgtttaaaataaaaatttaatgacctggaccaatcagggattactttactatgtgccaatttacttaacacttaacatgcatgtacgtacatcagtttctgaattataacttagatattatta

SEQ ID NO: 68783 - DNA, 814 bp, Cannabis sativa
gtttcttgggtttattgtcaatgctcggggaatagaagctaatccagagaaaatacaagctcctggatatgaaatcaccaacaaaaacaaagaaagcgcaaagcttaactagtcggatacccgcactcagtagattcgtctcaaaatcaatagacaagtgtgtttccttcttcaacatcctctgaggtaataaaaagtttgaatgaaagtaagaatgtgagaacgctttccaagaattaaaaagataacttgcaaagcctctcgtactctcaaacctcctagacagagaagaattaggaatatacttagctgtcaccgaatacactgtaagcgccatgatgattagagaagaaaacaacatccaacatctagtctactatatcagcaaacgactcattgaggccgaaggtcggtatccagtctactatattatttcttaactaattaaatctcacctatctcattctcattccattaaatatatatacatgcatatatatatatattacttagaatataaacagtacaattacaaaatttacataaataatatacagaatgtatttacacacaatacatatatataaacatatattcaacagaacacaaaatataaacatatatattatatatcaagttaataaatatttaccttataagcgtaattcggcgaccaattacgacaaaaatgtggcaactatgcacacacagtaacagaatgttaataaaattaaaaaaaacccaaaaatatttataaaaacaaaaataaagcaatttaggtagtgtttgttaatacttttttaatcaattttct

SEQ ID NO: 68784 - DNA, 2295 bp, Cannabis sativa
taaattaaattaaataaataaatcccacaaaatgatttcaacacataatcaattagaagtgatcaaataatatagtgataggctaaatattcagccaaaaaaagaagaagaagagaaattatatatgatattataattacttaccaatgacagatttcaatggagtagcaatattcaatattcaatatcctaaatcttataattataaagtagagcaaaaacaaaatagaagcaaaaacagagagagctaattataatatataaattaagttaattatgtataaataaaatatgcacaaaattaacttatgccatccagctagctgtaaatttattggcacatgtcaaactaaaatagtaaaaaaaaaaaaaattcattacactaattaacaaaaatgaatacactgctatcgttcataaatatatatataaaaaaaaaaagaaaaaaaaatattaacaaaaatgactcatgggccaaaccatggtcccacattttattgtggtaaaaacttgtatatttattttggaaataaatcaatttatgtaaatgcagactgcatatatataaatatccttaataattattcaaaatgaaattaatttatgctaaaaaaacacattaatttccttaaaaaagaaaaaagaggatgagaaactacagaggggtgcaagttgaacaaggatgatctcatctcatcataaagtctcattttataattttgtctctttgactaaaaagagggtattaatatttatgttaatttgtataggtaaagttcattaatatttatgtaaaaaaaattatatcataaaacacaataccaaactgagaaaaaactcatcctctataattaaccaattaatacacatgttatatatttttgcctcataattaataaaaatagttaattaagacctaaaaagaatacaatgccgaaaagcacctaattattattagttccattaaaactttccatatattttaaaataatgatcaaataaaaccaagattaataaagatcaatctgtctttctctctctctctctctaaaaaaaaaaaataataataaatgagaaaaaaatgaagaaaaaaaggaaaaaaaagaaagatcaaaagaacaagatgaaataaagttatagatatataccaaaatgaaaaatgtatatatatatatatatctataactcagaaaccatattataatttagatgcatgtacgttacaagggctacaatactgtcatatttaaactcagaaatgttaacaatatatatatacacaaatgttatatatattcaaacacaaaaagaatttatatatatatatatatttatatatttaggaaaaacggacaaaagcttgggaacttacaggagctttggagctgagaattaattagctgttgctttctaataagaacatatatatacatatatatgttgctgccatttagaagagaagaagaaaaatttaagaaccctaaccctagaacttgtgtgcggctgtagcaagaagaagaagaaaataaatattattaacccataaaacacttgctgccatttgagttgaagagaaagaaaagagaagaaaattatagaaaccctaaccctagaaaaccctactgctaattccaaaagctgcagatattttggttcaaaattccaacatatatagagagaaacatgtggagggtttggtgatggtgacctcgatatctctttatacaagaacagttattattgtttctatctttcatgaaaataaattggattttagataacttaagtgtaaacaattatatttgtaattcatagccatataactaaattattttaaaaatgaatgtaactaaaaagaaatatttgtaacgatttatataattgagaagaaatattttacaacaaataataattttaaggaacaaaactctacaaaaattataattcagctaacaaaaattctttttaattttttttttaaaaaaacaaaaagctaattaactagggtagctaatatgtactgactagggctctgcatctgcatgcaaaaatagtaatatatatgtatatatataatagctttatatataagaaacactctgaaaatgtaatatttgtgggtatattattggtcccctttattaccaattttggtttttgctattttcatgtccatgagactatatatgacttaattataatgaaagaaaaagtggagatctttaatttgagagttagctatgttagataaattaacaattaacccaagatctatttgtatataacatagaacac

SEQ ID NO: 68785 - DNA, 915 bp, Cannabis sativa
  modified_base (250)..(251): a, c, t, g, unknown or other
acaaaaccttgggaaattgaggttaaccatattgtccccaaggtagtgatataattacaatcgtcataagttgggtcttttgggtttgagcattgctattggttgacggtaagttgaaaaatactacttttattaatcaattaatcaaatttatctttaattttatatttaattgaaacatacttctttcttagtacaatgtaaaaaaaaaaaagtaaaaatgatactttaaaaaagaaggtaaaaatannagaggacaatataaaaaaggtataaagtgtaatttcctcattgcacaatgggcatcttaattttacaagtggcattttaggattgattaacgatattttttaaaagttattttttcaatatattactaaagagaatgttaagtaccaataactataacaatgtacgacatgacacaataacaccatttgaaaacaacacacagaataaatttatggttaagcacaaatgatgaaattaaccaactaaatttaaaatcaacataaaagtgcatattaacaagcaaattttttaaatatgttaacatgaaattagtaaatatattaatttatcatatatcttaagttagtaaatataattatttaaatggttacattaaaaatataattatgattacatttttatatgacctattatagtaagttactaataagtgaaaattcaattttttaacttaaaataattataattaattatataattaaaataaattaattttttaattaaaatatttaataagacatttttcacaaaattgaataataataatttatatttttaattttagtttttaatcattaagtaaaaatagtgataggtatttgatttgaattcatttctcaattattatttactttttcataaaattgaataaaatatgataaa

SEQ ID NO: 68786 - DNA, 502 bp, Cannabis sativa
aaaatcatcggagtagctgtcggtgccaaaaaaatcatcagagttgctgcagacactgaaaaatttgtcgaaattggcattgtcgctggaaaattcactgaaaaaatcaccaagaaacttaacaagttccttgatgaagaaatcagtttcttgataaagaaaccactttcttggtgattttttcggtgaccatgccaactctcacgacttttctgacactggcagctactccggtaactttttcggcaccgacaacaaactataaaaaagtcatcgcggaatgacatagtcgctggaaaaattaccaaaaaactagtttcttcatcaagaaaccaatttctttatgaagaaaccaattttttagtaaatttttcggtgatttttataacgacaatgtcaattctgacgacttttatggcgtcggtagcaactccaacgacttttttgacactggcagcttctccggtgatttacttcaaccactttgcaattttgccatttt

SEQ ID NO: 68787 - DNA, 691 bp, Cannabis sativa
aattataaatattttaaaaaaattaaaaaatcatttaaaaaaaatttattttttttttacttttttttttctctttttctttttgtgacaaaacaccttttggttagattttcaaagagacattaaacagtttgtgtgcatttaacaaaatatgtaaagaatgataaatgggattgcaggcaacattttcatacactaaaatgatgtaaagaatccattaacgaaataatcgaccacatataaatgatcaattactcatgtatcaacatttgtaaatatttaaaatccctaaattgggcaaaatcatcgagcttagcatctacggcgagactacatatatagattttgaattttatggtttacagaaaaagaactttgacatagtcgaacaaatttgattgatgaataaaaaattgaatgaaataggaataatacaattagagggagagaaagagaccgtttttcggaagcttcggcagctctggcacgaacttcagcggcaactaacctttcctcttctttcctttgttgcttcttcttttcgtccaagcaagacacgcactgtcccaagcaagacacgtcggagagatcaatagtaactctgattcgacgagagcgccgattcaacggcgggcgctagcggtgggagttggggtggcagccggttctccagaggagtggtgacgaggag

SEQ ID NO: 68788 - DNA, 921 bp, Cannabis sativa
tttaccttagtgtaattcatgtgttttctatttatatatatattagatatagataatgtgtatatatatatatatatctatagcagccagcttgcaccttatcaggattaatgctcacgctaaaagagtcatattgattaaagcaaaatggtcccaaaatgatcagtaagtatagtctcaagttcttagatcactaggggtatgtatgaaaagtatcacacactattatatgtactgggaattcgcattattatattttaatgattattgaatgttgttcaatatatgcctaatctgatctgattcttataagtttgcaagctaataattattaaagcattatatactactctatattgattatctcttctctgtataattcttactgatcactgctaggcttggctgtttttattaagctatatttttgccaccccttttacaattacatccctctttcttttcttttctttttttttttttctctgaatactatttaatatcttatagtactgcactatggttttagatttatgtatattttatgcaattgaatgtgtgtatattaatatacctacaaattgtatatagatatttaatcatcttatataattactttatttatgtatatggaaagggcactgtgtccaatcacactactacggtataagatatatcatttttctgtgaagcaaaattaaattttatgttcaaaatttggcataataagctaattcattcctttcttcagtacttattaaacagtacatataatgcttcaatagttagtaacagaaaaatatttggggtcttcatgattatgatctgcattttacatatgggtgtatatgagcattgctattagacacaagtggtgcctaacaccttctcgacatgtcgcgttgcgattgactagcgata

SEQ ID NO: 68789 - DNA, 583 bp, Cannabis sativa
acttacactaatatttgagttgtccaaagaccaaagtttcatcactatgtgcatcattcaaaaacaaaatccacctaaaatcatttcaaaacaaaaagcctataaatccaatactaaaagtttaccaattacacaaaccaaaacccatgaagagcaaatcagtgaccaccatcatctttactctcatcttctccacaactctcctagacccttctctctcagagctatgcaaccaaaatgacaaaaaagtccttctccaaatcaagaaagctttcaatgacccctatgtcctcacatcatggcatgaagacaccgactgctgtgattggtactgcgtcacttgtgatcccaaaacgcaccgtatcaccgccttaacagttattactggttctctcacgggacctatcccgacccaagtaggagacctccattacctcgaaaacctcgacctccacaaacaagttaacctcacgggtcccatcccaccagccattgctaaactcaaaaacctcaagttcctcagattaaactggaacagcctcaccggttcggtcccggatttcttaagccaactcaccaacct

SEQ ID NO: 68790 - DNA, 1313 bp, Cannabis sativa
ttgtacccaaaataccctgacataagagagtcacatggagagtatcttgaagtgacgggggtaaaatggatacaatgtttaaaaaaagaggtaaaaatgatagactttaaaaaagagagtaaaaataaaaaatgacaatataaaaaaagtatagagtgtaattttctcaaaaaataaaaacttgaaaagattgtgccctttattttttaagagccctatgcattagctcaacttgtacactaataggacaaaccctgattgcttattaatcataatcaacaaaaaataagctaaccactttgcttaccatagtaaaaaaaaaaaattaatagtaccttcaaccaaaaaatcaataagccacatgcagtgaaactcgaaagaagtatgaaaaattttaggtttttaacttgaatgaataaatgagaaatcatgcatatcaactgttaaaactaaaaatcttaaatcttttaataaatattaggtaaataaaaatcacattatttaggaaaaatggcacatgatatgatagtagcaaaccaacatggaatctatatgagaaaaattaaaataaaaacatacattatatcataaataataataataataataataataacaataaacaattaattaagtgcatgttattcaaaaggttgaatgacaatgaaatcaagtcaatattgatggttcactacccaaaaagccgttttaatatttaaagtttgcctccaagctctttattatctcttcaaccaaatttgattaaatttggtttgcttttttttttttgtttaaagtgggggattaaatatgtaggaaaattgttaaaatgtaatatgctattagcatttttgtttgtgtcatactactattagtataattaaatattacatcttatataatttaagaaaatagtttttagagaacattgataactaatcgtgtagagcccccaatagaaggtgttaagcaccactagtacccattagcaatgctcgtattactattgatggttaagaaataaaatttaactataaatattaaactattagatttttatccaatgaaaaatagtaaaagaaaaatttaagtttctattcttaatttaactacttaattataaaaaaatatatttacacgatattaaaaacatgtttatatataaaatatttaagttaaaatcaatttttcttttaattttttttttgtcgaaaaaacttttgttcttaattttttgtcagccaatggaacaatcacaactcatataatgtaaaactgaaatttttttgtaattggatagaaacattaatcat

SEQ ID NO: 68791 - DNA, 664 bp, Cannabis sativa
gcaagttgctcaaaaattaaatacaactcattacatgtcaattattgtgtaatcactagttgttggatattgccaaataattggtattctttaatactaagttaagtttcacatatttaccaaagattggataatattggagaatactgcaacagtcttagaaacagaggtaaaggtttctatttttcttgacaatgtgtcatactctttgcttttttgtacacgtggctcacaatcattggttttgttttccttttaattgttatatttgattgaaaaatgatgtaaaagccttctttctctcgcaggatgatcactcatctcattccaattattcttcctgattgtttttccctgatgaaccctgatagattttaataaggtagatgagattttatctcaaaaattaattaataatgagagaagtagtccatacattttatgtaaactatttagtttcaacacattcacaatgtgagactctctaatatttctcctcaaggtggtaactattgttgacagtgagaactcgtcaactaacttatgactgaaaaaccagcttaagctttaggttcagaaataggatggagaagaagatgaaacacaaacccaaattactaccttgaaatggagataataatggagtaaattcttattgctctct

SEQ ID NO: 68792 - DNA, 963 bp, Cannabis sativa
  modified_base (469)..(473): a, c, t, g, unknown or other
  modified_base (577)..(578): a, c, t, g, unknown or other
gatttagcgtctcactcatcagttgtacgaataatgtgatttaggggcatgtaaatcgtcgagtagctgttccactcaagttagctaacacacctgaattcataaatgaggtaatattagtataatgatatgcatatgtgtttacatatttagcgtgcatgttagttaagcctgttagattacattataatattggtataagtatgtttagtattatattggatatcgataaatttattgttgtcttaagtactatttgacattatcacatcagtacgattagagtatgactagcgtagcgagtataggctgatattatggtcgatagtattgtactacttggcagtatcacatcggtaggactagagtatgactagcgtaccgagcataggctgatattatggtaaatagtattgtcatgcgaacgttctagactcagtaccatgttggacacggggatagggttatnnnnnggtgtatgggcgcctgattgtaattcgggctatagtcatgttattgattatgcttttattattgagtctatcgactcatagatattgtttgcatgtgtaggtannggcaaggctaaggttgagcagccgtgacagcgagcggataaagattgtacatgtcggggcggttaggcatagagcatacagtctttgggacagctggattgtattttgtctagtcgctaggcgataacttttgtactatgcactgtgaaacttttgtaaatattttgtaaacgggatcctgattttatatatgtatgttattttggtatttataaatagttaaataaagttttaattaatcacgttttttttttcaataaactcgttgattagtaatgagttgcacaactaagttaaaatcacattaacacgcctaaactagtaaggtgttacaatttggtatcagagccaccaggttgtcttctgaagatcgtcacgacatgta

SEQ ID NO: 68793 - DNA, 3211 bp, Cannabis sativa
  modified_base (179)..(208): a, c, t, g, unknown or other
agtctgtacaacatatcacaaagtcatttttttttatcaagcacaatacttacatctccaactagagttggtcttagttagtagcatgtctatttctgcaaacaatatttgactagcttatgatcttttctttatttcctaggcattctttatgatactcttttttttttattattatnnnnnnnnnnnnnnnnnnnnnnnnnnnnnntattattattattattattaatgcctggtatgtgatttgacttttgaatttgtcttcaaatgccttctaaattgtaaaactagtctttcttttacccgctagctaactatttcttttattatcaatttcaaagttactatagttgggataggagaattcagcagtagattaattaagaacttaaattaaaatgataatcaaattgttcttttagttattctttgagacaatgtgaaaatatgacttattattcacatcaacctgagcttttaataaatggtctgaaaaattgaggttgtaactagtgaaatgctcttcaacaattttcacgaagaatcataaccaacaagttcaaaatcagctgccactattgcatctctatatatttttctctttggatattcaaaatctacatagtgagattagacaagtcaactaaacaacaaagaatcctgctttatgttcttggattctatatcactcacagcaaaagctgctccggtcgaggtccgatatgagttctattcatgtaacattagagtctcacgaccgaaaatatatactcgatccatttaataaggtgaggacaatcccctaacaagccggttttgttagggtgatttaggtctaataatttcctaaataccacttataaaacaattgaagaagaacttgcataccacaaacatgagcaatcgttcatgtcagttaagaatatgatgtaatgttcaaaggaacagtaagagaaatgtgggtagtattatttaacttgaacaagtgatctgatggtactgataggctgattccctcatcattatctggggtgttcttgatttgatcaatttatctttgccaactgaacaaatatttggcctgtaaaatcagcatatgcatcctgatgtgatcaaatgaatgatcagcaaactataaaacttagcctaagctatgcatttgagcaaccactgattatagttcttggatagaaacgcacttgccaagtttgaattgcatctgtacaagaagatcaaaagagctatattacaaaacaaacttaaaaatccttatgatcacccaaaatgccattgaaccaaagttaaagtttctaaattacctgacaatcaagtcttcatgaagttaaattaggtgtctgtctagtctatctttctgggaatcacttgaggtgatttcttgaactaaatgctcatcaagtctctcaaatatcatctttggcagaaatctaaaactctctgcttcgagtttctgtccaatcctagaacttctcacacgaacataagtagcaaagctaaactgaatattgttctccaccaaaggttgggaagagtaccacagtttaaataatgacaaatcaatggaaggaatgaaagtatcacaatcaatacttgtctcaattttagtaatatggatgacatcacattcaggagaattcagagcttcactgaatattaaaaaaaaaaatcaatcttttaccaaaattcaaaatataataaaacagaatcatcaaatctttggttacctcaatacttggccacccccaatgataaaaactctctcaatggactgagaataaggagactgagctaacattttcaaagctgatgaaatgctttcaaacacgacaactttttttgaaatggaatcatcatcaacacttccagaacgagtcaaaatgacattaagtcgagcaggaagagggcggaactgaaggggaatactttcccaagttttcctacccattattacggcattctccttagttgggtctagtgttgttgtggtaagctccttgaaaaatttgaggtccgaaggcaacttccatggcagcttcccgttctttccaatgcccatattagtagtggcagcaaccacaacttgatatctcctctgacagtctccaccatcaccttcttgacccgaaaaactcgaacgcacagggaatttcagaacccctttgagcacaccgaacaatggtgaagaagatgcatgcacagaatcgaaaatgggtaagcgaatttggggatgaggtttcaacgatcggtgtagactgaaccgaaacataactctgggaacgattagataggaaattaggttgaaatggtttagaacaaaagccagcccatttacttctcaagcttaaatcaattacattgaatagctttgacttgagaatgggtatgggggtggcttctcggttggggggttggaattggagagtgagattgtgtctactcttgggttgataatcctaattctaatattgtgtttagtagcataattagatgttgtttaaccctatgtttaatgtatgtatagccataacaaattttaatatcaaacttaaatttttcagtttttttatattttgagcactcatacaaatacacataaattaatagtgaccttattgcaaaatattattttgttctttaacatctgaatttagcttaaagtaatagtgttataatacgaattttttacctaaaaattcgagaccaagctcaaataaaagtgacacgtggactcgcattcttttaggattgctaagctgttaagaaaggacttctcgagaataaacatcgcctgaatcaaactcacgagaagatgtgaacgtggcagagtttagtcgcattattacgcatcgcataatataaaataagcaggacaatactggtcgtgcatatactgagatatatgtgatgactaagtagccttctcttgtgacttagtaaagatcattctttacataatgaattggtccaaatgacccaatgtactcgatgactcgataaggattcgcatgtcctatgttatcaacgttgataaggtgtccatgtacacaactcgactagaacgcagataccttaatacgaggtccgttagcctcccttagaatgataaaatgcaccctaaacctgcgagcttgtgcgacaatatgaacatgtaactcgcactatggaagtcacatgttgttgtatttagtgaaac

SEQ ID NO: 68794 - DNA, 598 bp, Cannabis sativa
tgacctagaccttttctataacaaccttggcattgacaataagccttttgtttcaaagtatttgggagttccccagtgctttggtcgatccaagaaatcttcctttccctattttcttcagagggccaatgctaagcttcaggtttggaatcataaatttttttcaaaggctggtaatgagactcttattaaagcggttatccaagcaattccttcgtatgacatgtcatgttttcgactccctgtctccatttgtaaggaccttgataaacttattgctcacttttggtgggggtcaactggtaacaaggctaagacacattggaaaagttggacatccctttgtgtttctaagtttcatgggggtttaggctttcgaaactttgttcttcctaatcaagcccttcttgcaaaacaagcttgtcgtatatttatgaatcataactcccttgtttctagacttctcaaggccaaatcttttaaacataatgatttcctttcggctactaagggtcattctccttcctactcttggagtagtattttatggggtcgggacttactttctcaggggctcatttggaaaattggtaatggt

SEQ ID NO: 68795 - DNA, 620 bp, Cannabis sativa
catacaagattatatcaacaaagtgttcatacatcttgagaagtgaacttaacaggattatagcctgatcttcatcctcaattttcactccaaggttattcaagtccagaatgatcttgttatagtcatctaggtgctttcttagttctttagtttcatccatcctcaatgtatacagtttattcttgaggtagattttgttggccaaagatttcttcaagtagatggaggctaatttgttccagaggcctagagccttttcttcatcaacaacctccctcataacctcatctccaagactaagtgggatagcactgtgtgcctttgtctcaatttctagcttcttccttttgtcatcaatcaaggccaatgcttctgaatctaaagccttatagatcccttgatgcaccagaaaggctctcattttaattctccacaaattgaaatcattggagctagtaaatttgtccacctcgaaccttgcagaagtcatttcagataaggttcttgaagcttgaatctgattcttgatgacttgaatttggttcttgaaagtttgaagatgaatcttgatcacttgaatgttgtttttgatcttcaaattcacccttgctctgata

SEQ ID NO: 68796 - DNA, 1463 bp, Cannabis sativa
tttttatgcttaaataaaacctatttcagtataatataaatatgatgaagacatggatttagaatgtattttgaaacaacatataggaatgtattttgaaaatcaacaaaaaagtatttctaatgaagcaacaacataacatgcaaaacgacaatatgatgaagagcatggatttagaatgtattttgaaaatgtaggaaaagagaattattaattactaggttgtaattatacgtgagaataattacactattttaaatataatatgtgtttggatgtcaaataataattgtgtatatgaatgtttattttcgtgtttagcaaataagttagtaattatattgtttaataatattaattgtctaaaataataatattgtgcaatttattatacctcattcttatggaatcaaaagaattggatggtgtaattaaaactcatgaattacctatatttaatgtgtaattatctagttgacaaacacgtcaaacctcatcattcctataaattacacaatgactaatataattacaaggagagttttttacaggtcgagcaactcattgcaatattaatttgggaatagtaattagggtcgtcttaaggtcataaaagccttggacaaaactaaaaatgagattttttttcttttacaaaaatttaaataaatattaattaaatgtttttgaacaaaaatattaattaaattgtaacactattaattttaactcttttatgtataacaaataattttttattatgtaagctaatttgataaagcaatatttaattactaaaagtatttcatttaaagtgctatatattttagcattttcacaacaaaaaaattatataaagtattaaaataatgtaaaaagatttataataaatattttttatttattattaattgtagctgactttttttttgaaaacatagtactatgacattaatgcagtaaaaatatatgcatgtaaagttatttgattattaaaataattaaaatagacagtttggtaacaactttccattaacatttccatacatactaattgtactagggaaatttgattttctatgcatcttttatacctaaatttgttccctaaactaatagtcatagctattgaaaaaatgagtatacttttccctatactctaaaatacccctcccatttttctcaacctctctctctcttcctcctttctctctcaaatcaaacccaaaacccacaaagcctccacaccgagccatctcctccaccgcactaaacccacgccgatccacctcctccaccgcacaaaacccaggccgatccacctcctccaccgcaccgctcgaccgccgtaaccaccgcactgctcgactgccgtgaccaccacgaaaattgaccataacgaaaacccatgtcaatccacctccaccaccacaaacccatctcgacagaaccaccgggcccga

SEQ ID NO: 68797 - DNA, 514 bp, Cannabis sativa
acatcgttctctttcacttctacaggcggcaattctacaattcttccaacaagaagaaccattattaagcccttaattttcttccaaattcaaagattagaagttcctgaaccctaattaagtaactgagactgaggatcgtaccttgtaacgacatcgggaggaccttgttgatcgtagacgacggccttagagattttttttttaaataaactgagagagaattaatctcaaggagaagttaatgtatgatcatcgatatcgataatacttaactactttccaaaattttaggttgtagctaaattatatattattttttatcttttcagttaacgattgaaaagaatatttataattttttatttttttaataaaataatttataaaataatataaaattaattatggatattctgttaaagaatagtatattctgttaaaataaacagataacccaaaaagaatcgttaaaccaatacaagagccataatttttaaatattaattattca

SEQ ID NO: 68798 - DNA, 4943 bp, Cannabis sativa
aaaaaagaaaaccagagagatatttaccgtgatagtttgttggaggatcaaaacgatggagaaataagtactggggatgcgatcacgaacaacgattagtaattgtaattctattcatgagtcatactcatataatgagaattgatgcaagtgctttaatactcattataatataaaaagattacaaaaatccaattaaatattataattgtaatttcgtaattgtaattacgaaagcagacatgcacttaattgtaaacatttggaagggagtggaatgggttaaaggggagcccccaaggcgaggccccaacaagtcagttttatcccttggggtaattacttagcttagcatataggtaggtacctaagggcagaaaaggccaaagcttttttattcctttctttgttggtgcggtatgtgtgtgtaaatattaatcctgcgaaaacggccaaacgagtttgggaatgggaatgggaatggagatggaaatgggaatgagaatgagatgaatgggaatacgatagaaagaaagtgatggtacgtctacaccacgcaataacaatccaaacactcatcacctctctccttcttcttcttcttcttcttcttttttctcttcaacagtgaaatttaatgccaatccaaacatagcatctgcaatttcaactgcaaaaatcaagtaagctatcaaaatcttatacccttttttatgtatgtatttattgcccttcttcttcttttaaatcccaaattccaacatgtaaaaggaaaggtttttcttttgattttattttaatacttttttgggtttttgttttttcttttaatcgatttaactagacaaagggttctctttgcggtgcatgtgatcggcgaggctttgattctcacttactcactcactcattacaatctgacttttcatttattgagcttgattttctactttcatgtttttctttttatggatatcatataaatatatgtattcaattggttggtggatatggtaatttcggagaaggatgaaacagtagtggcttttaatgggttattttaatttttgtatttattttcctaaaatgcctaatgaaacataaaatccagtctttctctctctctctctctctctctctctgattcttatgattaggtgtgtgaactgtgaaggttgttattttcgattttcatttcagtaacttaataagaagagatttgttggtttgttgaatttttgaccgatttaagggattttttaacattggtttaatagaggccgtggtgggtctgcttcaaaaaccggctttgatagattgccctactgaaaacttgcttctactggactctgataattagtaataagtgaagagagagagagacactaaaatggtaagtatccagatggggttggctagtaactgtaaattttctttccattgagcttttatttatttattttttatctaaaagaaaagtaaaattaaccctaaaattatatataagtagaaatctgagcataaaaatcaccttataactgttgcagggaaatgggaaacgcctgccatctttactggggctgagtttgattgtgttttctgcgaatgatgggacttgttaggtaccggagtgagaaagtaatggcagagatatgtataacccattttgtggaccttgggatttatgtaaccagctttttaagtgtttggctatcatcaagcaaagaggtgtttttgtagaggtatcttttgagcttggtgaattctcttctaaagggtattttacaactttcgattctgagagcagtttcacaaggggatggttaaggcaatatttatgggcttccgaggaatcttccaatgggatgatgctttgttgatcaattttcttattacatttcttggccttcgtctccatagcttgagttgtgaattggggcagatctgaactggtatttggtatttgcctcctatttatgtttttcctctgaaccagatatggccattgattacatattgtgaattttaaggtactttgccaattccttaatatttttacatattgtattctcattattatttctttgttgtttcataacctctgtgctccattatgttgttattgcataaaaaaaatataaaagtcagagttaatgtttgcagcatctgactgacaagaagtttgctttacagttttttggagaatagtaggtgaaatcaatttatccaacttcttttatcagccatggagtggaattcgaaaccttccttgttgtgggacttggagaacctttttgaattcgacacaaaggcaactgaaaatccaaagaagctacaattaacaggctgcaatttcgaaggagatcgaggaattagctctggatctctccattcacctggggatggtggggggagtgcaggttctggctctgatttggggcatgcttcatcaaggagctctatttcggcttccatcaattcttcttcaattggggaaagcaagacatccaaattcactcttgatggttttgaacctttttcaaacgagttgatgagtaaaaatgaagcaaacaaagctcaacaacatggatcttccccgacacctgatatttccactggttctggtgaagcgttgctcagtctaaagttggggaagaggatgtacttcaaagacatttgttcagaaaataatgtcaaacactcttcccattctgaagtgtcgccatctgctgcaacagtgaagagaaataagtccagctgccagggtaacctttccccacctcgctgccaagttgaaggctgtaacctggatctttcatctgctaaagattaccataggaagcatagaatttgtgaaaaccattccaaatctccaagggtcatagtaggtggtgtggaacgtcggttttgccagcagtgcagcaggtaatcttctccgaaatactatttgtaaatcagaagcttaagaaatccaggtaacatgtttggtgcaattttctcaagctccttattgtcattcgagcttgggatatatatggtaactgatgttttcttatcatcatcacttaaaagttaaagtgttctatattcttttatattttgcatcagaaaactagttttattcagtattgcttactaatttgaacaagtgcttttgaaatgtgaaggttccatggtctgtctgaatttgatgagaaaaaaagaagctgccgcaggcgtctctctgatcacaatgcaaggcgccgtaagcctcagccagaagcggtccggttaaatccagcgagactttcttcactgtatggtaagagaaatggtttttttttttattttatgtttcatgttgttaacttggaattcgatgtgatggagtttttagtggtacattatggaagtagacttggtactttaccatccatcaatttagctttacttatttatgtaatcaatcacctctgtagatgagacacagaagatgagtcttgtgtttgaccagcggctctattcaaggcatgcaaatgtagcatgggatggccctgatagttccaaattcgggcacacaagggagtatttctcgaggcctgcaaaatcaggagccgcagctggacagcttcttttgcccaacaatggtcaaatgcctaacagtattaccatgctttatcaagatcccaatcgactaacaccaaataaaggcacagcaactgaggttcaccacccaggtctgatttcgatccctgctagttctgccttttcttaaccacttacattgctttggacttaaaacttttttatatttattaagaaggttattgacacaaaataagatttgcaggctttgaagaaaccgccatatcttctgacctgaacacatctcaggatcttcatcgtgctctctctcttctgtcaactagttcgtggggttcacgcgagacaaaacctgtttcccttgatactctcaacaacactacaaacaatagcagcatggttcaaaatgcagtgcatccaattagccaaggcttacccattgcttcagagtactggcaaactcaacaccaccaacccaccattgatgctgcaccatcacccctttcacatcatcaacgtagtaatggcagcagccagtttcaagatctccatttgttcaaagctcccactgagtctggattttattcctaccagttcaattaaacgtcttccttcacctatcaaaactttctagtcgtacttccgtttgtagtctaataaggccaatgatttttcatgctttattcctaccgtacatatatccatactcttctctgctcgtcgccgtttttaaaatagttctgtggtttttgttgttgtcactccaactttttcttgccaaggcattaatctttatcacccggtgaatttgtcttgcaagttatgttgcattgcatttaagttttctaccgtacttgagtaatagcatttagtatgctcattaatgttacgaacctatttatttcttttgtaattgcatttatgtactagggccaaatgggtgaacatggctttacactgcctaagttgccaaatttaactttgtagttgagattatcattgacaattgttcattgttgccttctgtttttcgtttctactttgctagcacacccgtctgctttaatttttccttcttggcctttaagcccagagagcataactctttgacatacacagctctttactaccaaccaaaacacatcatgtcgagtctcctctaaagttaaggaaggtactatagttattttgtccctttaaaggaagtgtattttgcctcttgctatcagtcaatttaattatgtttttgccacgtcaccatttccaaacagttattgcttttaaaaaaaaaaaaaaaaattataaacacttattgagataaattgaggcaaataaatttagaaagaaaaactattgtgtca

SEQ ID NO: 68799 - DNA, 633 bp, Cannabis sativa
actgtacgtactttaatcagatcaacaagaataaaaataaagtaaaacctagcaaaatgttatagactatttttttagtaatcctgctgtgttttgataacaacatcatgcgagcaccagaatagatcgagtttcaatagcactcgaagtcgaagtaaaatatatgtggagactcaaatatacgtactaaaaatttgtaatatggttcaaaccaattaaggcctaagtgtgactaattttgtttagtttttagttcacctatatgtatacttttatgtaataggtgtacaagagttattgatcaaatacatgttctttttatggaatattgattaaatgcattagttacatcagttattctttttactttataaatatttctagacattagccttaactcaagagtggtttacgctcctgataagaacatttgttattagggataagtaataaattagttacgtttgttgagatctgctccggttagttagggtagttagtctattctctctcacaggtccaggtccatatattattatatattgttctcatgtgatattatttaaaccataaatttactatcctattttgaatttaattaaaactaataaatatatatatacctaatcttgt

SEQ ID NO: 68800 - DNA, 611 bp, Cannabis sativa
ttttatttttatcttacacatatattttatttgttttttttattcaaaaaataatatgcctaaacaaaaccgcgcaaagcgcggtattattccctagttatatatattggagaattatgtagtgcacctacatagattctaattatatataagagaattttatggtgcaactaaaaaaaaattacattaatattttaattagtgatattttttttcttaaagtgtaaatatataaagttaaattatatttttggtataagaaattgttcaaaatttataaaaaaaaattatatagcattataaatgtgcatcttcagttgcactctcttcattttcttaaaaataatttattaaatgattaagaatttatagttgtctaaaaatatttatttaatttgctaaaattagttaaaattttatacatatgttttcttgcaagaacttttgatttataccaatcagttttacattattaaaaaactatataaaatataacgaaatacaactaagaaaaccattgataatattactatatatattctaattagttaatgaaattttaaataatttaatcttgagtttttattatcttgaaataatattacaagaca

SEQ ID NO: 68801 - DNA, 719 bp, Cannabis sativa
gactgtgtgatataacttgtgacataggcggttcactagaatgtgtcaatcaaacaacttccattgactcaccttttttaaggtttagttattattctgtgacataattcaagttacactattttatcaattatggtatatttaagagagaatagtacgataaactatgtttttgcaatcatgtttctcctaagatatgatcctcgtaacaactcatactctagtggtttcatatgttcatctgttgacatacttccaactgaatttgcaaagaggtgccgtgtttcaatagaatcaaattcagtgttatttcaaagaaattatgtggggtgataactttttaaaaatgaaagcgaacaatgtaatggtaataatgattccaatacaatctccattacactaaactaaacatgctcgtttggaatggtagtgtgcacttttattgcttaaaaatgttagtttagaaagatggctattatgtccttggatggggatatattatttatttttaacttatcatttcttttataaataacttaaaataaaactaagtatatgtgtcatgcacattttctttaatttttgttacataatgtttgctttaaattttgcaaaacctatatcttgttcttctaaaaaatttttttaatggagggtcggcagcgagcctaccgtataagtttacacaaattatgtcagccatatgtcttgatagccat

SEQ ID NO: 68802 - DNA, 681 bp, Cannabis sativa
ctgcccacacctccacctaaagaagctatgctccccttcttgagatacccaacaacgcctccaatcacaacgatgaacccataagggatggtgaagcagaaatcgtgcatattttttctccaaattctttattccctagaaaattacaggcaaacatttacaaccttttaccacttaagcatatgtgaccactccatatcttgtatgatatgtgcattaaaccactaatgatttaccacaagacaaaagcccaggtgtcctacttgcacaaaaagcacttctacagccatccaaaataatataatgagccttggaaatttagataacagtgataactatgagaatcttttctgtattttagtaaaggctgctgaaacagttgcataacatgaagaaaaaaacatgatgacaataaaactgacactgaagaagaaaggagaaacattttatctaggtgatataggaagaggtttatgaaaataaaaaatggtgcataatggtatgtaacattaatggattaaacattaccaacactttttgaatgctattaaaaatggagctgaggaagtgaaagtaaaagccatagttttaatcgaagagttaaataaacaaaagaaaaacaagaaagtaaccaataaatctaatgtgtcaagctaatataaatacactgtagattcatga

SEQ ID NO: 68803 - DNA, 557 bp, Cannabis sativa
ttttgaccctttttcactaagacgatcccaaaaattgaaccctagctgaggatgtcaacatgggcatcaggtgaaaccctaggcggacaagttggcttccgggttgtaggttcgtgtaatttcagctcccaggccttgattaggtttctccatgtcttcatggtacattatattgaaagatagcaggttggattcaagttattgaagttctaacttccatttcggagatcccaaagtcaacttaggcataggactagggacccctcccaggtcgactgctatgactcaggtctacttaactctatgatgtcatccttcatgccacgtgtcaaaaattaatgtccacatcatcatggaaagtttttaggtaaagattttcccctaagtcaactttacacttgtgtggagttgacttaatgacgtgaaccagtcccgtttcgctagaaactacgagatgggcatcaattttgacactcttaggcacttgtatctattcttcaagcattcctgattgaattaggtctttgaacactttttcttagtccttgagaatttcg

SEQ ID NO: 68804 - DNA, 1225 bp, Cannabis sativa
cactatatatatttttctttttattaatattgttaatttttatttatttatttattttattttgatactaaaaaataaataaaaatccaattaaatattaatttaaaaaatttaatatttaattattttaattcaaattttatatattatgataataatttatattaattatatgcaattataattaaatataactataataattttaattaatcagaaaaaatataaattacacaattatcataattccaataacactcatatctattactaaacaaaatattagaagacacaatatttacattattatagagctcactaattcaacaaacagtacctaaacattaacccaattttttttttttaaaaaaacaagaagtatataatattataataaatatatatgaagaaatgaacctcttagcctagcctcggtgctttccatgtcgggacacaatatttagaataggaaatatttagaatgtaaattgtgaaaaatatatataatgtatgttattcatatggatattaaaaataggatgactatatcgtcatgtcaaaaagatgaaaaaataagatagtatttactgggaagttttataaagtaatagaaaatgaaaaccaggactttaattagtagtgctgatatagtatgtaaatgtgttttggtgaaatataatctcaaacaaattaatataccgttgttttattgatcaaaatcaaaaaagaaaatacaacccagaaatagaccattagaaccaaaaaaaaaaacctaaaacaaatcactttcacggcaggcttcaaacgaaccatgggccgagatccacagcgtgattcaaacgaactccgagctgagatccgtggcgagcttcaaacgctgtcacctgagatctttgtacaaaaaaaataaacaccgtcaccacggaccggagagagcgagagagagacgcacgaacaataaaaattagaaaaaacctatttaccttcagcgaggaggttcgtgcgcgaaaggtgaatgagagagagagagagggcgactgactgtggaggagaaaggtggtcgacgaggtgctgggaagagagaaggtgcgggtgcggctgcgagtgcggttgcgggtgcgggtgcggctgagaagagacgaggtgcgggtgcgggtgcgactgagaagagaatgtggctggctcagaagagaatgtggctggctgagaagagggaggagaagtg

SEQ ID NO: 68805 - DNA, 1704 bp, Cannabis sativa
gagagagagagagagcttttaattgctagtttcaatgtagtatacatgttataaatctatatatatattctttttaacatgctgtgtatgacttagtttgggtactttataaaattaattactttgttgatttaacaattaatatattttttatgagagaggaaaatggaatgagatttattgttattggaggattttaattaataatgaatcaacatgcacggtcaacttatatcaaatgggaaaatgagattgtgacaattaccaaacccttcagtcttcaccaatttcatttgaatataattactgttgatattatgtaataatataataatcaaataaagcagctttttttatttttgtgaagtgaagcatcaagaaagttagaaaactaaacatatatgtaatttgcagtatattaatgtgaatctggccttagctagctagctagagatcataagttgagatcatgagatgctttgatgtcctcatcaatttctggttcaaatcccaaattaaatagtatttggaggctttaaaatatgagaatgccggaattggttgataacctaacatttttttgtcaacacaaactataagtgcatgttatcataaactatatataaatatttatatatatttatgtattatcaaaggaatcagtcatgcatgtgggcaagatgcatcaccggccaacaccacctcatggttcattatatattaaaactactatatacagcttttaattaattaggacctactatgtatgaatttcgatcacttttcttaaaataaaaacaaaaagaaagactagtacatatatagatataataatagaaaagagagtacgttatagttggagactgaaatatgttgtacaaagctgatcgtctttcattatttttgcattcctataagtttagatagatatatgtgcgtgaaattataagcatatttgatgctacgtaggactatagtggaacagtaagaatgacgttaattaacttgttattgattgctacaaatataataatttatatacttttgcagcaaatattcttacatataataagaaaactaaaaaggttttatatactgattcagaaaaaaaaaaacttatttacatgtttgattaagttgttgtaataaaaatacattagcaacattaataaatatttaatagctagtcacaacggatttttagctattatataaatataacataagtatgatggtgctctttttacaattttcttccacattcacaaacatatatcctaccctacaaaaatattgttttttatgaatcagctagatttactccaaaaaaataattttacaaactaattaatagcgtctttaatcgaagctctatagtaatagccgctacaaaaatattacttatagttacaataaaatttgtaactaaaaataaaaaaattatgactaaacaaatattattaatatgttatcattatcattaaaataaaatcgttgctaaattattattacatacaataattataatttgttaattataattaaaattaaattaataacaatttatatataaaatttactttctagtatcatttagtaactatttatagtgattaaaagtattatttagtcatgaaaaatttatattgttattaccactaaaggatatttttttaagctagctagcaatcactacaaaaaaaa

SEQ ID NO: 68806 - DNA, 1367 bp, Cannabis sativa
ctagaatataatttacttggtcccaattgtattctagaatagaggttctactgtatcatactatatactaagagcgtatataccttttacaacaaaaaattcgtctaatctttagttctatttccatcagtatcctttatgtttttgttttttttgtttttttgtcttttagctatgaaagtaatacatatcctaaatatattttacttataataaaaataaattattaaattattactataaacaattatatgtattcatttacattgcccatttatattattacaaatagacgtatataatattattatcatagtaacaaattaatgttaatgggtaagtgtatagtatatttacttttaacaaggtattttagtagatcttttatttgttttggtatttataagagagtattttatttttttttctttattattgtgtatattatatttatttaagattatttgtaaatttttagaaaattctgtgtgtacaatatcaaaattaaggtttagatattttgttgcacaactatttttttttttatatgtgtatagtaagtaattgtttaaactttattttcgacactatatattatgctaaatttttcaaaaatttataaataattctaaactactacaacatatgtaattatgaaaaaaaaaattaaagtatttttttaattttaaaatatataggagtgtgtcttataaaatgagtgtactacaaaaattaccaatattatttacaattttttttattttttttataattacataccgattatattaaaattattcaaacaatattacatataaatacgtttttttataattttttttaataataaatacgttttcaaaataaaaataatagcacaattacaatggttatatcaaaattatccgaacactataaatgtctagtatttgaaaattattttagaacattcacattgtagatattgttattcatatatgaattcaaattaattaaatattattactctcatataatttaatttcaatccaaagtttatggtattattaaattaaaataaattattacaatttcaaattcaataaaattatatatgtagcactatttgttagaaattttagttaattaatttttttaaaaataaaatttaatttattcaataattatagatataattaatattatttattttaaattatattaacaataattttttattattaaaattaaaaataaaaaatgtcagcacatcccttggatgtgctttgccactagtatatacatattagagggtatatttacgggtgttaataattatatcaattaaggttttgaatataaaatgggaattatgactaagagtaagg

SEQ ID NO: 68807 - DNA, 1013 bp, Cannabis sativa
tttatttattttatttattttaattataagatcagatattatttattttattattaaatttgaaatgatcttattttgatattaaaatactaacaaaacttactaataatctagttagaattttaaggtttgtcaaccatatcagtttttaaatttgttattttaaaatattttttattaaattaaattataaaattagaaaaatattagtttttgacattttatcttattagatatttatcataatttttatattttttttttcaaaataacatgaaattttgaaaagttgttaactttagtttgaatagattttttagggttagctaaccataaaattttcaaacttaagatattttattttattttaaataaaattgataatatcctaaccatcaatatatcctattttttaaaatttatatctcaatttttaaattaagatattatattacattatcttattagatatttaactaatttaacttatttaaataaactaagaaattttaaaaaaaatagttggatatttgaatttcagtttaaattttaaatatttaggagatttgttagattttaaatatttcaaatattctctaacaatctaaatttaaattctagttaagatatttttaaaatattttattttaaaatagaaatatctaacctactttctagaaatctgttacatgtttgtttatttatttaattatttattcaaactttttaaaacaaacctattatttttttgatctaaaattctatgagtaacttgttgacagatccaatgatctgatttaatcatagtccaattgtcaagagatcttataaataatttgtaacatgtaaattttgtaatttatttcatctatgataaacctagaaacgtgatagggcccatccaaatcatttgatatgtacgagcttatatgtttacttttgggcttacatgtgttaacgcagattttcgttaataaaatttgagcctcacagtgacaatctcacacagaaaa

SEQ ID NO: 68808 - DNA, 542 bp, Cannabis sativa
ttaactgtttaaaatgatcgaattacaattttagtaactataaatatttttacccctaaacaaaatttatcaaatttataccaattacaaatataaaactttaagtaattatgctgtaaatattcttatatatttaatttaagattatatgaggatggattaacctggaggtgataatgtaacattgatttccttgagatgtaacaagagttacttgttctgaattaacagcattagtaatctgtcataacacacaacaaaattggttaattgtttttttttttatcataagaaaaaactcaattatataaattatttgaaatttttcaaagtaaattacagcattgacaaaagggtcataaatattttgtgcaagataagccaaagttgttccagaatcaattatggttcccctattggttgatgttgtaaactcttctggatcaatatgtaatactttgtcattaacagatatattctgcaaattcagattgtaatgaggcctgaaatgaaattttttaaaattagtaaaaagtgtcata

SEQ ID NO: 68809 - DNA, 676 bp, Cannabis sativa
ttgattttctaagtatagaaaatcaaatttccctaatataatttgactcaccttgctccactaaaaaatgtcaccatcatcaaattctagcgtgagaactccaacagggtcaagctgaattgttctttatgtaaaagaatattccctgttgatatataaatattaatattttaggagataatgtaataattaataataatatattgaattttttggcatacaaaatattttctatattttttctaaaaaaaaaatatttgcactacaacaatgtgtagtttacgatgtgaatttatatcaccaaaaaaaaaaaacaaaaaaactaataatttataaaagtatgcatgggtattacttataaatgggtattttattattggtcattagattaaatataatagttgatatttacaattgttaattaattttcaaaaattaatattttttattttaacctattagacatggcattcattttttttctttccatactttctattcctttttcattcttaaattaatgaaactattgaaaaattaaagtaattctggatggaactattataaatttaaaaaaataataaaaaccacacgtcgaccctcctaaactcaccatttctggtcactctcaagatttctacactctggtccaacactcactctctctatatatata

SEQ ID NO: 68810 - DNA, 768 bp, Cannabis sativa
ttaaaaggtgctgatagtttataattggtttgatttattgcaatacaataaaaaaaaaaaaaaaactaataataatgtaggttaagtttgttgccggaaaatgaaattaaataaagttttgctcatatatcaataagaaatgggccaacagattaagctcatcaatttattgggcccaaaaacattatctcaacaaaaagtacaaactcatataaagagcccattatgccattttagttgatttttatgggctataagttataagagaccattggctggtcaaagatccaatattccgaaccagctcctatgtttaaactcaagtcattagtcaatagtagtgttgaaaatacatagagaggtgcctcgtatcaaaaatctacttgatgttgtgatagttaggtagtatattttattgataattatggcagttaaaaatgaaaatatatgtttgacactttgtgttgaaagtcttcttgacaatgttaaaagtcaggagatgttttcggtttggtaatagcggcggtgcaagatgactttgtttaaaaggagacaatgtagtccttggtttgagaggaggattattgggatatcaacctatatcccacattgaaaaaatagtcaagagttactttaaatataagtgttttacttactctattagtatgagatacgttattatgttagatcaaattttatagtacgcacatcttttgtttttatcaaaagaaaatttatattactcaaaataattatctcaatttttat

SEQ ID NO: 68811 - DNA, 1127 bp, Cannabis sativa
agtaaatctgactatgttgaaatgagttttatttagggcataaaacccaacaatgtctatatgtatggttcgaaatatcggcataataattaacccctaaaaagctcttttgggaataaaaaaggtttcattatggaagctataaacagaatttttggtcttttctctttcaaccatgagtactctctttgacggtttcattttctcaagaaaattaaattgtgtatcttttcaactgatgagctttttaactatccttttgctttaccagtttgtccaaacgtaaatctgatcaatggttttcctttttgaatataacaaggatttttttaccattgccttcttcttcatctcattcgatatacaaatcaaagagctaaaaaccgtttttttactcccgaagttcttgcatgcccagattgtcgttgaactttttccttcgtgtgattaatatcatttttttccaacctcgttcaagttatattttggaatcttggtattggagattcctagttagaaaccttcaatgcttccagaaaaacccaaaaaccagtaagtttctacactttgccctaaattatcttcttgtcatatatttgttttattattggttttttgaaacactctttatattattttttcttagaatatataaagtggttgttgctttggcgattccctttccttaattatcttctccaaaattcttgaacttataggatattttctttatcctacaaagaatgtttatccctggtttgaaacttttgagttcagattttttagaacaggaaaacccaaaacttcatgccttacctttcaaaccgggactagaacattcaaaaataaaattagaaataaatgacgagagaaaggttattcaatgagaagattgatcgacaagaagcctttgcttgatttagacgttttatagatgaggttattgatgggaaatatcattttttgcgagacgcggcttggcccgagtatcctagtttaacaaagccattatttttacccgagtatcctagaatattaattatgatttatcattttatggagatttatttgaattcaggatgtattatttatgccatatataaaattttgcatttttgcatgttttg

SEQ ID NO: 68812 - DNA, 674 bp, Cannabis sativa
aattaaataatacgttttggtgttgcgaaatttactcgacaacaaaattaataataatgattaagtgcatttaaaatagaaatatttacctcacaatacgtattttttaaaatatttatctaaatgtcgtccaataattaaatactgtcaataccaagactcttttaacaaaattggtactcgtgtacctaaacaaaaagtcagcctttctttttctttttgctagctcacgagagtgagagtctttagactccattcccttttttttttcaatttatttctcagctttttcattgacatttcaaaattaaattaaatcattttttaaggaatatataaattaaatcagttatttttaataaatacaccccgtttactttcttttttctttttgaacaagaccccatttccttaattaaattgagtaactttaaatcgtaaaagaaaaataaatagcaacacagaaaagattattcatcaccaaaaaaatttagagatcatatatagaaaaatcaaaatggtgattacctttctttcaaaaaaaaaaaaataaaatcatggtaacaaatagagattaaaagggaggttagattttccaattaaatattgaaggaagaagatggtctccataaaaaaatataaggtgtacttctccatttaaacaagacctaatt

SEQ ID NO: 68813 - DNA, 777 bp, Cannabis sativa
  modified_base (30)..(52): a, c, t, g, unknown or other
  modified_base (164)..(171): a, c, t, g, unknown or other
agatttactaataagtatgttgattaacannnnnnnnnnnnnnnnnnnnnnnacaataaaattaaacacataagagtttaaaaaagccttactgtaaagggaaatcatagtcctccatatactcaacccatcttctttgcctcaagttcaagtccctttgagtnnnnnnnnacttcaagctcttatgatctaagtataactcaaactttacgccatacaaataatatctccaaatcttcaagacaaagattaccgtgacaagttctaggtcatgcgtagggtaattcttctcatgtggtttcaattgtcgagaagcataggcaaccaccttgccattttgcacgatgacacctcctaatccagttcctgaagcatcagtgaataccacatatggttcctcattattaggaacagtgagaacaggcaccgaagtaaatctttccttcaattctctgaaagctcttcacaactatcattccacataaacttttattcttttcttgttaactttgtcataggcatagcaatccgagagaaattctccacaaagcaacgatagtagcctaccaacctaagaaaacttcaaactttagtgacattctttggtctttcccactgtagaatagagtctatctttgcaggatcaacaatgatactatcttaagatattacatggtccaagaacttgacttcagtcatccaaaacttacacttctctttcttagcatataatcgatgatcttgcaatgtctataatactgttgtcaagtgttcagc

SEQ ID NO: 68814 - DNA, 727 bp, Cannabis sativa
ttggttttgtggaatataatgtaggcatttataaaagcatggaatgccacatgtaattcaatggcagagtattctaccttgttggttccatcaggccatacatatctggtccaacccctctcttttaatggcccctgcaagtcccctaatctcttttttcaggtatatatatacatatatatataactgtataatttcattattattattattattgtcattaattaattaaaagaaatatgtattatatattattgtaggtagaaggagggattgtagcaccaaagagtcctaatgaatggaacacaaagaataaggatttgatatcatttgttgaagttgttgggctctctctaaatgccacagccactattgatggccgtggtaaaccatggtgggatgcctcttgtagagaccaccctaagttacaggtaattgctataactacttgggtagaactcaatcctaaaattaaccgaattgcggcggcggacccaagatttaaattgagagtgggcgatacttctttttttataagtaagggggtaaagtaaatatgcttttattggaattagaagtcataatcttctttgattcatgatatgacttttccattataccaaagcttattttacgtatagatatcacttttatttataaatatatattgtaattaactaaaatacatacatatttttttttccgatttttttagggtgggcgactg

SEQ ID NO: 68815 - DNA, 690 bp, Cannabis sativa
ggtccatcatattttatttcctttgcaataagaaaatgaaatggtaacatcttgtatgaagactgtcctaaaaaatttaacctacacatgttaaaatattacaaaatctacacaaaagtgacaaaagtatataaataaaagaagaatttgcttggtagggttgtttgtaatgttgggtttgtaatgttgggttatcttgtttccttgtctcagaggcttggtctggtccttgaagttttttctattctaatgcttttttcaatgcttcaaaagaaaaaggcctagaagagttactacatcatgtagcatacctagaaattgcttagtaaacaacttaaaaccaaaccttgagactaaaaaatatgcatagacaaccagagctatctgattttcatgttcttacagatatgctgacaacctatattcaccgaactcctattccacaatcatgtacagaaactctcgttcaaaaaaaacgggcaatggaatggatttccctgtaaagaatctgctttataaaaacgtcttattacctaccatctttttatgatgtattcatctcacaagagattgttactttactcttagatccaaggttcgaactttggtctcatcccaattcccagcccctcagcactagtccaaacctagtgacttgacaggtgagagttacttaattccctatgaatg

SEQ ID NO: 68816 - DNA, 900 bp, Cannabis sativa
ttttttccctaaatctgtcaacttaaacattaattaaaaagcccaatgaaatatttaagtaagcccaaataaaacttaaaaataaaaatcctaattctatcttcttcctatctccctctcttcttcacagcagctgtgcagctgcttatttcttcaaccaacagaggaaaaaaaataaaaaaacttgttgcttgcttccttcaaatgtgttctagaatagtagaatttagaattctaattctagaaatataattatctttattttagtttgagttttatgagacatatcttttggtatgtttgaattttatgagacgttttatggttattatttttatgagacattttatagtatatttgaaatttatgtgacagtttattcattcttaggtgctctaaaagtattgattccattaatttttgaggcttacgcctcgagacttatgcctcgccttataaaaaaaaacgcctcaaggctcatttgcattttttaaaacattgctagctataagtagaaaacatacaactgaagcaagtacccaaacaaagcaatatgatgagaggggtttatatccataccataaccatggtaaagaggctggtaagtgatgctaacgaatgaagtaataatataactaatccaccaccctccactgtctctattgatcttgcaagtagattaggtgtcaaagcctcaaaatcctgaaagaaatacaaatagtaattgaatattgaaaagcaaaagagttattacaagtgttaataatttataagttataactaattagaggcaaatataactcaatcaggtgagtatatttatgttccaacaaaataaaagaggtataaaatgtaaatagcttcttaaaattgaaaatcgttgttttctccaaaaaaaaa

SEQ ID NO: 68817 - DNA, 513 bp, Cannabis sativa
tttgactaataaaaatggatgattataaattaatttgcagtccatttttgaaaattgaaaaaatatttttgtttattgagatttctaaaacagaattaaaagaatattaagttgaataaaataagattaagaaatgaataagatgagattttttttatataattagggtgttaaaagaattttaattcacgaattaatattattaaccacttggtaaccctttgtaggaataagaccgtatttataagtattttgagtaatgggtcaggttaacctaaactcattaggatttgtaaagggaaatttacgcttggtactgtattttctacttttatttcatttttactattgaatgttatttattacatttttactatgtcttaactttttgctaaataaatttgttattccattttaactgatacatgtcacactatagattatttatattcatttttattattttaatgagtgtaaaagttatgatttgattgattaaagctgaacaaactt

SEQ ID NO: 68818 - DNA, 756 bp, Cannabis sativa
tgtacatgtgtcaaatttatattggtacacctaatattattattttaaaaatataaaaattctttcaaaatttatagtatttttatttttttaaaaacatttttttattttttataattttatttaatttttaaataataatattaggtgtactaatataaacgtgtcatatgtacaagagtgtacacataagcagcccatagtgacagttaattgaatgacaccttaaatttgctactagttcagtagtttggaggattttaccgccaaaacttgaatttgaagggttaaatacaagtgaaatagtagttgggaaaattttgatggaaaaaaattctaatataaatttaaagctattgacttgcctatgtaataaatgtatttatttaacgaaaattattgatttacggtcttttttaaaactaataccgttaaatcaattaattaattatttttttaaaaaaataaatattaatttaaaagtatcaacaaaattaaataatttttttttttaatatatcactcttaatttaaatttgtattaaaccttagtttaattaattaatcatattatataataaatttattaattatattatttaaataatttaaacttatttacttattttattgtttaataaaattagttagatttattttttataagtaaatttaaaatttgattttatattattaaaaaaaatataattgaattatattaaatctaatttaattattattgttattatttaaatt

SEQ ID NO: 68819 - DNA, 2020 bp, Cannabis sativa
agccttgacttctgtcatggtgagggagtctttcccatacagaatagtttcaacaaaatgttcataggctttaggtaaggaacttagtagcataatttcttggtcctcatcatcaatcttgaccccaatgttgcataaatctaggatgatcttgttgtagtcatcaaaatgccttcttaactctttggattcatccattctcagagtgtagagtttcttcgaggtataatttgttggctagagatttcttcatgtaaatctcagaaagtttttcccataatcacaaggctttctcctcacttgggacttctcttaaaacttcatcacccaaacttaacagaattgcactgtgtgctttgatttctatttcgaacttctttttcttgtcatcaatggctgctagagcttctatatccaaggcctctgagataccttgatgaaccaacaaagctttcattttgattctccatagaccaaaatcaatggtaccattgaacttgtcaatttcgaactttgagctagacattcttgatcttcttagtgagttctttgaagaactaatttgattcttgagttggcgagattaactgttatcaccgcatatggttaacactctggattattaaataattagggtttatgtatgagacttaattattatttataaaatgcatattgtggaaatttatttaagttatttatatctatttattatgctatttatgtaatttttcaatttttgtagacgttgggcctttagagagtcgcatttatatgttttagaatattattagcaagatatcattgttggatattggaggtgttggaatttttgggatttgaaaatgtctaagttacccttgggagtttgtaattttttaatgttggttagaagggcaaaaaggcctttgggcaagactttatttgtcttatctaggcttgttttagtgctggatataagctaatgttttaaaataaattcttttatttacttagattagaaggaatcaaagaaatttagtgaaaaagcattttaccctttcttcaactctctctctctttactttcgattctcttgggcagcagctggggttggtgtaattggagtggaatcaaggaattttagtaataatagagcgttttggccaaggttatccttccttcattccttccttcttgattttttgtaattcaggttagattttttatatgagattatgattctagatggttgtgtgtattgggttaatatgttgtttaattctggagttagaagttaattattcttgctattttgagctgagatggaggtttgtgttgagaattgttcaagtttaaagttagagaacctaagttaggtctctaatggtgttttcataaattgagttgtttattgtggtttgacttgatatgtgttatttgggtaagcaggtatactggaagtttacagaaagtttgggatagatttgaatcaagggggggtttgtttttgggttcccaacacagaaccaggcgaccggttctgggggaccattagaaccggtcgaccggttggtacccaggaaccgggcttccggttgggaaccggtctgccggatggggctttttcccgaaccctagtttttctcgtttttgtgttgtttagggtatttgtttatatcgatagggttttatccttaattttaattttaaatccccgataagtgttttagtgtgtctcttattaattttagtgtgtcacgttgcgtttccactcaggctggccggcacgcttgagcacggaacgaggtaagatagcataataacatatatatgaatatatgcttgttttaaatatttaaactactaacactaattttttatgcgattataagagtgttagtatagtgtaggatattggtgtggttacggtgttaccaatacgagtaccaggcggttcgtcgtgcatgtggtacaacacttagtaatttccgcgagtacaataatggctctaccaacacgagtacagggttggtacttt

SEQ ID NO: 68820 - DNA, 575 bp, Cannabis sativa
ttcgtgaagaactccattctatcttgcccttgttgtgaacaaaaaaagtggggttgtgccctagttctacactcccttcctaacatctcttattaattttgaactttgttcacggaggaactaaatttttgacgagccaacccttttttatgtgcttttcctgaaaggaaatgagttgctccttttggctctattatatcactattgtttatgggtgtgattaaatattgcgtcttacataatttaatttaataagtattatagaattttgttaacaatttacaagattttaccttaagtgacgttgggcactattgatatctcgtaacaatgctcaataaaaatatatatatcattaataatcgtcaataaattagatatttcaaaactaataagtaatagtattgtatataaaaatgtgtgttaaaccttataattaatgattaaaggacaaaaataaaaataaaaaatagcactaacaaatttgacataaattttagcatatgtaaaattgttataatttttagcatgtgtcaaatttagtagggctgaatatttgggttggatttgactca

SEQ ID NO: 68821 - DNA, 883 bp, Cannabis sativa
gcgacagttcaaaaccgtcgctaatgtgagtttcccgacagtttaaaactgtcacctataactgggtataggcgacggtttatcaccgtgccctatactataccctgtcatctccaaagaacgtgtgggagacagtcagagccccacgagaaatttgaaggcctcccaactgctgtctctgctcatattactttagtaatgccaagaaaaattctgtgcaaataatgaatagataagaagacaatgggtcaccttgacgtaatcctctcctaggaataatagagccaaataaacggccatcatgagaaatctggtacctagccgaagtgacacatctcataaggagagaagtggtatgattgtcaaaccccattttgatgagaacatcctaaaaatagccccattccactctgtcgtatgctttgctcatatcaagtttgagagccataacaccatttcttcctgcagttcttctcttcatgtaatgcattatctcaaaagtaaccttaatgttatcggtaatcacacggctagggataaatgcacattaagtttcaaatataacctggttatgagtcgattaaattctattggaaagcaccttagagaagattttgtatagtacattacacaaagagatgggccaaatttcagtcatcgaagtaggctatttcttcttgggcacaaggaaaatattagtgttagccaattgatctgcaaaagttccattttgaaaaaaatctctagacaattgaaccacatcatggcgtaaaacatcccagaagttttgatagaaactcggactcatgccgtctggcctcgaggacttatctgttggagtatgttttaccgggatctagatttactacaatgtatgttattt

SEQ ID NO: 68822 - DNA, 860 bp, Cannabis sativa
gttagatcagtacgggagggcaagttcagttgttacccccctgcgcgtattgtaagcagtaatccaaggaccagtggtgagactagtaccagtagttcgactagtatgggcgcctggagccttgagcatatcagcgcaggggccacacttcctattcgggactatttcaaacaatgcataaatcacattggagttgccccattccagctgactcccatctcctacaggattctctctagtcggaaagtcttgtacaaaattctgaattgggggtgtcccacaccagtagagattgagtacatttactcagttaaggccgttccatcgaggaagaacgtcgtagggggttttttctatctcgactttcattctagcgaacctaaaattattgtagacttgccaaataaagtatcctttaagaacaacttcttctggacatctggtctttctcccatcggcacaaccacgtttcgaaatctccgtaagtgatcgttctcttcttgctcatttacatcagtctttgtttttttaagcttttgaccaatgttttgtttgttttgacaactcacctctacccccgagatggttagcaggcacaggcgcctggtaactcttccctacggtcttcgatctttggtcgtgcaatttccttttgagcgaggttaacctacgatcggtggccttctcgctgacagaatatacttgtgattacaagtttcccaagtattcttcttgacagcaggttactgttccgagcgtggattaggcttgggatcgcctggctcaagcacaatatcttcaaaaccctgccacttgggaatccgatgaaggagcatcccgaggtaatcaatgtggttggt

SEQ ID NO: 68823 - DNA, 1166 bp, Cannabis sativa
  modified_base (1131)..(1133): a, c, t, g, unknown or other
aatacagtaaacagaagtatcattgcagttgatggcatcattaacaagaaacccaacaactcgctccttgtcctcttctctcccatacacatgtggctgagtaataacagaaccagtctgacgactttctctaacccgatttcttctctccacaacatcaacctctcgcaagtgaaaattaactcgttctttcccgatctgatctaatctatcccaaatctctttcatccttttagcaatattgtgacgaaagtaaagatgcttaggactcaaacaagataaagaagattgtacctttcggttccatgaatggtcttgtgcaagaccctcctccaatcgaaaggcctcagcttcacaatcatctagaacatcctccaactcagcagaaacatcttccaacttttgcagccaattcttgatagcacgattagttgattgtctctcctcagcatcttcaatgacagcagaaatggttgagagcatgctacacatcttctccatctctttcgccacacccaaaacagatccaacttgcttttggatgagtgagctcagattctcaagaacaacagtgagaacagcttcagccatgattcctaatgatcagttcagaaaaatcaaagtttgaactcagagaaagatgaagcaaagcaagcaaattggtcagacttgtgaggaagcagcaaacaaaagttgattggttttggaaacaaagtttgaccttacgtacgtaacccaatccacaaaaatagatttattctccttcacaaatttattctttttatcacaaaaaataaaaaatataaaaattgaaactttattatacgtacgtacatactgatataatcaatcatatgcatggtctctactatatatatactaatactaatactgatatttttttgattgttttgtcttgtatgaaaaggagataaatgaggactattttgtatataattatttattgaaaattacaaggaaattgtttgtgaaatttgttggaaagctgaaacacatttacttactacaaattaaattacaaaagtcaagtcaagtcaacagataatatagttaaaaaccgctaaccacaagtaacgcgcgtcatgggttaagccactaaggctagcttannngtgagggagggatgggaaaaagagagaggtcat

SEQ ID NO: 68824 - DNA, 579 bp, Cannabis sativa
ctataagtataagtatttttataagtataaaaatttagaataataagaaaaaaagataaaaacaaaattttataatgccacatcaccttatttaacattagaattagaattatatagatatatagatagatacgaatatatagatagataaatatatataaataaataaatatagatataaatataaagtgaaaataattatattttagttataaatcttataggtataaaaccaccaaactcatcctaacacatatactatgctagaacgttaaatagaatgtaagagtcttaagaattaaatgtcaaattcaaactctgttatataaaatctttaagttattataattgttaaaaaaaaatataatgattaagttatggaagtgtgagagttttatggattaattgtcaaaataattttcacaataattatgtcaaaataaaaaattaaagcacattaaaggagaaaaatataataaaaactaatgaaataatatgaaaaattgagagagctaagattagaaaaaaagatcatatagattgccacctcaactccttcaaaccttcttttatatatat

SEQ ID NO: 68825 - DNA, 696 bp, Cannabis sativa
tcaagaagcttaaaaataagacggggtagtatgcaagatgattgcccgggcaggcctcgaaattccatcatcacctgacatgcctcttatttcagacataatagctttcccttttccgagaacgggagaaggaggccaagcaggagagatgggctccctaatgtgaattgcatgttcaataggcctgggctgggccagaagtttcttcctccttttgagcggagtcacctgctctttctcagcttcagcttcaagattcaacgctcctgagcatattgcttggccttggcacctccattcaacttagcttcatgcttgatttgaatgagttcattctccgtatgagcttgttaagcccgtccagcactagatttcctcttcctctccctcactgacttaggaatgaaatcctttagatagagccgtacttcacaaaggtatcctcggaggtcaactggatgatatttcggtcttcccccggcagtcgagcaagtttttgagctctatctctaagagcaagagtgaggggagggcggtgatatgttggaatctgctggaaccgagtacgggtgaagctcgcgccatccaccaataagtactcatcaacaacatgcccaattttgctgatggccgaatcatcggtgcccgtcaaccacttgaagtctggttgagagaaatagaagtaccccgacctac

SEQ ID NO: 68826 - DNA, 1432 bp, Cannabis sativa
gtgggaattaacaaaatattgtccaatcttaccaatatagggtatttagagtttaagggaaaaatttccccctaatgtaagcataaaatttcaaatttccctattaaaaaagaattatgaaggagctctaaggaatagtaaatttgaatgaatctttaaaattgaaagcaatttagaatatgtagtgtgttttttcgtttatttaaaaaagaaatcgaagaattcattgttataaagcatcttgtgttctaaggagaaaaaaaattacatatattccaggactgacttttttgtcttcttttatttaaaagaatgttcacttcatcagctattttgtcttttaattttacaacttgcacttcaaagcaattgatatttgaaaacaaaaataaagaaacaaactcttaactcttaagcgtatgtaaaagacatagactttaactataagtaatagtaataagtaaccataacaaagaagcaatcatgtatacatataaattcaattaagtagtacaaatgtgttttgtctttgtcaatactatatataaaaaaactcgcatattatatagtgtttcttataaaaataaaaatataagttaacaatgattaaagtattgtgtgtaatcatcaaaggtggttcttctgtcgcattcttcccaagtatttctgagacaatttgatacattttcactctatgtatgatcttacattagactagtcactctccatagtgcaagcttgagagagggtggactaaaaggccagattggcaacactagataaaggaaaaacaacttgatcgggttctaagcgcgcccgattgggcaactaactcagtttagcaaggcggctatcaagaccttaagcacgagacattcggatcatccttgatcctttccactttttagatgcgtggttgaggagggacacaaggtccgagagagtggttgaagaggaaaactggggtataccaagacaaactcaaaacaactaaggactcctggccaccaaactatagcactatccaaagaaagagctagtttttcaatattatgagctaggaaattgaagaacattacaatgcttaaaaacaacaaaacaatagacaatttatctgatctattcctcaaagttgttaatcattttgaacttcaataatttttcattaaaaaaaatgagcgagaaagattaggtatccactttgaaatcatccaagtattatttattatcttgatcgtagtgaattatttattttttatgttgatggcaggaactagaaataataacttagcacgtacccaagatagtaagactaacaggaacataaacaaatattatataataacacaccagtgtcttcttggttgtgaaaatcaaactacaaattaaataatttaaattaccaataagctaatcctctcgatcctagtga

SEQ ID NO: 68827 - DNA, 587 bp, Cannabis sativa
tgactttgtgaatctatttatttcgaatgacattcctatataagtatggcactaatgtccaagtacctatctttttaagggtagtgaactcttgttgcattgatttaagccattgaggatgtttgagtgcagttgtagtagatctaggctcagaaggaatgaaagatgtcttcaagggataccttgtggccaaatgggtttttggctttataatgccattaagagaccttgttctcatggcatgagtcctagtggtgatgtttgtacctgtattgattggggcagcagtaggtgtaatgggggttatgatatggtagcaggtagttgctcagtctgaggttgagttgaggttgaaggatttaggacaggttgaggtgtgggatcatgagttgtggtagcttgttttaggagagaaactgaaggtatgttggttgttggagctagaatatttggttcaagtgaatgtgtttgttagccatggagaggggaaggttgagttaggacagggaatgaagagtgaccaggtctaggttgttgagaaacttgggctttagatgtgtggtgagaggggttataaacttggggtt

SEQ ID NO: 68828 - DNA, 1272 bp, Cannabis sativa
  modified_base (971)..(976): a, c, t, g, unknown or other
caaatttgtaaaattttgttaacagaaaacaaattctatacttacaattataaccgtcctttatttaaaatagtatacaaaatatttaaattatgcactaaaacaaaatgaatggttaagttttgatactaatatgtatagacaagagtcatatattgatttcacagagttttggtagtcaactatgggatactagttttgtcattcaagctttggtggctactgatctcactgaagaaattggagaaaccctagcaaaaggtcacaacttcgtaaaagaatctcaagttaaagacaatccatttggcgacttcaagagcatgtaccgtcatatttctaagggatcatggacattttcggatcaagatcagggatggcaagtttcagatacaacagctgaaggtttgaaggtatatatatatatatttatttatatatataaatacctcaacatatatttataatcctatcattaacttaatatatattattatacagtgttgcttgctgctctcattgatgccaccagatgtagttggtgaaaggattaatcttgagagaatttatgattctgttaatgttatactctctttacaggtaatattttctgtaacatgtgaaactttctaattataaagtattatactatatcatggtaccatatatgagtagagtagctcataacattgattatcaaagcgtgactctctgatgttcttttataagatggttatttttgctcgcggattttagatgacttttttttaacttactatatccattgctggttagcactataaaaaaatttatttttaatcacagtaaaacttgtaattaaaagtaaaaaagttgtgacaagttataaatcatcattcctatattgcaacaaaaaattacgtggctaaaagtattagtcatgaaaattataatttgttgcgactaaatgtctttagtcacaatacttattgtgnnnnnnactaaattagtaacaacttgtatccaaatagtatgttttactcacaagtaactctttattgtgactaaaagtcaaatttagttacaaaaaatttatattattactaaaaagttgttgtaacgccccgatattttgccttactttacaaaaataccattttaaatacataatttaaagataaaaaaaaatccttaaaatacaaaaatgagttttagaaatcaaaatacaatagagaaggatccttcatttgtaaaacaaaatacgataagtaaatgattttaaataatatatttcca

SEQ ID NO: 68829 - DNA, 1606 bp, Cannabis sativa
ttaatagctagctctatcaatctaattatataaatatatatagatattgtagaaatcttattgtgtatatggagtggcggacctaagtctcagggagtccctacttttttttttagcatataatttttacatgaaaacttgataaaaatttatatttttataatattaaatataatttttagtgaataaaataacaataaaatttaaactatattattattaatataagtttaatcattatatatataaataaattttttatataaatttaatcacattaatatattatttatcaattatcaaatttaaactatatgcacacataatttatgtttcaggttcaagaaaaatattattttatgttgtaatataattttagaattgtgggcacgcaagtcattggctcatacataggtttatagtaagctataaattattaattaaaatttaattcgaaaatttttatttttctttcttatttattgtgtaataattccaattaaaaacaataaaatttaattaatgagagagaggtaataataataaaaactagagaaaaaaaaacgtgtaagattattttctctttcagccactaaagtcaagtacatcatcctttcctaactaactaaccaaacaaataaattaactacacttctaaagcgacgtcgttttatacttaataatatatatatatatattaaatatataacacataaatttattattacaacatcatttaataaatgaaatcttattatttagaaacttacccaaacaatgaatattatcatatatatataaccattatagtcttcaaatatcaatctctctctaaaatgccatactcaacttcctagccttgatctttaatctctttctcttaattccatggccaaaattcccaacaaaccctttaaagatcatcatgataatattaatcaatatacagtttccagtaacaaggccagaatttcctcttcctctagaaataataatttcttgtgttgttttggattttcagggaaaaaactttccgggaaaataaattcccctcaagaaaatatgatcatcaagcaatcaagtattaatattaatgatacaactaagaataagaagaagaagatttcttggccagcaaggtttcgcaaaaaaagcccaactggcataaaaaccgtaccggtggattattcagacaaagattggtcgaaaccaaagtcaaagtcaacagatcctaccgccgaaaactgttccagtgatattcagattgtagtcccggccgtacacgatccgcccccaaaggaaaaaactcatcaagatcaggtattaataataataataatattatagttataatttagttacttaattagagttttaatcactgtaattagtgcttaatcttttttatttaaaaggttcgtattaacggcggcaacctcgaaaatcggaaaccctcaatctcgggcccactgcattccccaaaaggcgacacgggtcaaagtcgattctcattcagtcggaaaatcgaagccatacgaaacgggtcgagtcaacccggttcgccatcgaacggaaaatccaaactcgggcgagcctccgcagtcat

SEQ ID NO: 68830 - DNA, 928 bp, Cannabis sativa
tttaagccttggccctcccatggtgtttgtcatgggggctagccagtttttagggtgtgtcctaggatcttgtccagttaatgcatgggtcatttgaccctgcctggttctttcaaagatcaagggatcctgcctggtcctctttgatgtcgtgggaccctgattggcccacagctttcgtcccaagtggctggccagtttgttgtcctttttcgacctcggcaagaatattgtcatggccttgcaaacctatacaacctttgtcttatatgtggttcccttagaaactttgtatgatgctttatggtgagtctattatagtcaaataatcaacttaagactcaacacttgtccaagttgttacacttgaaattgtacttcactgatatctagtcttgtgcaataaatgaacaatcatataatatatactcgcgccatcgcactatactctatgtgcttagctcactgtcttacctaaaatccaatgtatgaggagaatttctagtccataggtgatcccaacaagtattagtattactagtcacaatcccaggtttatacaaaatagggttaatcctaaattcactttaataataattcacattttggactctaactctggaccaagtaatagagctcattacgggctttccaacagtataaagaacatccaaaatggagcttatagtcaaaagttatggccaaaacatgtttacaaaaatccaggatcgacagggcattaacaccgcaagggcgccccttataggggtaaaatcccccgtaatctgagcttatgaggactgcgcggtgtccatgcatagggttgcaatgcctaggttgaaaacacttaaaaattgccaaattttcataccaattcaaaaccatactaatacctactacaaagatggcacacaagcctcaaaatcaa

SEQ ID NO: 68831 - DNA, 581 bp, Cannabis sativa
agagataatgtgaaagaaaaaaagagatggatgagtaagtaggccaataacagaagttgaagatttgcagggagagagagagatgggaaagcaactaatctttgcttcacccgaaagcttttctttttctcagcctttatgtcgtcttcacaatttgttaataatgtcattttcaccataatttttatttttcaaaaaatgcccacttttctttcgtcgttcattttcccatattaatattttcttcttctttctttctttatttctctcatatgagagctttaactccctctctctctctctcctactttttcccgttgttctttcagctccttcatcttgttgtttcttaaggttgggagcttttatgaacttttttcttctttctttctttgaatatttttctttgaatatttaaaggtgaagacttcaagattgatatggtaaaagcttaaaaggtttcatcaccttaaagtatttaacatcactttttttgagttcaagcaaaaagctttataccattctttctaaagcaaaagcatagtacaaggttgtttcaggtacctctctctctctctctc

SEQ ID NO: 68832 - DNA, 681 bp, Cannabis sativa
gggtgggcctgggaaccaaggcccacctttaaaacgttttttgaattgtcctccatgtctccttcttggcccatacaattttccttcaaactagccgaacctttcaaaatttcctttcccatacgcctgcgtttattgtccaggatgagtaatgattctccacttttattgctattcatcatttccctttcatcatcatcattattatcctgattctccatgatttcctcctcataatcctcacgctgattggcatcattattctctcctcttttctctcctgaattagctccatcaccttgcaattttccagggccattaatgtccatagcttccgccccattccgatgattctcactaccagtacggtggtcgtcctcctcctccttccctgacctcagccatcgggctccaacaagataattctttttcctcattgtagctttcatccactctccataaggtttgatattaggatcaaagttcggatcaaacctcttttgacagaatctttcagaatggccaataagaccacatatgaaacaaaaggttggaatatgttcatatttaaaagtcatccaaatccatgttccatcttttttgattagcttcattctcctttttaaaggtttatcaacatctattgtaacacgcacccgaagataatcccgccaaacacct

SEQ ID NO: 68833 - DNA, 636 bp, Cannabis sativa
ctattcattgaaaaagattaggaaaattatcaaagaaagagcttccctacaaggttgtaatggacaacatactacataaggttgtaatgatttgttatattctttactttggaaaaatattagctcttttgcttaaatgaatattgatcaaactttgaatactttttttttaaaaaaaaaataataaaaatttaagaagaaaaaaagtaacctggtgtgtctgtcttgctttacataataacctaactatataagaaagtaacctaatgtctgtattttgaaactaagtatgaagtctcaaagagcctacctaagacataaggaatctaaccaaaagacaataacatcagacaataatgaaataaaggactaagaaaattcagtagcagtacaaagttaacagtacatgttagccattatcaaacattcactttgtataatcttccagcagatttggttccactgcagcagagttatgagtcattgagaataagaactgaatttatgttcacaaaaaaaatataaaactactacatcttcttcttctcaggtttttcaggtgcctcttgaataacctttttttcttcttctcaagttttctaggtgcttcttcaacaaccttctttctcgggcttt

SEQ ID NO: 68834 - DNA, 562 bp, Cannabis sativa
gaaagaagccaagaaactaagaggatgtcttattgtacccaatcctcaaaggcgggattgagaacattattttgttcatctgctagtgtgagaaatttaagaggaatttgagtagaatcaataaatttatgaaggcgactacctttgattgaagctaaaacttgatggcgcgaagagaggaaagtgtgttcatcaagcttgatcgacaaagaatgtgtaaaacaaattggatgaatttagtaagggaacctactagttgaggagttgagcagtgttcaatcttgttcctgctccattgaacaattcaacatactattgatggattattgaagctctaataccatgtgaggttttagtgaaaaaagagtgttttgagagataaagagtattctgtattattcaatgaaaaaattattagagaggtatatatatgtttgtagttataaaacaacctctaacacttaacactttttaactaattatgtacctaacaaaagctaatagtacaaacactactacaatgttagcctttagaggctgttttttcacccctatttataaa

SEQ ID NO: 68835 - DNA, 563 bp, Cannabis sativa
atagaatattataaattcttttgaaatatttaatagaatacacacatcaaacatgggcaatatactatatataattgtaataattctatacatataaatgtatatatataaacactataacataggagtttttacaccacatactgaaattttcaagttttttactttttgattatggggctgattttttttcaaacctactgtgtactgtgttaagttttcaatgttattctacggttgttttttagttgttctactactgttttaattgttatgttttgttattttacgattattttattaaaaaaaaattgactttatatgtataatgtaggttaaaattaataaccaaaacttaaactacctaatattagtagaataggtcaatttttatgtataccccaaaatacccctcatctcaaaagtttctaatatcactctatttccctcttgctcgttctctatctttccttctcattgatacccactaaaaactagggctgtacatgggtcggtttgggcggtttatcctatatattttctaacccaatctaaagttcggg

SEQ ID NO: 68836 - DNA, 910 bp, Cannabis sativa
gggaaaaatgtgtcactgactgccaagttttcctttcttaaaaaaaaagggaacatttttattacaaaatttacgctaatatagattcaaagcactcagagattgtctgtggttatgggtatttttttctgtgttatgggtatagtttagtggtattatatttttttttacaaagggtaggtctcaagttttaatctcacttttccaaatgtaagaaaaaaatctcttatatgtttaaaaaaaataaataaattaaaaacatgctgcataaatgttgaaaattttacatgaaaattcaaaaaaaataatttttgttaccacttgcctcacatcttcttccgctctctttttcaatggcagttacccccaacctcctactgtcagaaattttgcctccaatccctgtcgtcgtaggtctcgtcttcaagccttgccggttcagatctcctctccaagctccagtgccatcgtcactagttactacctgtcaaaaatttatatattaaggtctcggagtttttctttcgtttcttgtttaaattttatgaatagaagttttgaattgagtatttttttttaaatcttgttgctgatgtatttgtttgttaataattgtgtttatttgtctacaaattttttgattttatctttttttataggttgagtttttgtgtataaaggtacaactaccatatgtttgatcaaatgccttaaaaaaagaaggcatctccaattttgatttttctacttctttaagttgagtcgttttcttcttaatattattttggtgatctttttatgttgatttggtttttaagatttagtatttcatttgtaaatttttcatagttatgttgatttatcgttgtttattagttgttttgtagtttcttattttatctttattgtt

SEQ ID NO: 68837 - DNA, 802 bp, Cannabis sativa
agagattataatgtaatgcttattgagggtagaaattccttttcccatagcatggttgaaccatctcttgctgaagctataggcatgaaagaggctctcagctggatcaaaaaaaggcaatggcagaatgtttgtttggagtctaattatctatgcgtgattcaagctttacagagctttaaaaataatttttttgtttggtttagttatttaggactgtaaatctttgtttaatactattggtactgtgtctttctcttttgttaaacaatctgctaatgtagtggcccataactttgctaaggctactattttatttcctaatcgtcattttagtttggaggatgttccaactgatttgctaccttgtttggtggttgatgtaattagttaataaagaaaattccctattcaaaagaaaattaaattacttaatttaacattatttttttatattgattttattttataattatgaggtaaataaaattttattttagaatatggaccctattatttaatcttggcctcatccttgattctaaggggtattattatcaggacgtatactacaaaagatacaatttgatagggttccaagccaaactctatattactcgaacagggttccccttgtggtcttagaatatgccttgccacgtgtcacttatcactctattcgagtatgccccagtttcatattttgttgcgttatgtcacatagtcaaagctttttatgttgactcttttctatttccaaaagttaggtacaagaagttctaatctataaacgacaattata

SEQ ID NO: 68838 - DNA, 1763 bp, Cannabis sativa
tgaaatcgttctttggacttgcctttcttcttgttggtagttactttttgattatcttttacttttcgttctttggacttgcctttcttcttcttgttgttgaacacacaactttaaatcccccttttgtacataattaatgctcttcctgtggctaagaatggtcttcccaaaataatgggaatattctcatcttcctccatgttaagtattaagaaatcagcagggaagataaacttaccaaccttcacaaaaatatcttcaattttaccccaaggatgagtcaaagaaaaatctgccatttgcagagtcactgttgtgggcttggcttctcctaatcttactcttttaaacacaaataggggcattaagttaatactctctcccaaataacatagagcttttatttccatcgaaccccctatcgagcatggaatattgaaactacccatatctttaagcttgggtggtagtttcatttataggattacactacactcctcagtaagtgccacgatctcatattcttccaacttcattttcttggatagaatgtctttcatgaacttcaggtaagttggcatttgttccaagacctctactaatggaatgttgatgtgtagtttcttgaatatttcaaggaatttcgaaaactgcttatccatcttattcttgaaaagctttgagggtaagggatcttgatatgatgatcaatgctgataggaggtgagtcttctttttgttacgggcattcagtagtcttcttcttgtcttgagttggtgttggtacctgttgatcctggtcctcttcaaccacttgttgctctgcccttggtccctcatattcttttccacttctcaaggaaatcgtttggcattgctcttttagattaatttctatagtactaggcaagttaccttgattttggttggtcatttgagaagttaattgtcccacttgattctctaaggttttaatggaagctatagtctccaacatgaattggagtaataaatcagttgtaatattcgaacctccactagaacttggttgttgagcaggttgaagtttttgtgcttgtggttgcccaaagttttgttgatttctctgttggtagaacccttgttgttgctgatttgaagactgcccttgaaaattttgacaacgaccccctccttggatgtaaccatagttgttgttctaaggatagttcctaatggcttaatcttgatccattggcaaaatgttcacatccaccggacaagtgtcatatgtgtgaggtcccccacatagctcacaaataacctgagcttgctttgcctgagcagtcatcaacttagtcaaggcctccacctaggctgtcaactttgttatgaaatcaacttcatgcatactcgcaactttctcgattggctcctttttgttgaccattgttggttgttcatggccatctcttcaagcagttcataagcctcattcgtactttttctcataaaagtcccaccagctgcggcatctatgatttttcaggtattgccaaccaacccattgtagaagttgtgaactttcatctacttttcaatcctgtgattaggacactttctgattaagtccttgaacctctctcaagcttcataaagagattcgttgtcttgttggataaagttgtttatttcaaatctcagcttggaaaccttggcaggaggaaagaacttcgaaaggaatttcagggccaattcctcccaagtgttgatagaattgg

SEQ ID NO: 68839 - DNA, 1404 bp, Cannabis sativa
ggtaactctccaccatttgtaagcaggtttactggatggcttttgccctatttttgggttttctcttcacatatagtttagtacattcttcttgtttttgttgttattattgttcttattgttcttattgtgaaagatggacattgtaaattgactaatttatccttatttgattattcagtttcttggtcctctggttgacaaaactttttttgatttaaaaaaaaaataaaagtgtcatgacgagttatctttttttgttgagcagctattgggagaatctcatctcatgaattgaatctcacttgagagaagatgcaataaaggtagcatatcagtggaatgaaagtgccaatactaaaaactctttctacatttccttggtatatatatggaatttttctaatttttgaagatgatattttgagtttctggatatataatcctatatatacatgctctagaactaagtagtcctcttgctttcgcatataagatctcttgtgagtttattctaaaattttgtttgctcccctatgtaacatcatttctattttgtacttagttattagttgattgctcttgcaataattttgtaaaaagcttgcaatttattacacatgttgtagtcttgaccttacatataaacatacacatgatcttcctctacctctgctgcaatttttaataattatcaagcttctgtattcaattcttaggtttttatatatatagtcaacatattcttacacttggttctagagataatgtgtatgtgatttaaaatggcagatgatcaactttttaaacaatattttgaataatggaggaagattaagaacaattcttgatgttgcatggctgtggatttgcaagttttggagcatatgtttcatcatctgacatcactacaatgcccttagcatcaaattatgtgcatcaaaaccaaatttaacttattgtttactggtgggcttattcattgttctcttctggcttcactttgtggccaaatcttttaatcaatgttgtcttttggggttcgaagtactttttactattaataacaatgtacatatcacacgtttataaatacaactatgtttacttaccaaatacattgactcacaatttacttttataaaacaaatcgttcaaataatcatatcactttatttaccaaaatcttaaaaaacctaaaattttaaataaaactaacaatacgtggctcggcacgtaacatcaagctagtatatatatatatgcttgttatacatcactttctcagtacatataaacatttatataacatgtatatataatccataataaaacaaattcagttaattccgaaacataatttgttaaagagtaggtatatgcatatgccagatttaatcaaca

SEQ ID NO: 68840 - DNA, 767 bp, Cannabis sativa
atgtacatgaccatgaaaaaaataaactaaaattctacaatttattaggggtccaccgatggacccctatttattttagcatatgagagaatttttttagtctaatttgtttcttaagttgcagttatttaggacatcctacaaaatttttagaaattcaaaaaaaaaaaaaattaacacgccgaaaagagggtttaaacagtctatttcacacatgtataaaataaaagagtttcgcgtgcaatagacagtttcaactttgttttcggcatgttaattttttttaaatttcttaaaattttgtaagaagtcttaaataactataatctagacgaccatataaaaattaagctaaaaaattatctcaaatacaatatataaaagtacatttattttaaaggagtgtagtgtagaaataacatttttaatcttataaatacaaataataataatatcaaaatctatagtataaattaaataacaataatttaatttttttaaaaaaaaaaatgccgtaactacagtaccacaacatatataccgtgcattgtagccatacagcatatatgccgagtactgtagccacacagcatatatgctgtaaactatggagctacattggagggattttatacaccaaatccaagtttcagtgcaacgttagagttgctcttagcaactgcattggagttgcactatatttgttttggtgtaatcaagtttggaatggaatggagattacaattgaggaaattacattctatacc

SEQ ID NO: 68841 - DNA, 807 bp, Cannabis sativa
tccaatggcttgaaaaaatgtaaccatgatggttacaataaaaatgtaatcattgaaacctcttccatatatatatatatatacgacaaaattatcataattaacaagtacttgaaatatatatctatgaaggttaattagaatttttactctctaactttgatatatatcaaatcatgtttttttaaaatttttccaatcgttaaaaaaaatttctgaactattgagattgctagatttaagaacttttgtttaatttcattcaattttattaattcggtgattatttatgtattaaattatgcttcccaaactttgatatctattaaaccatgccctctgaattgtgacataaaccgaatcatgtcatctaaattttcgtccatattagactttctttactaaaattgggcaaaaatttttaaatcaaacaatcttaatagttcattggagatttttcaaattcttaaaactttaaaagataaaatttaatatatgtcaaagttcgagaataaaaatcctaattaattatttattaattaatagctggctagttagttgaaccttctcactacaaaaaaaaaggcttatcttggcgagcccacatgtgcgtgtcaagataggcctaaatttttttaaaaaaattttgagcatagcaatatgatttaccaactacaaaaattatcattattataagaattaattcaatataaatattaaggatgtttacgacaaaaaaatagttaaaattaataaatactttatacaatttaaatacttaatttttcaaattataatatttttagc

SEQ ID NO: 68842 - DNA, 2459 bp, Cannabis sativa
tctaagtaattttatctctagtattaatacaactaaaatgggagtaggtcattacccgctaactaagggggtcaaacctctataaattattttgtctatttacttttctgttctaattatgtaacatgtggcaagcatcaatattaaatttgatttcgttgtcagttgtcaaaattggtggtcaacaactaccttcatagtcatcgacaccaagtctccttggaaggtcaacacccaaaaacctccgagccgtctcacctatctaccatatatttgtcaagttcttaagaatagctggtattaactatctccttgaaaactaaaaagtaccatgtgaatgttacaacacatcgttgacattcgctaagatgacctcctttgttgtgatgacaaccgagcagaagaggaagacctcctctactattctagcagctgaggggaagtagaagacctcctttgctgtttagatagctaagggggcgaagaaggcctcttccattgtgaatacaacataagggacgacaaagacctttatggttaagaccatggataaaatggagactgcacctacaatcactatatggtgcacccaaaatgagaaagacatcactccctatcttggatatattaatttgggacttgctcacatcctcaatttaccaaagaacaactagtgactgctacaacacatcattgaatgtcatgaagaagacctcctccgctgtaaagtcgagcagatggtgaagacctcctctgctgtaaagctgaggagatgatgaagacctattcctttgtagagctgaggagatgataaaggcctcctccattacaaagccgagaggatgttgaaagtcttctccactatagagctgaggagattatgaatgcctcctccgctgcaaagctgaggggatgttgaaggcctcctccgctacaaagctgaggggatgttaaaggtctcctccactgcaaagctgaggggatgttgaaggccttctacattgtaaagatatggggttgattaaggcctcctctgttatcaaatctaggagatgaacaagactaccattgctgaaacacaaccgagggaatgctaaataacttcaaggctacaacctaagagaagataaagactacatctatattcacataaacacaaaatgttacaagagagtcaatgctaacacaacaaccaaagatcaaagtaaatatttatattctaatgtggcatgatttcacgatatctcaaatcaaaagaaatcactcaaggacttatctaaatttcaacttgaaaaaaaaaagctaagtgataagaaaagacgatcatctttcctattctccatttatacttaaatttcaaattcaactattcaatagggaatgagaattcacaatcctaatttaattgggagttcttcaagaacataaatagttgtctaggattgtcaaaattaatgcccacctagtagtttctagagaaataggctcagttcacatcattaagtcagcctcacacaagtgtaaagttgacttaggggaaaatatttacaccaaaagtatccttaatgacatcaacatcaatgtttcacatgtggaaagaaagatgacatctcaaagttgagtagtcctgagtcatagcaagtcggcctaggaggggtccctagccctgcacccaagttggctttggcaactccaggatggaagtttggacttcaataactcatttccaactcactatcttttagtattctataacatgaggacatgtagcaaccaaatatactccccatgagctaaaattacatgaacctacacccctgaaagtcaacttggacacctagcattgcacccagcgcccaggttgacatcatcaactaggattttagtttccaagacactcttaattagatgtgtcaaaatttacatagaaacatgaactatacataccacaaacatatttgaggcatcagaattagatttggagaaagttcatttttgagcacccgatgcccgagttgacaatttgtgaagctgggcgacttccaagtatcagatcaatgatctaacttttgtatcatctttgtcttcatcaaaaataggggaatatgtacttttggggaagaaatagcacttcctaggtgcctaaagtaaggcctagcgcctaggatgacactgtgtcaacctgggccaattcaaatgatgttatttgagaaatcttctgagcatgttctacgttatcaaaatagattaagattaaactatttttgagaaccaaacataacttctgaagggccataaaggggacccagtgcccatgttgacatattgtcaacttgggccgtttccattcaagttctcaaagaagtgttccagacattttttctgtcatcagaaataatgaagatttaagcaaactcggggataaaaccacaaacctgaggccctgaaagcaaagccta

SEQ ID NO: 68843 - DNA, 873 bp, Cannabis sativa
ggttccccctgagttgatggggttcttgagctcgcctcaaatgagctaagcccttgcactattcaaatcagatccaatacaagatttcatggagcttccagctacaagatcaactggtaagactttattctttactgcttttatttatctactgtttctccttctttctctctcaagaacaatctctctcttctcacagattctcactctttctctctttttctcaactctgagttcttatcactgaacttagagcaattacaggttctctcttactctatatcttcagatctagccagaaattgaaactgggagtggttatttatactgctgcaataggagtagagtaagtagccttgggtgatgatctggcaggtataagacttctgttgttctgttattttagttaggatcttttattgtaaccgtatttaggtttttgtagatgtgcaagttgcttttcatgtaactaatttatggttaggaaagactgttggatttaattccagcaaattccacctcaatccaactaggacttttctaaccataggtgaatgtctttagtgtattttctgagggtcctaactcatgtggcaatggttaatcaccattgcccatacctagcatatccatgcaatgcttgaatttgcctaggtttagaattttagtgccaatgtcagctgggttttcctctgttggtactttctcaattttgatttcttcttgtgtcactttgtctctgatgaaatggtacttgatctctatatgttttgttctgtcatggaacatagggtttttacaaagatgtatgcagctttgactgtctgaatagactataggatttctgtccaataagtttagatccttcataag

SEQ ID NO: 68844 - DNA, 553 bp, Cannabis sativa
atgtagtattttaggttacttattaaattaaaatatatgaaatgtgttaggacatatattaagtgccctttagtgactttgtattaatatataattttatgaatgaacaggcacatcctttattcaaaaatccacaaaggtttggagaacttgcagatccaattttaggaggagattatccggtgagaggattacaacaagcggtcgcagtggctgccatgtgtttgaatgaggagccctcagtacggcccctcatcagcgatgttgtcaccgctcttagttttttgggaaccagtcctgatcataacaccgctacaagtacaaatcaccaaaaccaaaatgacccaactcataataatgataataataataccaacaataacaacagaaatagtagtagtagtaataatagtaatagtaatagaggtcatcaagagaaagaagaagagagattagtacaagaaagacaaagagctgtacaagaagccattgaatggggttcaacttcaaggcataacaatcccaaaactcgatttggaagtgctgcttcatt

SEQ ID NO: 68845 - DNA, 3022 bp, Cannabis sativa
aaaaaaaaaaaagaattagaagaataagatgaatattagaacatgggggtgagatttagtaaaaagctagaagataaagatggagaaaatgaatagtgagacatggggttgggatttttaaatctatttaaataaaagaaaaagtaaaacatgtcacttttgtgacagaccacatcccatcaacattttcatcaaaataataattattaaatattaaaaataataaataataatttttacatccattaaaattaaaaaaaaaaaaataaaataacttgtcacttttgtgacagcccatgtcccaatcagtcaaaaaaaataaaacaatagcatacacaatttgaaccaagaaagtatactaataaaaataaaaaacagtaaaaacgttaagattaccatgccacaatataattgaaataaaaataaaatagttagtaaagggtgtaattttttttttttcaacaatatacctgttgattcatccaaaaataaaaaataaaaagtgagttatttttaataaacagatcatagcttctcattaataatagaaagaaaatgtcattttaaaataaacgtaaaacaccatctttcatgttcttaacataattgacttgattcttccccatatgaatatctccatatcattactcaaagtcttataattagtgctgaaaactgaaaatagggaaactgcacgcaaaggtataataagaactactttaatttagcaagaagcaaataaatctttcaacataacatttacaaagaaaaaagagagaaaaaaaaaactatatgttgatcaacattactagttgactaacattatgttaaaatattaaaaaattattggaataatatcttcattgatcactactatacaatacatacagccccccacaaattatgtgtttaagtataaagtaagacatttaagtcaatttcagcatgcgtatcagtggactttaaagtactttgagttttgactttactactactaaaacttagggcctattcaattgccaaactaatttgaaatatataaaggttatgatactctaaaattattatattctaaaaaaagttaaattattataaaaaaaaatagaaaataatttgcgcttcgcttggagctgtattttatttaataataattaaattataaaaatatatcaacttttaaattttaatatttttatataatttttttaatagtgagtagctatgcaaaattttacttttttaacttttaatatcacaagaaaaataaattaatagtttagaactttaatttttctaattatttcgaactcaataaatgataattattaattaatttattatagatatatatttttataaagtcaattttcaatatatatatatatatcataaattaaattagaatcatgaattctagtaattggataaatattattttggtgagattaaatttatataataaataaatttatagaaaactcatcaattttaaaatagttgttatcaacgtatctcactcatcacaatattttaagtcgttgtcatcaccgtattttcactcgtcactatatttaaagttgttcacatcaccgtatctcacatgtaattgtttatcaataaatgacaatgtaactaaaattaatttaaattttaagataatatcatgtaattagaaaattctttttaataaacttctcaaaaacttgaaaaaaaaaattgaacataagaggtcaagataataaatagaaaattgtaatgattttttatttaagaattataatattacttaaaaaaaaaaatgaacctgaaaaagttattattatttaaaattgttatgattttttattaagatttataatattacttaaaaaaaaaagtgaaaaaaatgagaaaaataataaagtagaatgaaattattgcaaagcgttatgtcagctccttatatttagttgtaatgtgaccgaactatatataaaaaataacaaaacttaataataagtgaaaaaaaaaaaacaaataaactaaaatatttagaaaaaaaaaaaattgcaatactaactaatttgttataattttgatgacttttttttttataacaaacttcaacaatattaatatcaccgataccatataagcattcaatagcatctatgtatataatataaaaataacatgaaaatattagaatattataatgatgaataattaaataaccttttttaaatatgaataaaaattaataattaaataaatatctgagaatattgtgttaattaatcaactttagagttatgaattgaaacccattcatcgggatgttaattattcttcctctagtctcttcagtgaagttgtaaccaaaactaaaattttataatcatttgaaagtagtctgtactcacttgaggttgccacacttttcaaattttgcagacaaaccttcattctataagttcttaaaccttcattgttgtatgcattaaattttccggtaagataaatgatagacacattgagaatttaataattggtaaattagtaaaaaaaaaaaattgaataagaaataataattcccttctcattaataaaaatcattattaattttctattcttcttagtattacattctacaaactctaatatttatcttccaactatatgtatcagtatttaagtcggtaagaaaagaactaaaattaaaaaaaaaagttaagatgtaaattaaattatgaaattaagaaaaatatattaggatatatatagagtttagtaactgaattaaaaaaaatgaagtgatccattttttaaatgtgatatatttattattttttaaaatatatatatatagagtttagtaactgaataaaaaatgaagttattatctttttaaacgtgattgttatctcattttctgcactatgacgtggcagaatacacgagtgacacgtgtcctgcattccttgcatctgggcggagatgagtatccagaatagacttgaagtaacacatctggacgtataac

SEQ ID NO: 68846 - DNA, 888 bp, Cannabis sativa
gggggccgaattgtatcatatataagtgataaatatttcaaaatatattattaaatttatgattaaaataaaaatataaaatgtctctcttgcatattacgtaagttatctataagtgaatttacactaaaattttaagtaattttttttttaaataatttgctgcataaatacttaaatttaattctcagttgcagattaatatttaagtttaatttttgacagtaataatacgtaaattatatttctagaactttcgtaggtatctgatcgttaagtgttaagtcattatctacgtgttattttcttattgtatatttaaattattttttaaataaaaataaaaatttattggcttggactaataagaattgtcatgtggtagttgactcgacacttaacggttaaataccttaaacttagatatttatggcacaaattattcttttttttttttcaatatatactagtaaacattcataaatgctttttttttttttttacaaagtgtagttttcactatattcataattgaatagatgaacattccattttaattagtttttaactaagtgacgatgatgactagactaggaatgcaagctaatagtattaatgaaaaaaataaatatttttttaaaaggaatcatatatattttttatagaaaaaaaggaaagaaattgtatttagtttaggattcaatattttgatgataaaaaaatcaacagtttaaaattttaatttgacttctttgtgaatgaggtacaccatatgataaatacggaaaacaaaagtctataggcttgagtgcccctgattatatacacaaactaaacaaaaaaaaaagaaaaaaaaaacctcagaaaagagatgacgtggtttttctt

SEQ ID NO: 68847 - DNA, 787 bp, Cannabis sativa
catctgagcacttgtttctgcattgcaattttgcttatcatatgtggcgctcgtccccatgggaaatcttttttatatctgacagcgggattagagtttgggattgggttaagttcatatggaatctttagcataaaggtgtaaacccggatgaggtgtttctgtatgcttctgttgttatggacacgatatggagagtctggaatgataaggtacataatcataaaatggataatgtgaagcaatgtattggctctatttctcactcttttgcatattatagatcttcatttatctagcctcctcctccaagccgttctcttacttggtgcccgcctcctcaagactggctcaaactgaactgcgatatcagagtaggctcagatcacatgtgtattgcaatggttgctcgaaatcactcgggtgaggtgatttgggtgacctcaacaaaattggagtactctgacgctctttgcggtgaagcgacgactgtttatttggctttagaggtggcgttggaacaaagttataaatttattattgttgagagtgactccaaggcagtagtcaattccattactagggtggaccctaggtgggaaattgaaaactactcctctttttgtactagagtcatgtcctcttttactagttgccttgtttgtaatatttctagaacgtgtaatgttatggcccataatgtggctagatgggcgtttacccacaatcggtttggttgtatccctatcgacttcgccattcttaaaaatattttatgtaatgaccg

SEQ ID NO: 68848 - DNA, 658 bp, Cannabis sativa
tcttaactaacaaaaataacagaagacatttattggttaacaggtaaaaattattttgaaaagtggaagtgaagatgagaatggagctgataagaaaatcaccaatatgaagttttcagaatcctcgtactatcagtgtcatagtactctatggctcttctacttgctagtcgttccaagtttgcatagaaaggaatcttaagagcttcacttacctgaaataaaaagagtagaagaaaacaaaaaagcttcccagtatttactttatgattcagtaaaaatcactagtgatctgtaaaagagattcatcttaggaaaagtaccactttgccaatatttttattgagtttatctcccctagttgaaatgctgaataactcttgttctagaaaatgacttgtacagaaattttgcttctccaagattgattcatttgggtgtatgatgatctcggatgctctaaatatttccaagatagcatctatatccttcgtatgatttccaaggtaattgaatatataatcttctgaaaatcgaactaatggatctgtaccaaagcttaaattaattaagcatgaattcccagaaagattaaataaacaaaaagtctactgaattgtaagtacctgaagagacatcatatccattaacacgcaat

SEQ ID NO: 68849 - DNA, 1569 bp, Cannabis sativa
tgacaaatcaatcacataacaaactaccaacaccaaatcagccatgatagaatactgatgacagaacaaaacaacttcattcattctcaaattacaaaaaaccaacaccaaaccaagccatgatagaatgttgatgatgacagataaaataacttcattcattcattctcagtcaagatgttcctaaatatcataggattgacaataaacttcaagattataatgacaatcacataacaatcaaccaacaccaaaccatgataaaatgctaaaacaatttcattcattctcagtcaagatcaagatgttcccaaatatcattggaatgacaataaataaacttgaagattatataacttagaaagaaagaaagtgaagtgaactcactgaggatcagtggcaccgatcttggcgttactgcagttgaaaagagaccaacaagtagagtctgcaacaccagcctcatccccaatccacctggtgtcaggaccagcatctgaaaatatcatagatcctggctggtgctgatgaattacactgaaccaatcatcaaagaaatactccatagatttctccccttctccctttgcaccatcaagccatacttccttgatatctccatacctggtgaggagttcagtcatttgaccaagatacaactcattgtactcaacagtcttcccataagccttatcgtggcgatcccaaggtgaaaggtacaaccccaaatcgatcccagcttccctggcggcggatgccaactcgccgacgacatcgccggtgccgtttctccaggggctggaactgaccgagtaattggtgtagtcagatggccacaagcaaaacccatcgtggtgtttggctgtaagaattacccgaggaaaccctgagtccttggcgacttggacccactgagtggcgttgaggagtgttgggttgaagatggagggatcggcgtggccggttccccactcggtgtctgtgaaggtgttaggaccgaaatggaggaagagggccatgttgctgagctgccattgaagctgagaagctgagggaatggggagaactgggagtgggggtggaactggaacactcgatgatgatgaagaagaagagagagtaaacaagagcaaaagtatagataactgaggtaaatgtgaaatgggtattgtgaattttgggaaataaaggatggtgggaatgagaaatgagcttccgccatgaatgttgttctcattctcagtcatgatgggctgagccaaagttggactgttggaggagacgactcattgagaacactttgcttaaaggccctctcctctttatttaattatttattcacttttgctttgtatgtaagtgaaaattgatgcataagttggaaaaaaaaaccttttgatgtaatattaaaaaattatggtaataattcttaaccttgaaaaattaggtacttacaaattaaggagattcttgagtttgagactatcaatataatggctaattaacatttttgcctcctgaactttgacatgtaccaaatcatgccccttaaacttttaaggtcgttaa

SEQ ID NO: 68850 - DNA, 843 bp, Cannabis sativa
atagaagtgttggcacgtcagcttggcgttggcatcttgccacacattctaccttggtcacgagtgacaaggtgagcgtcggtgttgggattcgccttacctaccatagtgagaacttatggacaatgcgagtatcttgcctagagagcctcgatgcatggatgcactcatggatgcttgcgagcatgactcggcggtagttattagagagacagaagtgggcacggggcacatgaacggtttaaaaatgagcccatggtttctcggatgtttagaaggatgaccttggcttagagaagtcaaggtgccgcatgggtgttctgatgcctgaaaaggtgagcctgtgacagtgggcaaagcctatcaaagaaaatactaaggcaaggatatttctggtcaaccatgattgaagattcagacgcctatgttaagaaatatgataaatgccaaatattttcaaaggtaccccgtgcaccgcccaatgagctaactcagatgcaaaatccttggccttttactatttagggaattgatctaatcgggcaattgcctataggtaaaggaggagtacaatatgcaacggttgcaatggattatttcactaaatggacgaaagccgagccattagcaacaattacatctaagaaagtgctagacttcgtggtgaaaaacataatatgtcagttcggacacccgtacaaaatagtctcagacaatggcacacagtttgacagctaattgttcattgaattctgcgcaaaccatggaatcgtaaaaagtttctctacagtggcacaccctcaagcaaatggtcaagtcgaagcagtcaataagacacttaaa

SEQ ID NO: 68851 - DNA, 608 bp, Cannabis sativa
acatgtaaacataaatgatttctaatcttctattgataacaaatcagattgtattgaaatgggttttatttaaggcataaaatcctaacagtttcgtccctcgtttttgtccatgtcaaattcaatggtcgtatcagatttgacatttgagcaattgaaggcagcgtcctaggttaattgtcaacttgggtgctatttctagagactcgggtttgtggttttctccccaaatttatttgaatcttcattatttttgataatggtgaaaattcctggagcttgttttggtgaattgaattggaaacaacttaggttgacaaaatgtcaacctgggtgctaggtcccagtttttccccttcaaaatatgtttggtcccaaaaaatagttgaatctcaatattttctgaagatagagatgatgcttaaaagaattcctgaaaaactccattttttgtggccttggttggcaaattgtcaacttgggcgtagggccacccccaagtgtcgacctaggcgctgaaccctattatttatgcccacgaaatgttatttttcctttggaaagacctatttccccatttttgatgaagacagattcaatgcaaaagt

SEQ ID NO: 68852 - DNA, 744 bp, Cannabis sativa
gtctagtaatagtatggatacatgggatttgatatgaaaaaataatttatatgtcaacagaagaacccaatctaaaagtattttatgctaggtattttctactttatttaaaagtgatgaaattaataattgaagaaaaaaaatttcacaaaaaataataattgaagaaaaaatattattaattattaggtgaaattataatataatatatgatacacatatacattccaaaaccttcttcatgtctctttacttttgaattgtgaatccaaatggttataaacaataaacaccgtacattataaactcgtaacaataagtaacaataagtacggttacaaaccttgccttttataaaataaaataaaataactgaagaccatccatctcctctgattttgatagaaaacaatcagagaaaaataattatatcttaaagagtaatcacagagatttgaaggaagaaattgcccaaaagccatttagatattataatgactgtttaccttcaaatagtatattaaatcctcattatcatctaatgagagtgtcaagttttctagaatcatattgataaagtacattatttactgcataacacataaataaaatatgattgagaagataaatttttagtgcaaaattaaatcatgcatcaatcaaatttacagtaattacctcaggtccaacaatatttagttattcgtatctcctttcaacgagagttctaatagccaaatcaag

SEQ ID NO: 68853 - DNA, 819 bp, Cannabis sativa
gtatctatctttgatttatcaaaaacagtattggtagatgtactgcaattaaatgcagacttgaatggaacttcagtagttgactgctgagttcttgaagcagactgagatggaatgtggagttgatagagtccatcactgagggaacccttgagaagaacttggttcgtggtcttgtccttaatgagacaacaaagagagtcaaataggagaaccacattattatctttagtgaactgagaaatacttagtaaatttttagtgatgtttgggacatggagaatgtctttaagctgtaaagatttggtggggatattggtaggaaaactgttagaaccaacatgaaaaatagggatagtttggccattacctacagtcacctttgcctttcctttgtagtctgttgtgttttgtagctgttgcacatcggctgtgagatgattggttgcaccagtgtcaagataccaggtgccaggggactcttcagaaattgcagattctgtaatatgggcttgaggattgtcattagtcgaattagaacttgaagcaccagtagcttgtggtccagtgaaggtaatgtcaaatctgtggtagcacttttgtgctgtgtgacccgcacgtccacagagtttacaattaggcctatttccacgaccacctcgatttgtggattgacctctgcctccacggtatggtccacggtatcctcgaccccgagtagagccatttatagagagattagccatgttggcttggacagtttgtaaggccgatgtagagaactgttgaagacggacttcatggctatgtaacatgaat

SEQ ID NO: 68854 - DNA, 2544 bp, Cannabis sativa
aaaaaaaaaaagaaaactaaaaaagatcaaaggagaagaaattctatgactatgttctcataaaccaaacacctaattatggaaagccaatctgtcaacacaattcgttagatttttctatttataaattctatatgagaaaagaacaaacaaacaaacatgagaaatgaatagtaactatgcccaatcacttaatttctttcttatatatatattttaacatatttattttcatgatttcacacaatattgctataattgtaataaaagaggaatgactacaaatattgaattaatacctctcttttcacatacatatatagaatatatcacaccttgtggaaactcaagtgagagatgatctcttctaaaaggcacctaattattacaaaaaacccctagtcataaaaacaataattattttgacttacaatttctttttttgtgattaaaatataaaaaatttatacaattgatcaaaaaaaattacaaaaatactttaatactattttttttatgctttgaacttttctttgaacaaaaatatctccttaataaaaataataaattgtttttttgtttgttttataattttttttattgttgtattatagttattgtcatgatgttgttttataatttaattatagttaatttatagttattgtaagattaatttctcgttgttttattataataagtacctaaagttttggttttataagcggtataaacttaataattttttttagcgacataagtacctaatatttataaaactgtaattttcttttagtttcatcagtatagactctattattgtcttaaacatgacacatataagacccagaatctagattatttggactggaaagaaatatgtagtatcatatatttccaaatcttcttttaataaatttaaaacggagtttgtattgacgaaaatagagaaaaattacagttttacaaatatttagtacttatgccactaaaaatattattaggtttatgccgcttacaaactcaaaaccttaagtacttatgccagtatttaccccaaagtgaatagagatcatctttgtattccatatgttagctaagctatggttacaagatttgtttgctatcattctagttattttgtggcatcttttggaatgatagaaactcggtagtgcatggatttagcccacgagctgggaacttgattagtgtttttaatttttgcttgattataattaagctaattgcattaacattgatgttggttgccatgttgaggagaggctttcaacgagtagagtggtgattcgagacagtaatggtgcggttcagtttgctttagccacgattctccctcaagtaagctcacctttaattactaaattgtttgctatacgagatgtcatcctagcttacaacgatgtgttctcatgtttcgagttgaaactaaatgtcttcgagtgacacaacttataatcgacaaagaggaagggtgtaaggacatttgatgcagatattagacttttgtaattgtaacattatattaattgaattaaaatttgtgtatcattagtgtaattaggtagctcatagtttcgccaattatatgtttcaataaataaagtgccatgtccatgtagattgaagtttctccctcatgtgctaatcaagctattcaactcgatatgccatttcctttgtattaagtttgtttgttattaatgaattttatttcaaaaacaaattacatgcatatgcacgtaattatttctttatttttcttttaaatttggatgcattacttccggactaaaccctaaaatcttttgactctaaaaaaagcctaaaatcttctatgtaaacgagttactcaacattacttttgaccaactttcttttgttttgattttctttttgttgtcatattaggactgaatctaaaatatcacatgcacaatgtgtgttgttaattttcaatgacaatgaaaaaaatatctttttcaagtatataatttcttaattaaatcatttattactaagaaaaaaaaactgaaaagtgatattaggtactgatagtgtctaatactagttataggtggtaatgatattctatattaatagttattaaattaaattatatgagatctggtacttaattataccaataataatattacactttaaattttgtgcatgcggttactcgttaattggaaatataattattaatattatttttgaatgttagtctggttactacttactactttgaagatgagcaagtagtaatcggttagtgtgttgagatatttagattttttaaaatataattttagatttaaaattcaactaaaacataaattgtaaggctcatgtgttttatagtattagtaactttttaattaaaaaaagttaagattaaaatttacaatttgaattatatatatatactaggtgattgttacgtgccaagccacgtagtgttagttttatttaatattttagttttttattttaattaataattaaaatagtataatt

SEQ ID NO: 68855 - DNA, 846 bp, Cannabis sativa
gtgtcactaattaattttttagtgccatcttaaaatgtcacctaaatataaattgtggcaatttgaaatgtcactataatatttactatatatttgtttaatattaatttagtgacatatgatgatgatgatgaaaaccacaattggtgttgagattccttgttatgtgatgtacacgtttttttgcctacatatgtaattaaatatcattaacatatttcattggttagtaattctttttattatatcatttgaaaaattaaaacttaacgagttgtgaagaagtgacatttcgattgtagttaagagcctgtacataaatatattcagttctaaatattaaaaaacattgagtaataataaaaactaaagatagataattttttttaaaaaaaaaaattgagagattaaaggtctaaccatgtcaagtataatagatttgtcatttgcattgtaatcatgtttgttggtttgaactagagatcttaattcttttaattcagcttctagagtctgtatatacttcctttgatttcctctcttagtggatttattttcccatacgtcggatgggaaaacaccaaaaccgtacatacggactgatccgtatttttctttacccattacctcagagaaagtgtcattcatactcctttcctttgatacatccttattcaactcttgtttctcttgtaattgtacctatcattaatataagttaagaaataataaaaaaaaatagtaggcataaattaacaattattcaatcataccattacttcttttgttgtatcagttacacttatatctttttttgtataacagattttaaacatatcagcacgt

SEQ ID NO: 68856 - DNA, 848 bp, Cannabis sativa
ttcccaataatgatgacccaaacactcctcttattgttgttaacctcaccaatatcctaaagctaacaacaacaaataatttatcgtacgtggaagcttcaattgaagctactctaattggctatggcctcttcaagttcttggatggttccttcccggcaccgtcttctaccgttacctcagcatccatcatgttgtggacattgtcccacatagaataaatggtagaaaattgaaccatatataagaacatgggctactccactcatagccaattgattttgagatggaactccatgattctcaacatggtatcagagccatatcctttgcgagcaagtgatcctatccgatccgcacctatacagatagtgatcatgtccactctgatacggttcaagattgatgagcaaaaaataatcatcatcttaagggagaatgttgtggacattgtcccacatagaataaatagtagagaattaagccatatataagaacatgggctactccactcataaccaattgattttgagatggaaccccataattctcaacacatcaccaccacaaatcatgcctatgcaacttggtttaggcaagacaagctcctctttggagctcttattggcacaccttggaacccacccttattcccctcatctcccactcagaaacttgcaatgctgcttgggttacgcttgccaacacttttgccaaacaatcttgtggccatctcaaatctgtaagactcaatttgaagggcattaccaagggatctcaatcaatcacaaaatacatgaatgctataaagatgtgcattgaccaactagccatccttggtgaaccca

SEQ ID NO: 68857 - DNA, 835 bp, Cannabis sativa
  modified_base (368)..(368): a, c, t, g, unknown or other
atcagagcaggaaatgatcaaaaaattcataactcactccaatcaaccccaaatcacaccaaaatttccaaacctgctatttagaccctaaggaacatttccaaagaaagaaaaccaagcttcatgtataaaatgaaaaaccaccatgtgagctccaagctttgagttcaaaactgaaacttggctaaagctcacctacaagcaaccaaacctggtttaaactacataatcatgcataataaaactgtagaaatcattcccaaactcatacaataatcacagcaaccaattcctcaattttccatagaaattatagtttttgagttaagaagatccaaacttggttaaaccatctagcatgcatcaanctactcaaatccaatcaatttaaacatataaaatcacagaaaacaacctataactacagcagcaacagcatctcaacaattaaacatgcaactatcaacatttcttaattttcaagaattttaaagagaggaagagtaagagctaacctagcttggattgaacacaaaaaaatcttgagttgtcaaagaaaaaggggcaaatccctgctgctcaaaggtgccgaaaatagagagagagtatgggagaaaatgatttttctttatctttggtttttctcaattttctaacttttaataaaataaaagaaatgtaacattaaatcttattattcatccataaccaatagataaaacacataatcacagtacacttagtccactaaaggacaaaataacaatggggcaaaaagaccaatttgcccctccacactaaaatagcatagagggtaccaaagggtatttttggg

SEQ ID NO: 68858 - DNA, 978 bp, Cannabis sativa
aagtgtcaataaagaggaagtggcgtgagtgagagggagtgagagagctatgtggcttaagagatcagaattcaggtacctttcctaagtgtataagaccctttatatagttttagggcttacaaaagatcagtattcaaataagtaaatatcaattcaaaatggaaaaaacaactcttttatatataaaaaataattcttaaaactttattaaaagaatacaactaagcattttttataaatgacaagtaacagacattaaaagatatatacatggtcaaattttggtaatttgatcaataatatgagtttgactgaaatttatgaaatatatatctatagcatctatagatatatatagtctctaaaaacataaaatagttaaaattgggaggaagagaccaaatttattttacatttatttttactttggtcattaaaagaaattattaacgtatattttttgagataaaaaggacacactaagctttataggccattctaggaccctctaaacatgggctaagccgtggttccattagaaatataaaattttgtaaatttagaaagagtcgacccatttatatatttggcttatcatattattcaaagataattatataaaaattagtaaaattagaatttaatataattttattacttagctgtcactaataaaagatataatttattttatatatataattttaaaaaatttaaatatccgccgcgaagcgcgagttgtaaactagacataataataataataagaaatagaacaagcaaaaaaaaatgaaaagaaaaaaaaaatacaaagaaagaaaatgagagaaaaagaggagaaaaataataataaaaaaatatatgaagaaagatatacacctataaaagataaataaaaagaaaaaaaatgtgtaaccacttgaggctagctcaagtggctataggagagtgcgtgtgtgttggaggtcctgggtt

SEQ ID NO: 68859 - DNA, 649 bp, Cannabis sativa
atgcgaagctggttgcttaaaaaaatggtagaaaaatttgaaaacaacagtaaaaaactagatccaaaaatcgacatcaagatcgtgaagctaataatagacaaacaccacccagaagttgaaaaaggtcaggcatacaaagacaaggaaacactgaagaaagtttaaagctactacgcaatcaaaaacaacttccaatacaggttttgaaaacatatttaattgggtttcagcaagaatttttttaatatcttctataacagagtaataaccagagtttataaagaactagtgacttttacacaaacagtcaaaaaaaaaaacaaaaaaatagagcttaattaaaagacagtacactgtcgaactaacaaaaaaaaaaaggaaatgtgtaagaaaatggggaatgtgtacataaacaactcatgtcccaaacagtcaaaaaaaaaaaacaaaaaaagtgtgtacacaaaaggcagtacactgccgaattaaaaaaaacagtaaaaaagttaatacccgcgtgtcaaagaaaatgggaaaatttagtaatctatgtaaatttcccataatatattgtaagcatatattttttttgggcttttttcataaatgtacaaaaaaaaaaacaaaataattacaaaaaatgtgc

SEQ ID NO: 68860 - DNA, 635 bp, Cannabis sativa
ttggccgaaggttgcatcagacgaaggtttcaattagacgaaagttgctgggtggttggccgaaggttgcatcagacgaaggtttcaagcaaacgaaggttgttgggtgagttggccgaaggttgcatcagacaaaggtttcaatcacacgaaatacctgttagcaaaatatttatgtaattgtaatgcaactgttatgaaacattaaaaacagaacaatatttctacgtacgtaagtctatctatacatgtctcttcatgatttaatatgaacaaattcaccattaaaaatttggaaaacaacaaaaatataccagaataaacattttagtatagtattaatgtgattttttttggattatacttgagttggattgtttgagaactccaattcaactttttgagatctgcatttcattgatctaaaaattgaagtcaagacattagttttatgcaaattaaaagtatttttacactttttttcatgaattcgaaatagcccatattttgattgattcttgtcgttttctcaagtgaaatcgccgtaattaatgatggttctctttctggttgaatttttgtttcggttgcgttgggttaccgcgtggttgcgcgatggttgccgaggaagcatg

SEQ ID NO: 68861 - DNA, 593 bp, Cannabis sativa
atattatttctaaataaaaagaactgtgattacgcaaggtaaacaacatcaattttattttattcatttatttttataatataaagcaatcatattagcaccatatccattgattacagaaggtcttttcaatattttggtgaggggattatgagtatggtttgttcaccattattggccttctaaagtttttttattttttattttttaaaaaaaaaaaggttgtcttaagcatataaaactagagtggttagtaaaatctaatctaaaaataacacccttataaaagaggacggcaaaaaaaaaaaagaaagaaattaattaaactaaaattatattatgttttatacaatacacaacatatacattatatacttcttgcatggaaaaatctaaaatatgtatttggatatgaccgaaataatagaggaaaatataatgtactataaaccctacactattgtcactgtaactatcaattaaaacaatcataatggtaagcgaattataatggtaagcgaattaaatgggttggggttgaatttttttcttcataattcttatttggattagataataattaaatgcacacc

SEQ ID NO: 68862 - DNA, 1724 bp, Cannabis sativa
  modified_base (27)..(32): a, c, t, g, unknown or other
  modified_base (1245)..(1245): a, c, t, g, unknown or other
  modified_base (1523)..(1537): a, c, t, g, unknown or other
aaaatagattacattgaaatggagttnnnnnnagggcataaaacctaacacattaaccttctatttcaacctcgccacctcgaccgaaagctccttctccttagtcttcttctcctcctcaacccgatgaagaactgctcgaagagaagtcctctcatcctgaagactattcacttcagcaaataaggtctcgatggtctcctcaagacgatcagaaacctcgagatcattagtcagctcagttatcttcttctgggcggtaaacaacttcttgttggcttcgcccaactccatcctaatagctccaagttccatcctagcgtcgtcagcatccttcctggccaagtccacctccgccctcatggtgttggacacagtcgtgctcctggaagcggcagacttagctcgggagtaagtgtaggccaacttcagaccggcctgcacaaagaaaaaactttagtatttgagctaagtacagaagattaaagggaagtgttcagaaagacttaccccaatgaactccttgaagacttcgcccaccagtagctctaaagaagaatcattatcagcaccagccagttggtcactaacctcaggaaccagccggttcatgtagtgggcaagcatctctttgcccttcttggcctctggaagcaccggcaaaggcggagtaggtgcccgcacctgttcagcttcacctctgaccagcccagacccaccctttgcagcagttagctcctcagaaagatcgatgacctcaccagcaggcctcttttcgtttgaagaggacccctcaccgcccttagacttcttggccagaggcgaggcactagagcttccgcccattctcttcttcaaagcatcaagcatctgccgagacatgtctgtacagaaccaaaaacaatatggttaaaacaaacatgcatcagaaacataaggcataatagtcaagaagctcaaagacaagacaaagtagtatgcaaagtgactgcccaaacaagactcagaagtccatcatcacctgacatcgctcctatttcagacatagcagcttttccttttctgaagacgggaggggatggccgaacaggtgaaatgggctaccttatgcgaatgacatgttcaacaggcctgggcggggtcgggagtttcttcttcctcttaagcggagtcacctgctcttcctcagcttcatctttaagattcaagggctcctgagcataatgcttggcccttgcacctccnttcaacttagcttcacgcttcagttgaatcagctcattctccagatgagctcgttcggtccggccagcacttgatttcctcttcttcccggtcgcggacttaggaataaagtccttgggatagagcccatacctcacaaagttatcctcggaggtcaactggataatattacggtcttcccccggcagtcgggcaagtttttgagcttcatccctaagagcaagagtgaggggagggcggtgataagtcataatctgctggaaccgagtgcgagtgannnnnnnnnnnnnnnccatgaagtactcatcagcaaaacccccattcttgttgatgggcgagtcgtccatgcccgtcaaccacttgaagcctggttgagagaaatagaagtaccccgacctaccttgcttggggtggatttcagatcaaagaaccaggaaacttcgtgaggagaaggcgtaccccactcctgggaagcgtag

SEQ ID NO: 68863 - DNA, 3456 bp, Cannabis sativa
  modified_base (947)..(947): a, c, t, g, unknown or other
gtcaattcctttttattgtggagaccaaacttgtagtaggctctagttctgccttttgtaataggttatcttttaataatgcatttgacctaagaatggtttaggctaaacggaatgattactgttattttggaaaggtaatgttgatataaatattaatacttacttctttagttatatagattggtttgtaactttgaatgataatattaaatgacatattttttattttataattctccttatagtattaataaggctaatatttggactttgcttaatcgtttataaaatgttgttcctcatatatcgtgcttaattattggtgattttaatgattatatctttttggacgatatgcttagtagcagcagttcctcatattatgctatgtcaaattttcacagcaatcctccttcttattctatgtcaaatttttaaacttttattaataagtataattagggatgggcatcatttaatttaatctaattgaatcgaataataaatagtattttataaatgcagaacatgaaaaataaattttaaaaaaactttaaaatacagaaagagtttaaaatatttaatgtaacttatttttaatttaattttttaaatatttaaaaaaaaaattaattttaaagtatctgaatctgatgttaaaatagtgatttaatattatatattaaatattatttattgctaaacaatgacacaaataagtatgaaagcaatgatgggtaataatgaagacttggctagaaacattcttggtaagttatacaaaacttcttaatagaagtaatgacatcatccaattcggtggaaaaatacatttatataataagttaatatatagcatttatttatgagaattgctaaaaggtactattactatttaacatcattttcggtataattaattatcggatctcatataatttaanaaaataacttttagagaatattattaaccaattaagtatcgaatctcatataacttaagaaaataacttttagagaatattattaactaattaagtatcggatctcatataatataagtatctgagtgtcatattactattagtgtaattaaatattggatctaacttaaaaaaataacttttcgagaacattactaacaaattatgagacatcatctataaaaaaatgccagacaccactagtatccaataataataatctttacttatacaattgcatggaaatctacacttttgggctgctaatttactagtcattccatatgaaatttttgagtgtcaaaatcaaaggatttcaatatgcacaacaaataaagccaccaaaacaagaaagtccttcaaccaggtgtgtaaattgttctaaaataaatcaattcaccatagcaaatacaagaaggcaataacttccattctttatcatttactgtactttcaagtttatgtcttgggaacctaaagcacacctgacctatggcattcaaaatgagatatacaactatgctaggaactaagaaggatcacttacaaagaaatctgaattagattaaagtttttatatatgagaatgaaagaaacggaaaaaaataaaagtaagaaagagaagcaataatcaattaaatataagaatataatacaaaactcaaactcaacacagcttgggatgggcataaacatgaacatgcatcatgaagctgtgacagatctagatgtgtttcgtccaagtccaagaccaaggccgagacctaatgggacgttgccggtttccggattcccatggttattgtggttgcagtgtgaagaatgaacatgaccttggtgagcatttgtagcttgggtattcatattaatggcaacatgaccacagccacttgtgtgattactactatgtgaatgagcatccccgttttgcaaattagcagtcctctgcaagtgcatcattccgataccctcagcatctgatgatgattgttctatgtactgtacatcttcgttgtagccattgatcaagaaatccgaacaatttttcctgattccatgatcataagggtttctgaaccgatcaccagggcctttaaggtagctgtaacgcattgcatttgccatttcgtttgttgtaatatttcgagaaatctgtattaccaatagaagaaatatctgaataatgaacccatcttgcaagaaagtaactcgggggagaatctaataaagaatgaagcagatttacctgagaggcttgtacaacagttaaaacagccaccccgaagaaaaggaaaaaatccacaatcaaaaatgacatcacaccagcatgaatagtagcgacatgactaatccaagctccaaaagtggatggagcaagcggatcactcaaaattcctacaggcaacaaaataatttgtaagattaacagaaatgcatccacacaactacggcacctggaaaaatttcaacaggtagctgatggtggttggtcaataagaacttacttgaaagggctactgctccagtaatcaacatagccgaaacttctaaagcaagaaaaataaagaactcccatttgtttttctgcatcagatgttaaaagtaaaattagatatatatataaataacagattagaagcacaataacataatccctcatcgttaaatcttcagcatgcaacaaagcatggaaattgatacatcattttcatattagcagagaatatgaagcagcaaaaatggagcagcaggccaacaaagatcgttccaggttaatccgaccatggatttacaatggagttttcttccaaccaggatggaagtgatatataggatcatcactagtatgtcccaactttgcatggcaaagtgtatgcttgtttttttttataagccaatatggcacaatgaaaagggttttactagtataatagtttttctgcagataaagaaacagtcgatgcatagatacacaaaattgaataatatatcaacgtcaacccaccttgccaatgcaattggagacccaagggcaatgatgatcaaattgttcaacacagcgatcacaagtagaacaatgctttgcacgaagtggcctgacaatctaataaaaaagcaaaaatgtagcatattagatgaagatttgaagagaaaagcataagatggtcacaaaaatgctaaaagaaaattgttaaacagcaccttgcatgttgcacaaagctgagaccaattcccagctagcagaacagcattattttcaatcgtcaaaagaggcgcctaatagaatgaatccaatatccacaaactcaatcaataaatcataaattaaaacatcttacatttggaagaaataaaatacttgtccggaactaactacttgagtggtcaaggaagagcataataaagtgatgcatggatcaaacaatgatctaaaagaatctaaaagaacatgatatagaaaaaataaata

SEQ ID NO: 68864 - DNA, 630 bp, Cannabis sativa
cagcaaagaactatcaaatcaactcaagttttaataaaactaataaaatttaatgtaagcccgaataaaaagtctaacacatgctttgtttggttgctctaccatccagaaggtttggaaaataacaaccttttatgaaaatattaataaacttaaatgcttgtcttgtaatgatgctttatatgtaacctgacataatgcctatcaaagactttcaattttttgcctgtctactttggcaaatatggcattaaaggaataaaatgctccacaaaagcaagtcacagatgcctctataaccattcaatggacgtaagactattttccccaataccaaccacacaatatagcaaacatatcaaacaacactcatgaagttaaaagctcttcacatcattggcagccaccacctccaggccaactcaagctcacgactgatacaatccaaaatactaaaaggaacaagatgcgctttttcttgatatttcaaaactcacaataaagaaatcgacgcagctttcgctaccccttggaaaggcattcaccacccacttatgatggaagcacactcttgttacgaaaattattaacactacccaagtatacgcaatcaagtagtaaactcacaca

SEQ ID NO: 68865 - DNA, 605 bp, Cannabis sativa
  modified_base (325)..(337): a, c, t, g, unknown or other
tctcatgcatgtgccattgctggccagttgaggcaatttattcaagagaaaatatatttatttttttatataaatataataagtgcatatatatttatattatatatatatataaaaaaaatgaggttatataacacaatttttaggtattgttttttttttaaaaaaattttataatattattatatatttaaaattaataatattatatcgatattttataaaagaaaattaatttaaatttaaaatatggtagatattttatataagaaaattttaggatctttttcaattttagacttctaaatttttttttttttttttnnnnnnnnnnnnnaattctatatagaaacccctattgcaactagggttccaactactttagaaacccaaacgataaatttgaaaaaaaaaaagttaagaaaacaatataggggtaattcccatttttaattatcaatattttatattagtcttctggtcatatttaatgtgcttatattatttattttttttctttcttttcaatcaatatataagtggagtgaaacgtaataatttttatgattttatacatttctcatgatttttaaaggcacatgatc

SEQ ID NO: 68866 - DNA, 1008 bp, Cannabis sativa
aagcaacccaacaaatcaactgtaaaacgagatttcaagtacctgaaaataagaataagaaaaattcaattagagttaaagaaaaatgcttaaaaaaaattcaatattagatcctacatattgtaatttcttatgaaatcacactaatagtaatagcgacatgtcaatgtcatatcttataaagtgttttatatagcaatgctcgttaaaaaaattgtggaagagagaaagagagagaaggaccgaagagcaataagtttgcgatcgcagatcatgcggtgggaatggaagtcacgataggcaacaaagaagcgaacgacaatgtcaacaagaaacgcgaattggccggcgatgtcaagaaggaataggtcttcaggtagtcctctgaagaagccgaactccaacggagtgaaaaaggaggagtagaccgcccatataagaatgaagtgagtccatgccatgtaccacctacaaaattgccccacaaaaaccattattattaggagaattatcttatatattatttttttaatttttttttaaaaaaaattacagtttgggttgctctagtagtttttctagtagtttctatgtgggttgctatacgaattttggttgcgatttaagttgcttcgttagttgctatagaagtttctgtgtgtaattccgtaaaaatacaaaaaaaaaaactgttttgaagtataaaaatgaaaaaaccccttattattataattattattttatgaatcaataaattaaaaattctttttttgaacaataaagcttgagtatagtagcattttatgagatttacatccattacaaatatataaaaaaaaaacaagaaaatattaaaaaaaatctcctatcaaatttatatagaacatttttcttcatttttttctctactaatttctatcatcatttttttctaggttaaatccaaattttaaaaaaaaaaaaaaatgcctcacactttgacaagtgatcaaagaaaatgaaaagtgt

SEQ ID NO: 68867 - DNA, 785 bp, Cannabis sativa
caacaccctcttcacgtgtccttccctgttggaaaagaaacaaccatcatcattgttggcttgagtttattttttatgtgcaagacctttatccttagcagtctcattcttccttttattgcccttatccttagaggtgcttgccaattgagcactttcagtcttatcttgctttagtctttcttcctcttgaacacaaaatgaaatgagctcattaagagtccacttctccatttgacagttgtaactgactttgaattaactgaattatggaggaagatagataagcgctaaatgcaaaagcaagtcatctgaaagctcaagctttagtgcttttaacttttaagcaatgtgagatatttctatattgtactcccttatatttttcttgcccttgaacctcatgaaaataagtttctttaaaagagtacttgtttctgccttatcgctttttgcaaagtgtttctcaatttcagtaagaaaagttgtggcattggtgacttcctcagacatagcacccttaaaagcctcaagtatgtcgcacttgatgatcataagactcatgcgatttgaacagtctcacttctgataaatcctcctttgctcggaggtactggtatccgtaagaagagcaggtcgatccatccttaatgcaaggtcaagatccatgcaatcaagaacaatgaaaatgtaaggactggtaccacatgttcaagatccatccatccttaatgcaaggtcaagatccatccatccttaatgcaaggtcaagatccatccatcct

SEQ ID NO: 68868 - DNA, 1715 bp, Cannabis sativa
ctcaaggcatctgcaacaatattttcctttccggtgtgatacacaatttcacaatcatagtctttcactaactctaaccactgcctttgtctcatgtttaaatctttctgagtgaaaaagtacttgagacttttatggtcagtataaatttcacacggttcaccatataagtagtgtcgccaaatcttcaaggcaaacaccactgatgttagttctaggtcatgagttggataacgttgctcgtaatctttcaattgtcatgaggcataggctatgaccttgtctgcttgcattaacacatagcctaaaccttgcctagatgcatcacaatacaccacaaacttttcttgatcagatggcaaggctaaaactggagctgtaatcaaccgttgtttcaattcttggaaacttttctcacacttatctgacaatacaaaccgctgattatttctggttaactcagacaacgacattgcaatcttggagaatccttctacaaaacgtcgatagtagctcgctaaacctaagaaacttcgtatctcagtaactattttcggtctaggccaattctttactgcttcaatcttccctgggtctaccataatcctatctttctcgacaatatgtcccgaaaaagacacttgtgacagccaaaactcacactttttaaattttgcataaagtttatggtctctgagccattgcagttctatacgaagtgttgctcatgttctgcttctgatcgagggtacacaagaatatcattgataaacacaattacaaagttatcgagaaaattcttgaataccctatttatgagatccataaaagtcgccggagcattcattaattcgaacgacatacggaatgtcttctttccggattctcaattgatgatacctagacattaaatcaatcttggaaaacattgtcttaccctgaagttgatcaaatagatcgtcaattctgggtaaagggtacttgtttttaattgttaacttattcagctctcgatagtcaatacacattcgaaaagtcacatccttcttttctacaaacaatatcagagctccccaaggcaacacatgaagtcaagtgaaccctaaatccaagattccctagagttgtatctttagctctttcaattgtgcaagtgccatacgataaggtgcctttgaaataggttctgcctaggtatcaagtcaataatgaaatctatctcccactgaggtggtagtactggtaattctttaggaaacacatctaggaattctttaaccactttgacctcctcaggtccaagcaacataggtttaccataatcaattacaactgctagaaatcctatgcatccactgcgtagtaaatgcctagccttcagtgctgatattctagggacacgagaaccttgaaccgatcccacaaaaacaaatggttcctcattttctagttgaaaagttactatttttcgcttgcagtcaatactagcagaatatttaaatagaaagtccattcctagcatgatatcaaactcagccaacggtaactccactagatcggcacttagttccctgccctcaatttttattaacaaagatctaatccactttctcgaaataattagttccccattaggcaataatgtttcaaaccccatttcaaacacatcactaggcctaccaagctgattaagtatccttgatgctacatatgag

SEQ ID NO: 68869 - DNA, 1264 bp, Cannabis sativa
aacattactagctataatgtaattgcaaacattacttgctgtattgttcttggtgattatttaatacttcattgtgctatcaaaatgaatttacttgatacgtataggcctatgtattttaatatagatataactaggattttggtggactggtatttatgttgctctacatctagttgttgcctttttccttgttgaaacttaatttgaggcttttagctatgtgtttatgtttgtgactaagctgtttgtagctacacgtaaatatagcataagatggtagattgttgtttacattttctgtaaggataatcagaatgaagattaggagaaatcttaacataagggtatgttatctctgtttcttgtagcttggtttagaaaatatgtgatcagaaatgttaagtactatcggttttaaatgtgtgtatatgtaaaaatggtattaggtattttggtagatttttgaattatttgtgttttgttgttattactttgaataataataataaaaattacatctatatcacagcgtgatccggagtctgggcgattggcaccgatcccagatgcttggcaggccactcaccataagcagggcaaaggatgggtgaccgacactgtagagaaacatgggtatattttaaacaaatattatctttatattttttgtctaaataaattttataattaatttaaatattattgtttgtttaataggaaaaggaaaaaatgattgccatacccatacgttacgtgagacacaacaaacacagtccattccaaatactgaagtgtcaggcaatgtcattaatatagaagacgaagatttatcacttgtgcaatctgtttttggaagacatcgtgggcaccaaaagggttatgggcgtctaattagcacaagagagcaggcccacctacatttacccaacctcctccacctcaggttggtgcatatgctagagctgatgtcatagctgatatgtaagagcggattagacagctcgaggaattggttaggacaaatggtgtcactccgagaacgcagaatccacctcaacaatctgatcattctgatgatggaggagcgagttagtagttgtgtttatatataatgtttattttttttcacgaaccactttattagcatgttaggtaatttaacttataactttaaaatttaaaaaagtaaatttacggtatttttattaatgaattttatttttaatattatttgagcaatattaatgtgaaaataaaaaaa

SEQ ID NO: 68870 - DNA, 865 bp, Cannabis sativa
  modified_base (48)..(59): a, c, t, g, unknown or other
aaattttaaaataaatgttaactaagatttaaaaaaattataaaacannnnnnnnnnnntatattagtaactaaatggtttcttttctagaaatagcgataaagtatatatttctcacatcttgaaatgttcacatcaaggagtagatttcaatagtattttttttttttttgtagggtcaaccaagtaatgacgtggttatgaattatatttaggaaaattatctcatatgctattttttaatgtttttttaaatttacagtttgggtttttaaatgtggttttttcggtagtttctatatgtgggttgctatacgaattttggttgcgatttaggtcgcttcgttagttaaaataggagtttctatctagaattccgtaaaaaaaaaaaaaaaaaactcttatttgtaaacgtaacaaaatgagaaagaaagatgaaagacaaaaaggcatagtcaagcaataaaaggaaagaaagaaaaacaaaaacaaagagagaaagaaggacagactacagtaggcagtatcaaaattcaaaacatatctaaacgaagaaaaaacgttattaattaaatcaaagataaggtatcaaacgtgaaaaaaatctcaaaaataaataaaataacataactttgtagtctaaaaaatagacatatactgtcttacaattgtagcttctaggcccatcatcagatatttaatggcccaaaaattataaggcccacttaacttattatgcttaccttgccttgatgggcctgcaggggcaaagttggcccaaggtgtttatttagtaaaattaatagtttgagattagtgatgaaagtatcacaaaatactagattttgagcaaaagtttacaatt

SEQ ID NO: 68871 - DNA, 684 bp, Cannabis sativa
acacagtatactgcagtatgaaacctataaaaaaatacagtaaaaaagtaaaaaatagagcctcgcagtatttttgtaaaaaaatgagaaaagttagtataccataccatgtaaatttccctttaaatttcagcttatttgccaatataggaaaattaccctttcttttaactaaggagggtccacttctgcctgaaaggtcaagaaaacgtacaccgttctttttgttgcacggcttatcatgtgagaaaacccataatgcggactcatgggattccaaaggagacaaaagatatattatatattacaatgagtgaacccaacaacttagataaatcaaacagcttttgttctatcaatttcgaccccccagtcccccccacacacacacacaaaaaaaaaaaaattatgaattaaaaaataataataataataagcaaagaaagaaattggatacatcatacatatacttaatttgttttcttaaaaaaaatatgtatttaaattttattaaaatctatatgtgttatgtcttatctgcactcttttcctccatggtgactaagaacatgatttcctcgttggccatgctttgtttgtttgttctaaacaacgcatggcagaaaaggttgttgagggccctcatgttgaatgaaaatcttataaacatgtccagtccactct

SEQ ID NO: 68872 - DNA, 518 bp, Cannabis sativa
acaattcacaagttgctaaccgaggagggtgattggaagacggacatgattcatgcttactttcacaaagacgatatcccttggatcttaggtacacccgtggacattcaagaggaagatgttttaacttggcctctctcttctaaaggtcattacttggtgaagagtggttatagagtagcccgagagcttaatgtttgtcccactagatgttcgaacatggaccaaattaaagcttggtggaaaatgtggtggcacctccaactccctccccgaatcaagttatttggttggaagctttgtcataattggctcccggctaaatctaacttgatccataggggaatgcaaattgatccggtttgtcacttatgtggtacttatgtggaatcgcttccccatgcgatatggagttgtgccaaggctaaagaggtttggaagcttttaccttattactctcgtatttgtaagtacaaaggtggatctatgtttgactttcttgtggagataaaacacca

SEQ ID NO: 68873 - DNA, 703 bp, Cannabis sativa
tggaggcttgaagcggggacgttacagatttctttttttattttctcatattttctcaaattgtataaaataattatgttgttacctatttaacaagatttttagaaattaaattgagttaaaataagattgagctaaagaaattgtgtttaagaaataaataagatgagattttttacacgtttggggcgttaaaaaactttagtccacaagtcaatattattaagctcttgactatggagtattttactattttttctcttacaagaatgactcgccaaaattcgtaatccttttgcataaagagataaggccttatttataggcattttgacttatggatcagactgatccggacccatcagggtctaaaaactagaaaaagaccactaatgggaaaaattacatttaaatattgacctttagaccggttaggtaaggcccaatgtgttggtaaccatcatccatacgcggatgtactagttaacattgacagttgttaacgcagattttcgttaaccaaatttaagtctaatagtgataatctcacacagaaaaatgaaagcagtaaagtaagaagcatgaacacaagagattttttacttggttttgtagttaaaattctgcatagtccacgagtcaatcttattagatttctgatagttttttcagggcctcttttttcgtatgattttttcgtccc

SEQ ID NO: 68874 - DNA, 893 bp, Cannabis sativa
atatgtaagttaataattttaaatttatttaaaaataacaattactagtattattttttaaaatgaaataacattttttttaaaaaaaaagtgttataattaaaaaaaaaattaaattacatatacaaatttaaattattttttttatttaactgataaaatttaatatttatctttataaaaaaataatattaaatcatacttttttttttaatttatttttcattattctaaatattttaaaattttattatgaaaagtttacattattacttaaattttaacaacaaaacatttaatttttaacatacataaaaaaaaatgtaaatcaaatacaatctataaatttataatacactaataaaaaatattcacatattccatttaacttaacaaataataatataaaacatacatttcacaaaagaaaaattgtgaacaccttctccaagatgctaaaaatctaatttaaatcttttgccctaacagaaactaatataaaaataatatatatacacacatatgaaataaataaataaatctatatatacacaaaaatagaactaaaaatataaaaaataataaaacaatacacagttaattaatatacacaaatcacctatctatacacaacaaataatttagatatgcacatgtatatatacacaaaagttaataaatacatatacacatatatataaaaataaatatataaacacagaaattaatttatatatgcacatatatatacatattaatttatatatacatatgtatatattcacattaaaatccctaaaataaaaggaaaatttgaatttctatcaatatcttatacccaaattaattctctaaatatatacttataactattgaaaaaataggatttcttt

SEQ ID NO: 68875 - DNA, 1120 bp, Cannabis sativa
ccaattatagaccttcatgtacctgcaatgggtgttcttgtggtggaatcaagaagctccaagaacaccatcacatggaatatataatgtcctttctcatgggactttggacaattacactcaagttcgaagcagtattcttctgatggatcccttacccgaagtcaatcgtgtctttcatcttgtttcccaagaagagcaacaaaagggaaacaccattggaggtactgaatctaacatgacatttgcttttcagaatgataaatctgctggaaagaaaactgattctcagggttcaaaagggcagcaaacaaaaagaaatagacccttttgtactcattgcagtgttcttggccatacgatcgaaaagtgctataaaatacatggttatccccttggatacaagtcaaatcagtccaaggaagctgctgcaaaccaggtgcaaaccagcaaagattcgaaagaaaattgcgaggaaagcacaactcttttccctcaactcaatgttgtccaatatcagcagttactgaatttacttgccaaccaaaacactggtatgaccgattcagatccaagtacctcaactggtacgacaggtatcatcttatctttaaactctacgtctcctttaaatgagtcttggattatagattcaggagctacgagacacatttgcaataatgccaggttgtttcgaactatctattgcacttctaagaccaaacttatcctccctaataatgagagtatgtctgtatttcaaagtggcaccattgccataaatgacaatctgattctcactaatgttttgtatgtgcctaactttaaatacaacatactatcggttagttgtttagcagaaaataataatataagtgtccattttcttgctgatgaattttatatgcagggcaaccttcacaagaaggtgattggaaaaggtaaatacatcaatggattatatgtcttggatctcactcctcaacctgccactgttcttacagtgtcagtagacacttggcattcaagactcgggcacccttcaaagaaacgtcttactttactcagcaaacaactaggatgtaatattgagttatacatactgagaaaccatgttaca

SEQ ID NO: 68876 - DNA, 1226 bp, Cannabis sativa
  modified_base (188)..(191): a, c, t, g, unknown or other
aaaatatttccaacagtatgttgtatactaacatctcagataaagtgagggaccatggtgtggtatgatacggggtaaggctgttgaatgtagagataccctaccctgcatttttctaactcatgtatgagattgttatgatagggtatgatacggggtaaggtcgttgaatgtagagataccctacnnnncattttactgagtcttgtatgagattgttatggtggggtatgatacagtgatgttactattgaatatagagataccctatcctataataagggtagggctgcataggcccaagttattacgtgggcagattaggcctaagatattgtaggaccgagttaggctcgggtgatgtaagtaatggctatgatatgtcaatattatggtaatgatatttttattttataatattgatatgattatgttatgagtatgatattgagttataagctctgtatatgtgtacggtgtgaacaaatagtatagacctatatgataaaggtttccatgtgtagcgtatttagttatggttataaaataacgtgtatgatattgctaaaacttagttagtacattaatgatatgtgtgatattgtatggtattgtatgataagcattttcttactggacttttagctcacccccttactttcccctataggcaatagacagggaacattgaatgtaagtttgatgatttgagtcagttctagtatgtatactgcgaggggctatggacgagaaaacgatctagaacgctggtagagcctctgttttgtttttggatagtaaaataatctgagcttagtggggtgttgtaaatttattttaaaaatgccatcaactacttattttggtttttaatatgaatgatcattcttttttttttctttttcgcatatttattataaaatccaaagtgtatttacaaaaagttttgaatcttttcaattaatgcattaaaattagtattttataaaagggatttttacacttggtgtcttattttgccatttttttttacatttttgtctttatttggttatttaaacattttgaaaaatttgtttttcaataatatattttaaaaagtttgataattacaaaaatacctatgctcccatattacactccatctataccaccttcttctctttcattctttttttttttaattttgcttttatttctgttagttttttttttctttttccata

SEQ ID NO: 68877 - DNA, 838 bp, Cannabis sativa
gattttataatcaagaggaaaaccacgaacttttgaatgtgtccttggatctacttgaagaaatgagcaatgagtcgcaaataacaaatgcagcttaccaacaccgaataacaagatacttcaataaaagagttcaagaaaggttgtttaaagtagaagatttggtgttaagacgtgtatttgcaaagaagcaacatcccgctgtagaagtgtttaatccaaactaggaaggtccatatgttattgaagctatcgtaagagtcgggatttacaaattagcttggcttaacgacttcctaataaagaatcactggaacagtgaacatttacaaccttattaccagtaatttaatgggtaaatgttatatttatctctgtaatgattaaaaattgttatgaataaaattaaatttgttcaagcaattacaaagtttctttcctttaaaattacttgggggcatatatatgtgtataataactagagtccacctagaaatatatattgtattgcaaaaacctaaaaaaaaaatcacaaaaggaaaagataattaattgaaattattttaggacagtataaagtcaagaattgaaaaaccttttctttagaagaaacaattaaaatagcaggtgtaaatgagatttcttctcgtaaaacaacagaaagctatatgtgaactgagtgaatcacatctcgtattatcttagcatgtattgtaaacgagacacaaatgtgccttgaaaagtaatacttaaactaaaaatatgaatagttcctaaagtgaattattcaaaatatttgaaatttgcattataactgctctcgtagaacataacagat

SEQ ID NO: 68878 - DNA, 643 bp, Cannabis sativa
ccaagataggttcacaaattgtcagaacccaaaagatttgtacaagcttggcttgtgcttgtttgttgaggcaatgcttctgggtcgcgaggctaacgcattgattacttattttaatggtgtaagattcttgagtgatcggggtgtgctccggttttccaccaccgcccactgagaaacaaacagtcttccacattctgcaacacattcgaagaatgtcgacagatttaattcataaacaagacaagtgtactgctccctcgattcacttgtctgtccaccatactaccagatagtcttccgtgtgatagcatacattacttgccaatgcggaggtggtggaaaattgtcatcttccatcatctctgaactcatccaactccaattgaatcccttaaaccactttaaatacatatttaatgctcctctaaacaccgacttacattgattcaaatttctgaacaaacatcaatgttagtatgcatcttttgtatactttactcaataagtaaacacatactttctatcatgcatcactattaacacatagtcatagcatgatatagataaaattttactcatgcttttctaataccacatttttcaataatcataaaaacaaacaatcaatcaacagataagc

SEQ ID NO: 68879 - DNA, 768 bp, Cannabis sativa
tatattaggtttaagtatttttttcaaggcatcttggtgtctcgtttaatactttcctacaaaatgcgagtcgttagtatttagcttcgcatttagcatagtgtcatttttatgagttatatctcatttacaactgctacttttgatttttctttctcgtgagaaaggttctttcataaaaaaaactttaaaaattttacatttttaaagtgtagtgggtttgaaatatatcatgatatcatgtatttccagataaattccggttaatcatacacgcacatatatatgcccctcaagtaattttaaagattgaaactttgtaattacttggaaaagtgattcaactttattaataactgaagttcaaaatattacatcagaaatagaagttacaacatcagtttattggtagtagggtcgcaaatgctccacattccagtagctctttaccagcgagccgttaagctgagctaatttataaaccccaattcccactatcgccttgatcacataaggaccctcccagtttggcttaaatactcctacagacgcgtctctcgtattagcaaatactcgccttagcaccaagtctccaacgttgaagagcttcttcttcactttcttattgaagtatcttgtcacttggtgttggtatgccgcattagtgatttgcaactcaatacgttttcatcaagtaaatccaaggaaaatttcaatagttcttggttttcttcttgattataaaattcttgtctgtgggtcgcaata

SEQ ID NO: 68880 - DNA, 2333 bp, Cannabis sativa
aaaaaaaaaaaaaaaaaattcagttttcatggttataatccaaaaaccgaccgaccattatacaattgtaaaaaaaaatcgaccgttttaatccatggtttggtccgaacttcatttttttttaaaaaaaagtaagtttttaaatttttttataaatatttgaaaactaagaaaattagagtattgtatcaaatatcatataatttaagaataaaatttttttagttaaataaataatataaaataatttttttttaaaatttgtttaatttatttgtgctactgatatggtaatgagttatattaaaaaactcgtattattttatgaatgtgtgtatataatacgtaaatgcactaaatcataataaaataaagtaatgaataattgagactttaaataaaaaagatataagtaaaactagtttaataaaattgtatattaaatatgtacaatatatatgttcggtcggttctcggtttaatcagtcggtttgtcattgacactaaaaccaactatgttaaggcagttttaaccgaaggcggttttttcgatttttgattttttcggtatcggtttttttggtgtttgggcagccggtgtactcggtttggtcggtttcttggattttttgcttactcctatgagattgcacatcttacccaatatttacctttgcggatcacagaactactgactaatttacgtacaagactaataagctaacacatcataatttctctctatgtacatttactaactaaaatataaatttatatgcatatatcccaccaaatttgatcatatataaatgaatcatttggaataccatatcaatatatatttgtcatatttttcaacaatatgtagcaattaaaaaaatattttcttaacttttgtttcttatttttgctttagtactcattattgcataaataattttattaaaaattattataatttaatttaattttacatattttggtaatctctttcatagcaataaaaaaaatatttttataagaaagttacttacgatttaaaattaaatataatcatgaatatatttggataaaaaactcatttataaggataaaaacaaaatttatttatgtgaaattttaattattttttaatttatggtatatactagccccatctaaaataattttctggctttgtcattcttgttatgtagaatttccattggggcacttcacttttaaagtcatcttttacttggtcaataaacccattgcaggtggttccaggatctgatctaaatctttctttctatttttcagacagcaaactttgcatctattctttattgttgtgcaccagcaagcagtcatcatgttcatcaataagtgttttgatttgatagccaactttgtcctccattacacttacactagcatatatagaacaaaaatcagcaaccttcttggcaaattactctaattcttctctgcctccttaacaacttccttagaagcaagcaaacaccatacattatcttcaagatcatttatatatatatatatatatatatatatatatattaccctcaattgaatccacatctcttatttctacttcactactattctattgaccactctcatcgtcaccatcctcatccacatctttattatctccacatcatcaatacccgtattagcaaggaagtcccatcactttcactcatgaatttcaaaatgctatcccatatttctgaattcataattagtttcaatatttgggtttgggtttgaagtgttttgagttgagtttgaaaagtttggcactgtatttgaagaattattgggattggatttgaaatggtttgaggtcaagtcatcactcccacctcaaatatagttacattatacaatgacacacatagtacataataaacacagaacatatacattttatgcaattaaattgaaaataaaaagaaaaatttgttaaaatatacttaaaaatttagactattcttttaatataccacctttaaatgaataccttaaatattctccaaacaccctaaaattccaaaattacccttacaattcaaaagctctcttctcacactctctctgtctaacttcccccctctctctttctctgttatttccatccagccccaaacctttcaagccccgactgttcacaactccgaccgaccaagacgacccacgactgaaaagagcatgacgactcgcgacgactcacgagaagcacccaagacaacccacgaccacaacattttttttctggtttctgacccatctagcgtttgttttctgcattttttttttgtttttga

SEQ ID NO: 68881 - DNA, 1344 bp, Cannabis sativa
gccgacctgaacgaaaagtctcgtgctggatggatgccctaatcacataaaaaaattgggtaaatcacatgtccaaaaccctaatctgggaaacccaaacgtattactcaaggttctgttgttttcactaaggactacattaacttaggaaatagtgaaacacccaactaaggcactaaaatgggaaagaattgagaaaatgagttgttcgggaaatttgtcaaaactggttacccggttttacaggacctggcaaactggttaatcggtttgcaccaggtttccccaaacaacctctaacttgcttaaaactcaaccaattgccaacaaactctccagagtacctaaacagggcataaacaacatattccaaccaatacaacccagaaaaactcactgaatcaaaacatgccattgaagacctaagtttgagtttcaaagctcaaacttgtgcaattccatcaccatacactataaccaactaccagaacatagaatcaactcaaaatgaacataaaaactgaaccataacctaatcaaaccctaatagcccatattctctaaaatcactagttgaaaccaattcaaacctagagaaaaacataaccaaagagggtttaaggcttaccttgactaaaacctcctccaatccttgttgaaaatgcaagaatcaacaacaaatcccctggttttcggctggttcgaagagagagagagtgttcttattttcttgacttttggctttactttctattttcctaatttaaaatatggctaattactaaactgccctttctattataacttaggaattttcatgactaggggtaaaatggtcaaactcataacaccgctcaaacatggtattctatttcctcaaatatacatcccactaagaaataaggttctagacttatccatgtgatcaaactagccatccatcgcgtttttcgttgtcgccaagcaaaaattgtaaaaataacataattcacatataacataaataataaccctagagtttaataaaatctctggaattgagaaattataactctaatgctcatttctaacaatgggactcacaattaattgaattcacaaataactactaaaatattaataattagtgctaattgccttttctaatccatattatgaaatgcggtcattacaaatgagagccagatctttttattgtggggtagtgggccatctgaaaagaatctacctaaagttaagaaagactaatgttaaagaagaaaagtgtacggatcctgcccaagtgccgattatgactcaaagagacctgggtatcggtcctttagccaagtcaagttagaattt

SEQ ID NO: 68882 - DNA, 777 bp, Cannabis sativa
aaaaaaaaatgaaaagaaaacctaagatatggttttgtctccaaaatctttatatctctaaaactgttccccaaatagtgtattctcgatcccccataagtgtcacaatttaatttcaacattgtcattatttcttctcatagttgatatctccattctatatggggcctcattccattactactctcctactatatattatatatctatatgtatatgtaactatgagcattattattaggtactcgtggtgcttaacaagtagcaccttctcgatatgtcgcgttgcgattggctagcgatactctctaaaagctattatattaaattatatggcacccgagattaatagtgatatgccctttagcatttctcatataactatatatgtatatagttctttatttaattcaattagagtaaaatcatgttgtgcaatgtagtatatacatgacgacatctatgacgggtgaaattaactctaaaataatatcctaacaaaagtcataattagttttagggtgttacaatacactcttttatttatccaggtacttgtatcaatttttttattcgaaatttttaacggttaaactgttttaattattgttttacttgcactgaatcttctaagttaaaattttagtggtaaaatctttcaaactattgaactcttaataaatttaaggtgtcattcaattaattgctataccattgactacttatatgtacactcttatatatgacatttttatattagtacacataatattatta

SEQ ID NO: 68883 - DNA, 825 bp, Cannabis sativa
atggtagtattttagtgataattaaacgaaaagcgtataaactggtactgaaacaagcaatagtttaatccctaaataacttacgtgagggttgagtgcttaaaatttagttaaagttgtcaatttgcagctcattggagatgtaatttagctaactttgttgtgttgagactaattgagatagaaagaaattgattttattttgacttgtaaggaatagtgtagttaatcatctgattggtttcaggttctaaggtgtttgatcttagtgataaatcctgggaaagtggtattcttgtatgtgaaagcctcttgtgattgaattgagagtataacaatcagatcagtggaaattactttaatgtatttactttcatttatgccagactacctaccccaccattacaagccgacattttctttataaataagaaaagttcctctcatgttgtcttttcacaaagttgaaatatgttctttcaaaaaaaaaaaaaaaaacaaagttgaaatatgtactaaaagataagaaaacaaaccacaatttatttttgtcaacttcatcataagaaatttacaattttttatatattgtatatataatacaaacatatgtaatgtgaaatgacagagacgagataacagagaaatattacagaattatttcgatggggtatctgcaaactgccaagaatatttggttagaacttcataatctcggtcaccactgacatcatctattggtacagcattagaaatttcttccaagtcctctcctgtaagcttcacagccaaagatccaatattgttggccaaattcttaacttt

SEQ ID NO: 68884 - DNA, 517 bp, Cannabis sativa
ttagacactttaaaatatcaaataccataaaataaaccttgaatttttcaaaatggtaaaaataaaacctgaatttaatttttgaaaactttttttttaatataaccaatttgaagacaattactaataagaacagatacaaaaaatataaatagtttgtcatataacaaaacagtagatctaattggtaacttttagtccaaaatagtatttaccctattaatattaaatctcacacattctgatacgataaataatagggttgagatgcaaaatgaccctaaatttgaaaactgatttagtaaatgtccactttttttttaaaaaaaaaatgtcaaatctaataaattagctaataaaaattataaaaatacatttatcacatattttttaaaatatataataataaaattaagttatataatttttttaatattgcatatttagatcatttaaataaatatataaaagaaaaagactaaaaaaccatcaaaagacaagactaaagaaccatgtc

SEQ ID NO: 68885 - DNA, 774 bp, Cannabis sativa
tacatcgaattctctctcggtcgtcaaagatttttaaaaaacaatcgagtcacaactagtaataatatactcattctctccttccctttctccatcaatactgagttagggaaattcactattgatgtttttgcatctgagttagggaaactcgagtgacaatctacacgtagcacagaatagaaaaagagcaaattaagaattgtcgaaactaatttgtaaggatgatcatacataactatgaggatttatcattgcgttatgaggtttatgtgtatagcctaaacaccaacattctcatgagggttggtcatttttcttacttgggtggccattgtgggaaagacattcttgtaggcagttttataacttgagaacactgaatcttctattattgtcgcatttgatctaaccactaaaacatacagccaaattccacttgccaacataaatgctaagggcaatgtccatcacttaatagcggaattgggtgggtggctttgtgatgttgcaaagtccagaagatgttataggtgacttgttgaagcagagtatgttaagttttggattatgatggaatacatcgttaaagagtcgttgactaagctctttaccgtggaaccatcaaatgttactgggtctttcaaatatttaaagcctctcaagtatttcaagagggtcaataagttctcttagaccaggacaataagaaggtgtgacagtcagtggtcccgtgatccgtaaggggaaataccgggtaagctgtgcaatccc

SEQ ID NO: 68886 - DNA, 3360 bp, Cannabis sativa
aaaaaaaaaaaaaaaagattcactgataattaccactggatcaggagcatctttctgcttgcacatgacccatggaactccaattttcaatcccacagccatgtttgcagcccactgaacatatctagctcccaattctctatatgcaagttggacatggttgtactcattttcaatctgtattatataaagttatcatcatgaaaataaaataaagagccaaaaaaaataagaatttatgaaaaaactaataaatcacaaaagtgtgaccccatagcaaacctgtgccaaaataattggaccaccttgtggagcaaaaagcttctcttctttcatcttgtttataatcatcttcacatattttttcatgtggtactgcaaaaatggtaaattgtgatcaaattaatccttccatggaaagttatttattaatatcactcacttaaactcacattggggtcttataaaatttgtgttaccttgaagggtgcattatcagaacggaaaatgatgtcagggacttctctcaaccaatatggaagacctctgaaatataatatttttcgttacaattaaaaaggaaatcaacatataacaatatgaagataagtaggggataatattaatataattatgttatatatgttacccatggttccattcggcttgaatgaaaggtccaaccctgagcgttacatacattccttgttcaccaatcaatttaatgaacttcaccaaatctttgtttccttcaaaattaaactgcaaaaataaacaaatataagccaagagaaggaagtacataattttatatatatatatatatgtacgtacttaattttttttttcatttttgaaagcaaagtacgtactaaattaatgtaacttctataaagaaaaaagattaaaaacgttgtttcacctcgcctttaacaggctcatgaatgttccaaaaaacgtatgtctggatcacattcaaaccaccatgtttggccttctgaattagatctggccacatctgaaaacagcccatgtccacaaaatgatcagaaatttattatatcttgaatccatgattaattatatatatatcagctggttggattctaaataatcaagtaattacatctggggtactacgcggataatgaatggagccagagaaaagaagctctcgttttccattgatgatcaaagaccttccatcataaacaacaccctgaatatgtctccctctttgagaaacgacagtagaagacaacacaaccgaaagaatggcgagtactaaaagcacatgccgaccatcaaacaccattgttgtcccttcccttctcttcttcttctctcttctcttgtttatttatatatatatattctttttattcaagagattttctctttgctcagtttctgggaagacaaggaagaagagtagtatagtaatggtttgttttgccagctttagaaaaatggtatatttagaaggtgaaggagaaagtccattataataaattctaattttaggaaataatgttaaggtaataaatataataagagctttttgttctgttttgatctctaggtagtgattgttttgcttaggtgttgttgtttcaagtttttatgatttaatcttttttatttaattattttaagttactattgttaggcaatagaggacgattcttttggcatttcattgtggaggaaccacacccaagagaattacttatatgtgatgacttttccaactgttttaacgattatttagattttgatgtcatcacacatgataacctcttttatttaaacatgttaatcatttttaaaattgttaaaaataatatttccttcattattagttaaaaaaaaaaaaaagtaaaaaccaaaagaaaaaaataagttttttaatgataatcttgatataaagtttagatcccttgctcaaatattgtgtctttgtcaaactaatataatatatgaaaaataatattttttattatatatattataaataattatattattaagttatatatcataaataactatattattatgagaattaataaaaaaattaaattattctattaattttctttaattgttgatcaaatttatacttaaattataatatatgcctgcaaatagtttctatccatcaacacaaatataattattaaaataatttgttatgtgattattatctaatatataattattcatagagagtgattaaaataatatattattatagtgatataaggaattagaatattttgacaaaaaattataatatttatagataaactataatgtatgcatattatttcataacaatgagtatgattatttatatttatttgttgtatgattattagctaatatatgattaaaaattaaaaatattactcacaaaatttctgacttataaaagtataatagttatcaaaataatttaaattatattaaattacaaactattttaatggaaaacaaatataaaagttaagtaagtaatttaagatgtaaaagcttcaaaactacacttttcatataattataaattatagattatttactatattttgaagaacgagaacaacaaactatggaattccaagtatgatgatgtagatattattgtaaatagagtcaaggaatctgtaaagctccgaattcatgtagtatggcccaaaaaagttagcgcaagtgatttaaaatggtttcagatattgtaaaaactaggtaacgagcggttgtttaaaaacttttatttatgttgtaaaaataaaatttatattaaatatattaaaaaaattattaattaattaatatgttaatgtcctatgaaaaaatactaaaaattataatcttaatatgttaaaatattaagtcacattatttaattaaattattattattactatcgtaagtttgttatataaattacacgtataattatttgttaaaatatgtgaaagattaatattgtttaaaagaaattactacaaactaaatcaaccacaaaataaataatctaaaaaaaaaaaatagagagtcagctcattatttttatagcttgcactaataatgagcattaaaaaaaagaaaacacaaaatctaataagaaaaaattagcgaataagcatatctttttattattattattatattttttttaagataccaagtttagaatgttataaaattaatgtaaattattcaaatattttgtttatgttttttttttaccattaaaatgtgttttttcattctaaaatagtctattgattttttttaaaaaaaaaatctataataataattatgaatagtaatatataattgttgaccgaggtt

SEQ ID NO: 68887 - DNA, 1145 bp, Cannabis sativa
  modified_base (27)..(40): a, c, t, g, unknown or other
catgttcttatatatggctcaattctnnnnnnnnnnnnnnatgtgggacaatgtccacaacatgtcctaacaccactgcagaaagaatttcgtttaatgtaatttgtaccagataaatgatgaggttaaagcacaaacaataaaactggataaaaaaaagtgaagctccattttgttgagtatactgttgaataacagaaattagttaggtatttattaagtcttagttagttatgcaagttgtttttttttttttttgtttctgtttttttttgttctattttggctacttcgttctctgttcttagatgctactactataaataacagcttcaattgtaagttgattcattcagaaaattcaataaagaaaagtcatttttaaatttacaccctcttaacttggtatcagacgctgaaggttcttccgtggtttcctccggtaataatgcttcaaccgacacttttgttgttcccacaataatgtttctccctctacttggctaatgtctttcatttctgaaactatgctgggtcatgttgtcaattgcacctctactcatgagctatgacacactcttaaacaactgtttggaacaacatcacgagcctcgtcttagactatgagtgcaaaacagaccaaggaagaggaagaacaaagcaaaatactctgtgaaacaattttattatactctgaatgaatttacaatacaaaggaggagtatatatatagtgtaagctgagttagttagggaataactaactcagctgaacataaccgaaaattaagaacagaaccaagaaatggttcactgatattggtgtgaagagataggggcaatatcgtaatagcccccctcaagctataatgtagatattcgaaatgctcagcttggagataatgttgttgaatgatgttggtagcagagcctttgtaaagatgtcaaccaggttattttgggattgaacgtgaagcaacttgaggaatataaatgtgtgttctaaatgttaatagaaatataaatgtgtaaatatatatatatatatatgtattttaaaattatgcaaatagatattaagggtgactatctaatagttatatttttactgtaaccatcatggttacatttttctttgacctgtaa

SEQ ID NO: 68888 - DNA, 2558 bp, Cannabis sativa
ttagttagggtgttacaaagaaaatcatgagaaaaacaccttatatttactcttcttgcaccacaacaccgatctcacccttctcgagcaagtcatagaaagtcctcacttttctttactaatgcctaaatactaatacaagtgatagctcacctatatctatatataagcaccctaataaattattccatactaatattatttttattattattttattttttttattaatgtctcatgttttctgtattttttctttcagcattaatgccaaaggtttgatttgggtgatgattcttttttaggtttttttttttttttgcattcaaaactaatacctaaaaactaatatgggtgatggctcttcaacaaacataagaagttttgtatttaaaaaaaaggtaagaaacaacttcattttttttttaattttagaatttcaatttagactttctcaatatgtatatggttatttattccttttgataacttattactccacccactttaatttattgatttttattttaattaacaattattacttctatatgtattgattttttttattttatatgatagagaatatgagtagtttggttgaggggattctagattagaaaaaatacttatttataatcttgacgatcctattgaatatgttaatgttgtttatgggaatagacgtatacttagaagtttgaaaagcataaatatatattttagagtaattttgtttatactattatttattttaaattttaaaaattaaacattatatacccatgaacaactaataccaaatttaaatttaaaatatacaaatcattcaaaatataatttaaaaataaaatttgcatcttatatatggtatatatatttgtgtgtaattctaaaattaatttagtaagtaattaaaaaaatatttattataattatttaacaaatgatttcaaaatcaaattcaaaatataaacatcgtatataaaaatatcatagttatatctttcaataaatataaaatatatatataaacaaaattaaaaaaaaaaacctaataaatcaatttgaaaataaaatttacctaacaatgtaataataataatatgtatataaattgtgattctcaaataaaaaaaataacaagatttatagtatgtataaaaattaaaattttcgtaaggtaaaaatttatcgggaacaactaaaagtaagatgttttgtagtaaaataaaataatacaaatttagaaaatttgatactaattaatattattaaaataaatatatatagaaaatattaaaattatcactaaatattaattacaaaaaaatatcactaaacagaatataactgtacgggaagcgtgatttgttttctagtttatatataatataaaagaaaacatcaacagtgcaagtggtactctataagaattttctcacttattcttaattttcttaatcattttttttaaaaaaaatttcaattattttttaagctaaaaatttatatataatacatcaacattaacaacacatctattatctataactagggaatggttaattgagaattatatatattaaaataattttatattttatagtaaagtttatatattttatgatttaaatgtgtgaataattttatagttgtcgtacaatttaaattattataaaaataaattgatttgtatttttttctcctgattttttttttttaaaaaaaaactattactgatgtgaaacattctctatactaagttgtgatctttctcttactttctgtcctatatggttaatataaaaactcatttggcacattaaatcctagcatgttttagttatatcaatgcaatgtgtataaaataaataagtattttaccttctaactgttttaaaaaaaataagaattgtactttctaaatttattaacttttaaaaattagttaaataattagattaatgaaaagtcaattattttaacatatatacatgcatttttagagacaaaaaaaaatatttatatgtattatatcttaataaataaattaatttttatttttattttttaaagctattatacataactttttaaatattatgaatttattattatattttcaactgtatatagaaaagtataaaatatgcgaagaataaaaaatcaatccatctatattacataaagaatttgttgatgattaatttttttataagtttatttataatactaattttacttcttattagtgttaatatcatgaattgtagatgaagatgtttataagttattaatttttaagagaagtatttatctattaattatgatatagagattaaaagtataattcaccaaaaattggaaaaaaaaatcaaaattctataaaaaagaatacgaagtagaaaagataggacgtgacatgattttgcttagtttttctttagagaaatactaaagggcaccattgatgcctagtatcctcttacgcgtcaatatcgctattggtgcaattaagtatcgggtcccatgtagtttaatataataatttggct

SEQ ID NO: 68889 - DNA, 511 bp, Cannabis sativa
caaaaaagttcaagctcacatatcgatatccaaacagagctacctacctatttatataaataaattaatatatatttctatattgaagatcatcaagatcatgggaagagctccttgttgtgagaagatggggttgaagaaagggccatggacacctgaagaagatcaaattctcatcaattatgtccaaaaatttggccatgcaaattggcgtgctctccctaaacaagccggtacgtatctaacaatttcaaccaaatctttcaatttgttatttcactatatgttcttctttttaccacccccgatcgactctttggtcttaagaatactgatttcacgaatgagtgattgtctttgcccttctccgacctttattgcccaacccgaaagcaaacaactgttttcacaaaattttttgatagaaaaaaaatagagtttgattctgttaattgttataaaagaaaatgcttaattgttttaaagttatttaattaattatttttatatt

SEQ ID NO: 68890 - DNA, 634 bp, Cannabis sativa
ttgtgtatgcattgtttaggtactctggaaagtttggtggtaattgggcaagttttgagcaaattggtgagtttttggggagactggtataaaaccggtttgccggttttacctgtaaaactggtaaatcggttttggcagggttccccaaaaaatcagttttctcaattctcgtccattttagtgtcgtagttgggtgttttcctgtttcctatgttaatgttatccctagtgagtatagcagagccttgagttgtagactcgggtttcacggtttagggttttgaacttgtgatttacttgatttcaaaatgtgattagggcatccattcaacgcaggactttctgttcaggtcgaccaattcatttgaatctggaaagaaggtaagaactgtatttaatatgtgatatggatatgtgaatgtatgtatatgtttagtgtatatgcatgcttatatgttgtgattcatacactaccaacactcgtacggttgcggtacagagtgcattggtaaagtgtatgatatctgaaagtacgacgtggtgttaccagcacttgtacgggaaggtacaaagtgtttgtggtacaacacttaacagtactcaaggtgcggtccataccctacctacacta

SEQ ID NO: 68891 - DNA, 808 bp, Cannabis sativa
  modified_base (724)..(735): a, c, t, g, unknown or other
aagctcatcctgttcgggtgtatatcgaccaaccacttcgacaaatattgcaaaagccagatgcctctggacggttactcaagtgggcggtagaattggatcagtacaaaatcatccatgttagacttttttactaaaattagaaaaaattccttaaatccaacaatctcaatagttcaggaggcatttcaataaccttaaaagttcagggggtatgatttggtacatgtcaaagttcagggggcaaaaatcttaattagcctaaataaaagtttattacttttacatgaaagctctttactagttctaatttttttttctttcgtatactataactaccgtaggaaacttagtttgctattatttttctttctattgtaaagataatataatttgctattattttggtgatatatttatatagcataatatcaattcttttcatggaaaaaatgtctttttagaaacatatttttcagttaataagaaaagattttaaaaaacaattatataggtgttacaaataattaatactatacataagtttatttttgtattctattttattatactattttcaaaaaaaaaaaaaaaaactattcattctgtaatatagaaaagattttacatcaacaaaatatatgagaaagtgttattttcttttaattaacatacaataattttaaaagaattacacgacacaaaatattattattattattannnnnnnnnnnnttattattatcattattattattggaaaccgataaattcattaaaatgtacaaaattaaaatttgtcattaaa

SEQ ID NO: 68892 - DNA, 2358 bp, Cannabis sativa
tgagaattaattgcttcgaagcaatacattgaatttgacgtatattttaggaatgttgtagttagagtcattatcttcaacgcatggtcttattgtgacattctacttggttggaattgaaattatgaaatccttaaaactacttccgtgaatgaacagtcagaacatccaaatggatacctgcgttatgacttgatttaaattaataatttaataccatttaaaattaattgcaaaagtaagttgaatctttagaacaaaattagcaacttttttttttgtaatattttcttatgtttttcatgcttcaatagttgaaacatctggagaaagtggtgaggaaaagatgcatagtgggttacttgacgagtccaaaggtattcatgtttcctttgtttgtttgtttgtttgtttttttttttttgggtgggattggagcaatgaatactgtaatttattttgtttgtgtgatttattatattgccgatttaccaattcctgcatatttactgatttcagaaagcagcatacctttgtctccccagtggctttatgccaaaccaactgagtcgaagatggtaagtgcttatgggcatctgggaatgttgtcactttcatttttctctttcgccaaaaagtaactgttgacgtgacgttccttggcataataattatggatttctttctttctacatttttaacacaaaaactttttatgtacggtttcttgggctcaaactttagatcttaaatatggttctatactattacaatctgaacatagataatatcattattatatactagtatttatattttaacttggttatgaccccaatttttagtttctatagttatttaaaggtattcagcttttaggcttcctaatgtcattgaattagatacaattgtaattgtgctagattttctctcttttgcaagcttttgttttaaagaatatggtatttcttgaattttttcccccttcttttaactcgaaattaatataatattgatttgcctttcatgactttggagcccttttcttggcattctttaatatgatgacaggaattacgcccttcaagttcactaggaaactccacagaaagcaaccttaaggatgtttggcgtttggaagaggacaaaaaggaccgaaagcgcattaacactgatggtgaaagtagtcgccgctggcgtgaagaagaaagagaaactagcttacttggtggtagaagagagcggaaagtggagcgccgagacaacacttcaatgagagaaactactgacaatagagcattacctacttctgagcgatggaatgatggccgtaactccgcacatgaaaccagacgcgacaacaaatggtcgtctaggtggggtcctgaagacaaagataaggaagcacgaaatgaaaagagaacggatgttgagaaggaagatactcactccgaaagccaaactactgtgggtagcaaccgtcccactgctgagcgtgacttagattctcgtgacaaatggaggccacgccatagaatggaagttcaccccagtggttcagctacatatcgtgctgcacctggatttgggcttgaaagaggaaaggtggaaggttcaaatttaggatttgcccggggacgaggaaggccaaatgttgctggaagatcatcttgtataggcacagctagcgctacttgttctgacagaacagaaagtgttcccggaaagccaaggtactcagctgataggttttactatccaaggggtaagcttcttgacctttatcgtcagaatcagcttgatccatcttttgttacaatgccaaatgagatggaggactcacctcctataacagaagtagggttggttgaaccattggcttttcttgccccagatgcagctgaggaggtagcaaatagtttcttgcttatagccttctgtatttatttttcttttctgtttcactgaaatttatttgtgtaacttgaacataacaggccacccttagcaatatatggaagggaaagataacaagtagtggtgtggtgtctaattcatatgaaaatgggagatcaactgaaaatatgacaggtaattttctagctcagggtccactgatctctgcccattattattgtcctttttagtcttaatggtgtaaactttctaggtgttggagatcttgaatctgtagatggagctgtggacattctgcccttaacccttgttggggagactaataataccatgcaaaagtttgcaaatggtgatagtactttggtagaaggtgggtggagttttgtattaatctggatatactttttttgctaacaaccccctcctctctctctctctctc

SEQ ID NO: 68893 - DNA, 610 bp, Cannabis sativa
accaaagaacatgagattaagttgatacgggttgaacttatgagtgatgagtataagagaataattagttagtgtgtatgctacattaaataattaagtgaaaaaaaaaatgttatgctatgcatggaaagcatgcacgtgtagaattttgtagcaaagcaaaaggaattattttgacttgatattagttgagagaatagtgggtttgttgatgaattggtgttagttgcatgtaagccacttccacatagtatatacgtgtggtaccagttatcaggttggttagtaatttagtcaaaaaatctagcataaaattaaaatttatacaggtggcaaactatgggaaaggcttcctctcaaaatttaaggagagtgatgtgggcactttgctaagtgataataatggagctaatttagttgtatataggatgagtgtacgtgtcaagatgcatgagaatgcagttaaaaatttaaatttcaatattagtcaaaggagattaactaacttagataatttttttcactctaataaacaaagtagaccgagtatggaggcaccttcgaggagtttaaatattttgaaatatttggagtttatgtggtcattttt

SEQ ID NO: 68894 - DNA, 727 bp, Cannabis sativa
  modified_base (590)..(592): a, c, t, g, unknown or other
accatttcttattctcaccttaactgctatcttgaccaccctagaacctttttgtcctatcccataattggtggttcatttttgttttcgcttcctcatctactagtaagttggcttcatatattccaccacatttagtggtacaacatgaagtatcggtaatataagaatagacttaagatgagcctattgttctttcatatctcagatctgttttcccttgttgtctaatcatatcctgcatagcagaatttacatgtttctagtattatagcaataaaggattctcttccttaccgtttgccccgagcccgaatagctcgctaactagactattccattgcccttattgtataacttatcacacatttactccacatcttctaaccatttaaaacaacaacggatatcaatatcaatatgcatataccatacacatattcttatcataatcatcaatatgctacttttcccagcatactttataatagccttggtaggtaatccaatagcaaataatataaatacttgctatataccatgagtcgaccttattcgaccagtcttcatgacctttaaaactatggctnnnctaataccaagttgtaacgccctaatctataggaacaccaagtgtgtgattttgtaaactcgtttaatactagtagaataattaattattaaaaaatgtgataatattaaaaacttgactaaaataaaacactaa

SEQ ID NO: 68895 - DNA, 542 bp, Cannabis sativa
aaaatatgtgcatgtcgggctgggtctgtttgaattagtgcacttaaaacgtatttctattaaaaagattactgtatatttaaataaagaaattatttatcattttgtttacatatcatttatctagaaacgatcatttcttattcattgtaacataacattgaattaatattaaaagttggagttttgatattaattaagattatgagtacaacttatctattgtcttgaacaaaataatctatccaagttattaagtgtagttgacataataggatatgggtgtcgtatatacacaataaatgattgtatgagactagggacgatgaaagcttagaactcctaataatctccattaaaatatagaagttcatcatttatcacacgatggtcgtatggactttatcttaatcctgaagtgacttatgaactcatatttatagtcttataatttttgacttatcgggtaaagtttataagagagaacatagatcatatcttacagttataggactatatatagcagggaacatattgcacag

SEQ ID NO: 68896 - DNA, 1803 bp, Cannabis sativa
ccctactgccaaaattgtaaaacaggctctcaattcttgtaacatccattttcctaataaaaatttacattatttgtgtcaagcttgctgccttgctaagtcacacaaattaccttttcccacatctaccactgtttatgacactccacttcaattattgcatagtgatttatgggatcttgcccctatcatatcctctaatggatattgatattatataagttttgtggatgcctattcaagatacacttggatctatctcttaagaactaggggtgaagctttgcctacatctaccaagtccaaaatccaagttgaattacaactaggccacaaaattaaagctatccaatatgattgggaaggagagtttagatctttcacaactctccttgaaactagtggtatcatacacaagcttgtttgtccccacacccatgagcaaagtggggttgtgaaaaaaaagtacagacacattgatgagtctggtttgaccttacttgcccaagcctcattacctctcaagtattgggatgaagcctacaggacaaccacctatcgcatcaatagaatgcccacacttgtcctacaaaatctaacaccattagagttactcttctctgtcaaaccaaattataaatagctaaaggtttttgggtgtctatgctatcctaacctaagagcttacaacagaaataaactttaatataggtcaacaccatgtgtctttcttgattatagtttgtttgataagggctacaagtgtttatctaaagaaaagagactttatatttcaagagatgtagtgtttgatgaatttaagtttccttatgccaccattgttatactatctcaacacaccaatcccatgtcctcatccttgagtcttggtattcctcctatattacatattggcaatcctcacatcccaactccaaacatcactccttcaccatctccatcaccacaaaccaacatcaccaaccttgttcatgtacctaatcaggttgtcaatgccataccagaaccaccaactgttgtctctaatccccccactgttgttcttgatgaacatgttcctactgtgaccaccaacaacattgttgtcttgcctgttatcaataacactgcatctgtttcacctgtcaccactaacaatcaatctgtagttggccccactacttcaacacatcccatgaccactcgatcaaaagcaagtataagaaagcctaaagtttttctagttttctgggaaccaaaaactgtcaaacaagcattgcaggaaccctattgcttaaatgctatgtctactgaaaacaaggctttaatcagaaacaaaacatggactcttgtcattttaccaccaaacagaactcctattggatgcaaatgggtttatagaatcaagtataatgcagatggcagtgttgatagactcaaagcaaggttagttgctaaaggctttcaccaacaagttggctttgatttttttgaaatatttagtccagttgtcaaacacaacactataagagttgttttaactattgctgttacaaaagggtgggcagttagacaactagacatcaacaatgtcttcctcaatggtgaccttcaagaagaaatttacatggttcagccacctgggtttgttgatcctcaataccctaacagagtttgcaagcttaacaaggctatttatggcctcaaacaagctcctagagcttggtttgcaaaactctctactattctccttgaatatggctttcatttctccaaatttgatccctcattgttcatcaaagc

SEQ ID NO: 68897 - DNA, 856 bp, Cannabis sativa
tgaggcagttgacaagattagagtgcgaatgctcgctgcttagactagacagaaaagttatgccgatccaaagtgatgatatattgattttcaagttggagatatggtatttctttgaatatctcccacgaaaggtattaaacactttggaaagagaggaaaacttagcaaggttcattggaccttttgagatccttgagaggatagggcaagtagggtacagattggctatgtccccagtgctagcagctgtacatgatgtgtttcatgttttgatgctttgaaaatatgtgtcagacctgtctcacgttctgagttatgaagtattggaacttcaaccagatctttcatatgaggagcaagcagtgcaagtactagacagaagagaaaaagtcttgagaaataagacaattgcactaattaaagtattatggagaaatagtaaggttgaagaggcaacctaggaactgagatgaatatgcagtagaaatatttggagttgttcaggtaaatttcaggacgaaatttctataaggaagtgataattgtaatactctaaggttagtaacccgattagtaaccctagctaggttaattatgtattaataagaaattatgttattatatgatttaatatgtgaaactattatgatttattacattttaagaccctgttggtgtgttaggggcatttttataattttgatctgagatgggtaaaatcgtaattttatggtatactgtgtttatggactatagtattatattttatgtttattctgtccttctgcaggtattttctgacaagtcggcgcggtatagtcacaaccgtgtattttgggccgaactgggtttg

SEQ ID NO: 68898 - DNA, 625 bp, Cannabis sativa
  modified_base (313)..(322): a, c, t, g, unknown or other
aaataatttttataatgtgtaaagaattaaattatgtggaccaatataattttgacatgtcatgaaaaagctgactggacaatattggaatacaccatgtaggacattaacggagaaaattggatgaaaaagctaaattagaaacagaacatgaatttaggaggtttgaccgttaaaaaaataatttgggggttacagaaaaggtaaagtattagaagtttaaccacaatttactcaaagaaaaagagttaacactatttgggactatgtgttttgtaaaaattaccgatttgactatctattttgttaaatnnnnnnnnnnaccttgtattttctaaaattgtataaataaaactctgagttcaatttttgacaatttttttaatataacaaacttaaagataattcttaacacgagtaaatacagtaaacgtaactagttttgtcgtaacacttttaaatcgagatattattaagttttattttgatataatatcaactcaagttactatagtacaattttaaaaaatacaagatttaatctattatttatcgaatcatagcgtccaattaataaattttataaaacacacgctaaaataataggaaaattaccccatatact

SEQ ID NO: 68899 - DNA, 604 bp, Cannabis sativa
tttttttattattatttttgtatgaaagatcaatttgtactttgttactattttggacctgaaatgagttttgtctgattaccaataccaaacaaacaataaatttttgtcatctaacactgttttttaatcgaaataatttgataataaaaaaaaatctaaataacagaattgggccattgaaggcttggctcgactgcagttgtggcccgaaatttgtgggcccaatagatgttttggaaaggattcagtgtagatcaaatatttggaaatttagttaagtattatttttggtaaaaattttacacttttccttttactattcaaagatttttaataagaaaacaatatcaaaacaatacaaaaaaataatatacaaataacaaaaactaataacacaaatatatataatggcagactcaggaattttacactttttcgatttaatttttttttttatatttttatagtgtactataaaaataatacgaaaaaaaaaaactacatagaaataacaaaaaaataacatcaaaacaacacaaaaaaaataatatacaaataataaaaacaaacaacaaaataactagtatatataaatatatat

SEQ ID NO: 68900 - DNA, 679 bp, Cannabis sativa
cccaccaggggaggaggtggccgatcaggatgtttcccaccagctggcaagcatagtggtgatggggctggcctagactctatagatctcaacttggtagctctagattcagctcctactgcccctgcacacatgtagattgaatttttattagtactcagcattatgtttgtatagtatagactttagttttcatgctatgcgtagcctgtggctgttttagggcatgtggcttcttagcttaggagcattactcactttaattgcattccatgtggcctatggcctttttgaaactgtatgccctatgtggccaggagcctttttagaatactattttcatgtctatgtggcctaaggccttttagaacattattttattttcatctccatgatcttcatgttcgtatcttttgccatgagccctatttttgaaaacttttagtatttgatcttgctgctttttttttatcatggattgtgtgatcgaccaggcggtctttaatcctgcttatcttcttagggccttgacaagtaagggtccagatttactgatttactttgccaagccaaagtatgcctgcacgacttagagccgggttttgtagcttatactaagcgttaaaatttctctgtataagttctttgtgctagttcgatgcattgtacagtatgggtg

SEQ ID NO: 68901 - DNA, 725 bp, Cannabis sativa
  modified_base (287)..(290): a, c, t, g, unknown or other
gctaactaagggggccaaacctctgtgaatttctttatgttctttattttttagttttaactgtgtaacacgtgaaaagcatcagattcatatgaccctgctgtcagttggctactttttgaggtcaaaactcggcaatagaaaggatcaagggttagagatctaaacagaaagagtcatatgattccactaccatcaatgtaaggttttctataactttacatatgtttaattcattattttgagaattcatatttaggatgttagattgtagatttataatcaannnncatgttagtaaatctagattctgataaaacaagtttcgacactggaattaatttgcgttctcgcaattttgcaaaggtgcacaaaagacgccaatcgcgatcctggactggaacactgctcaaaacctctacgattccccacaatctctagccaacacagattgagctggtctacatgcgagtacagataagtgttagcattcataaaataaaataacaaattgattcaagtatagagatatgcaatgtgcgaggtcaacgattgaagtctatcctaattccaagcattttgaatgcatagaaccatttcgatttccaatcccccatattggaaacggtcccttctaccccattgatctcaaaattggaacatttactaaaacaataaaagccattgtcatggccaaaattttttatgtcataaaaatagctaaa

SEQ ID NO: 68902 - DNA, 576 bp, Cannabis sativa
agggtttaggtctcgattcgagtctgaggtttgggttcgggttcaagtctggggtttggatccgagtttaggttgtggtcggggttgggatcgaatttattgtaaagaatttataattttacatctaagtcaatgtcaaacatagtattgtattaaataatactaatactatacaacctaatctaacataatacaatacatcacagtataccaaacgagaccttataaactatctctaatgatagaccaattaaacttcatttgtcttttgaataattgatttaataattacacttaaatgtttcataatccatcatgaacttagttcttttagcatttttagccagtcggtctgtaattaaaaaaaaataaaaaagagacaagtattataagcaatttattattagatcggacagaaagtttcaaataataattatcataattttggatgcacattacaacataattagattggtggagaatttctaagatctgattcacataattgaatttgataaaaatatatagagacaaaataagtgattaaaataagatggagacacttatctgtaacga

SEQ ID NO: 68903 - DNA, 862 bp, Cannabis sativa
agattagtcttttggtaaatatgagttttgccttttgacttttttagggctgcctattatatatatataaaaaaagaaaggaaccctattttaaggaattaacttccaaggcaagaaaccaactctctcttctccctgtctctctcgtgcaacttggagccagtcaagtttggaagaaaccttgttgaaattcatcctttttcttgctgaatcacttcttagaacatcatagaagcttgaggtaagtctttgttgtatgttttcctgaaattcttttggttttaagttcgttttggttggggttttgaattttcaggggggctgcaagatgtttggtgatggaatatgattttagggtagttgttgaggttgtttgagcttgtattagttaggtgtaggggctggttgaattgattaagctacatgagaatataattgtatttttcttcactttgaagtgtgattttgagcaaattgatatattgtaatgaattagttgtttggttatgtcatgtttgctatattatatgttctggaaagtttggttaggtttggtggagttttgggttgattttggaggagagaacccatggaaaattggtctgccagaaccggtcgaccggttgcttgcaagggaaatttttgggttttcttcgagttcagtttttggcccgagaagtggtgtatcatctgttttaggttgtttatgggatgtttgacctatttagaagttgttgggagttaagttatgattggtattgagttagggtttttatttcagaattttggtttaaggtattcattgagtttcaattgtcgtgacataggaccgggatcacctagcttgttttccactcaggtc

SEQ ID NO: 68904 - DNA, 1135 bp, Cannabis sativa
taactaactaatacccctaacaatgtgtatcaaattaaactttttaaggacttttgctgcaaatttcccaaaataaaattatcttaatcaaagcttattttatttattattgtagctaaaaccaaaatagaaatttagcaaaagaccacatgttctcttctactacttgctgtaagaaacatcgtaataactccctctacctactacactgactgtcaacaatggtggaataccccactttctttctcatttggagctcaaacacctctctgaactttggattccaggttttctttcttatcgcaagtaccgctaatatcactctcccattttctttcctttcttcttctattctttacccatttgtttgctttccgagaaacatttccggaaaagctatatatatatttatacatatcaacatgtttatggtaatatgtagttacttttttcttcatgttgcaaccccaaagaactcataaacctcaccatcattatttgaccttatgagctgaaatttttagctctcattttttcgttttagttagcagcgtgcgatgatttatttattttttttctagcgtgttttctgggttactgtttattgacatagaaaaagctaggggtttttgtttgttaatattactatatcattaagttgttttgggcatactatgttttgatggttgtgaagttggcttcttttcataaagggtatgaatgttgccatgcgtttggttggtgggaaaattaaaaaaaaaaacatgaaataaagtgaatgttgccttaattggtgatatctgttatctattttgttcttacttgtgaattatcatactgatagaaccttgttctttctttctttctagggtttttgagttaactgtgatagagatgaaccatatagctaaacatgtgtttttgcttctgatttgtggtgttctgtacactgtatgtgcttcaaataaggtaagaaattcgacttcatttattttattttttcctgattttaaagagttaaagattttaaatattttttccactgtgatactgacagttggtacttactttctagatctttaaccagtccattcatggtcagttgaatgcttccgggaatgaagacaataaaggt

SEQ ID NO: 68905 - DNA, 1141 bp, Cannabis sativa
  modified_base (209)..(213): a, c, t, g, unknown or other
aatttattgtgaatgtacaatttctccgtgtggatggcttgcgggaccgtctcatattccgtctaaatgagaaacaaggtggaaacgagggttattttttattttcgaatgttaaacaaagttagggacggagatgacactcccgtcctaacaagactagacctgttaaatatttaaattttacaatttatgtttgtatttttcttttnnnnnattagtatcttttttataatttttgtgtattaaaaaataattaatatattgaataattaataatgtctaatatttaaattatgcagtttaatatttttatatatttaaaattttaaaataaattttatttttacattagagattcctgcccagccttattagggattgcacaccccatctccaataaagaatatacggatgattaaaatctttaatggaaataaaatggaggagcgtgtgcatctctattgatgagacgttatcattattagctacaaacaaaattacccccaaaaaaaaaagagaaattactcatgtgagtgactgctaattaaacatcactcttaaaattgttatatatacagttatgcccctataattgaaatcgaaataatcaataaaaaaaaataaatcagttaaaataattacaaacaaaatttgattatgttatttacgaaattatttgaaaaagaaattcgcataatttgattaaattattattgttagaacatataattattttttatttatagatttttaaaagatctatttatatttatatttttaattaataaaaataaaattaaaaatgatgtgagtcagaaaagaaaaatgtactctataaaaatatgggagaatttttctcattattttctctctaatttgtgtgtgatcacttccaaaatttagaaacaattatacgagaataaataccatagcattaattttcattctccttatccatcagagtaattcaatatttttccaatatcttttaatatttttttttaaatattccccataatatatatttatatatatttaaaaaaactatattattgtaaacttttccaaaacaaaccataaatatgaaaaattttctatgccgcatcatttattatgaaactactatttcatattaattaac

SEQ ID NO: 68906 - DNA, 3235 bp, Cannabis sativa
  modified_base (1712)..(1713): a, c, t, g, unknown or other
aaaagaagacaaagaggagacgatttccataatcagaccagaaagggctgagcgatttctctgctgctttaaaattcttaagacaaggttttgacaatctgaaatcacaagatgaatgggaaaacaaactgcttgacaccaaaatagagctagacgaaagacctttgcttctgcaaaaatgggaggtagacctaaggaggctgaagagtagaaaccatcaataattctgtcctgagaatcttgatctatagcaccatatccatgtctgttggtctggttccttgctgctgcatcaacactaactttatacatccgtggagaaggttgtaaggaagacggacccaaattttcaaagatgacatcttgctgagtactattaggaggagatatgatctgagtttgagcaaccttgtactcctaaaaataagaaattataaaaggttccacttccaaaccggtagacttgttatctgcaaagagaaatttattttgttggttcgaaatagcccataatataccaaaaaacacagtcaattcatctttgttcaacacttcaaaaccacttaacaaaattctttaatatcacaagatttattattaaagaaagtgaagaagcttgattgtttccaatacttacctgccctgaaacaatgtaaaagagagtgagagttagagtcgatttggtttaaacaaatggagcagtatgggttatcaaggttttttctagaaaagagattcagcttagaaggaagaaggtggtgaaaagctttccaaacaaagtcttttattttagaaggaatattggaagaccaaaccgacttccaccaagacttaaatgcatcaggattagaaaaatcaggataggggttattagaatttgtaagatgataagcagagctggcagtgaagatgcctgaaagattgtgtctctaaatgaggcaatccttattaatgggattaataggaagtttaaggacagttaatttatttaattttttttttggataacattatgtaaagatttttttaaatgaaaagttcatttcaaatatttggatatcattttaaaaaaaaaaaaattatgagtatattagaaaatatgtaaattattttaattttaataataatttctccaaagtttttaagaaaacctacaaatcctaacttcttttaaaaaggcttctaactaagaaaataataaataaaaaataattttttttagaacaagagaaatgaattttattccaacaaccacaaagcaaatacaaaagccaagggagaaacaacccctgttagaataccaaagtgtatggttaaggtagtaaaatatgtgagtgtatggtaaggtgcatgaggttccatctcaaaactaattggcaatgagaagagtagctcatgcatcatatatatggtatttagtttcaatacattatcaatgtgggactctctaacattccccctcaagatggtggctatttttttttgctcaccaatcttgcacgacttaatcacaagtgactcttttggctcacaacggctctttcttggctcactatcctcgaatcacaagcggctcttttggctttatggaccgatttttggatttggatcgattacaccgttagagtttagtttgactctgataccatgttgagaaccatgcatggggttccatctcaaaaccaattagtgatgagtggagtagcccatgnncttatatatgactcaatactctaacatttatttcatgtgggacaatgtccacaatattctccctcaagatggtggctattttttttcgctcaccaatcttgaaccgtatcaaattggacatggtcactatctgtataggtgcatatcagatagaatcacttgcccgtaagggataatgctctgataccatgttaaaatgcagaagtgtatggttaaggtagtagaataggtgagtgtatggtgaggtgcataaggttccatcttaaaaccaattggcaatgagatgagcaactcatgcatcttatatatggtatttagtttcaacatattatcaatgtgagactctctaacaaccactaacaaacacaataaaaaattgtttatcaagttaattctactttttttcttatttttaagcttagtatggttaagataaatcactctagctttaatgcttaacttgatccgcttgctcaaaactgtagctggttcacaatatccctcaaaattacaattatttctattgcaccacaccatgtaggtgactgcagctactactgttgatttggtattagcaaccatgctatttctactcccttttagcccaatcagccagtcctcaagattacaaggccaatcaatctgactcaaccacttggtgacctcaagaataacattcttatagtaaaagggcatgcaaagaagaggtatgatcatgagactgaagatcacttttgcaaactggacataagggagaatcaagatgaatgtacctggccaaaagatctcatgttaataggttggagtacaggacctgccacaaaataaatttatacttcgagactttgaatttgtgccaactctctttgtgaaaagaggtcttcgaatctgttaaaggagactgataaaagtgtttaactttaaatatacactctgccaattaatcatgcagattaataagtttatgaaattactaaatttttattttaaaaaaaaaaaattaaaaaactgagtcaaatatagtagaattaaagaaagttgaagaaaataaaataaaataaagatatattatatataagaaaatggtttatggttgtaatatattacaaattgaaaaggatgacaattatttgtcgatcttatccaacaaaagaagtaaacgtgtatgttctatccatctattcacgtgccaatatgctttctctgctccaatgtctatgccaacaacgtgccctatatgctatatcatatctctatattatgattttctattagcttagactgcatagtacttacaacataatatttgattatcatttcatctcacattttatattattttcgttaggcttttctctagtgtagacattaagcttgttactctttgtgaaaaagttaaaactaaagaagcataaacaaatgtttcaatagaccattcacaattttttgggagtgatgagtcaatactctagtcatctagacaagtttcttaggcccggtaaaacttatcattcacttctcc

SEQ ID NO: 68907 - DNA, 983 bp, Cannabis sativa
  modified_base (524)..(528): a, c, t, g, unknown or other
  modified_base (621)..(625): a, c, t, g, unknown or other
attctatttcgaaatggaaggaacgacaattatcatggaacatgagaaaaaatttaatgatttttatcaaattttttatgcattttaaattttattttactcaattctcattcccatcccctaaaccttgaaccttgaatcctgacccctgaacccctgatcccaaaccctacccctacccctacccctacccccaaccctaccctaaaccctaaactctaacccctaaaccccaatcccaaccccaaccccaaccctaaaccctaaaccttaaacctaaaacccaaaccccaaaccccaaaccccaattcccattcccattcccattccccgacccattcccattccaattcccattcccattccctttcccattcccattcccatccccatccctattcccattgccattcccattcctttcgcattcccattcccattccctggcccactcctattcccattcccattccctcgcccattcccattcctattcccccgcccattcccattcctattcccannnnnattcccattccaattcccattcccatacccattccctagcgcattcccattcccatccccatccccatccccattcccattcccattcctatnnnnnggcccattcccattcctattccaattccccagccgattcacattcccattcccattcgcattcgcattcccattcccattcccattcccattctcattcctattcccattcccattcccattcctcggcccattcctatatctattccgattcccattcccattccccaacccattcccatttccaatccccattcccattccccgacccatgcacattcccattccccaaaccccaaaatcttaaacgccaaaactcgcaaaccccaaacccctattcccattcccattctcattcccattccccggcccattcccattcccattcccatttgcattcgtattcctattcccattcc

SEQ ID NO: 68908 - DNA, 670 bp, Cannabis sativa
tgtagattgataactattgttgtatgagagctctattagtggcaaatagttactcagttacctgggaaatctaacacacaagcattagcatgtcttctagtatttgaatagttcattctgattgtctatcagtttgaggatggaatgttgtactcaacttcagttttgtgtccaaagcgctttgcacactttcccaaaacttagaggtaaaaactaaacctctatcaaatacaatggtctttgggactccatgtagccttacaatttctcttacatacagttcagcgtattgttctgcgttgtagttagtgcacactggtagaaaatgtgttgatttaatgagtctgtcaataatcacccagacagaatcttgttgtttactattctttggtaaccctgtcacaaaatccatagcaatgtcttcccaacatcaagagattgcaatagccttgcaggtctttggtgttcggccttaacttgctggcaggtaagacattttgctacaaattctgttttatcattttttatacccgaccaccaatacatacttttcagatcattgtacattttggttgaccctgggtgtaaagaatagggtgtagtgtgcgcctcttgtaagatttttgattgcaactcaaatttactaggtacacacacccttgccttgtat

SEQ ID NO: 68909 - DNA, 2163 bp, Cannabis sativa
atcacctctcgtcccacaacatgccaattttttaggtagaactaattgttgaacccattaatgcccagggatttatcatgggccatgtagagtaaggctctcttgacttcaaggggcgtaaaagcctcttccaaagattgacagtggctagagtcaagggtggagaaaattccttgtgagggcattgtcaatcaaattgcactgattgtgactttattgtcagtttcatttctacacccattttttattttctattttaattttaatttttattttactattctttaatttatactcaattttataggtcatatccctattatgtgtattacgaactctaattttaataagttattgtaaggttgtatttgatactttaattgtaaaagagggtatttatttaaaattattttggagttatatttaataattgtataataaaaaaaaaagtacttttcaacttatctcgaatctttttctattcattaaaaataagaattatttcataaaatatccaaaaatgacactttaacgttactgcaacactatactgtattttcacaatgttttctttctgaaaaacagtcatttgtaaaaccatataaaaacaaatccgtaaaaaaaaaaaacaattttagatgatttgtgtaaatttttcaaggagtttattgaaaaatacctcttttattgatcaatcaacaaaatttacttctaattttatatttaattgaaagatacctctttttatatgtattgtacccaaaataccctgacataagggagtcacatggaaagtatattgaggtgacaggggtaaaattggtaaagtgttaaaaaaaggaggtaaaaatgatagactttaaaaaagagggtaaaaataaaagaagacaatataaaaagagtatagagtctaatttcttaatttttcaaacagtttaactacaaaagggcctttctctatgtaaataattgggcttaaaatttgacattgagtgccattgattggcccaataatttattttcaatgtaaatagttatatcttgaatctaaaaagaaattgcaaaataatataattatggaattttttataaataaactctgttatgctaaaacaaaattattccatatatattgatattatagcaaagcctcattaaaaaacccctaaaaagcaaaacccaaatgggaaaaactctataagggaaaaagagtacaatgcgataaagtacatgtatatgatattgatacaaatactatagtacgtatagtaaaaatatgtcaaataagctaaaaaatggttcatataaacaaaattattttaccaagatgattatgtcaagatgactacatcttgattgtcataattttacttatttggcacatatgttagtgtatttgacatatttttttaattcatttagtaataccatatagtcgactacactatattcaaaggcttaattaatgtatgggattgatgatgagagtatcaatcaaattcttgagcaatgttggttgtgtaaaaccgtcaccttctctgtacatctcatggttcactcgtacaagattgagaactctcattaagagtggtctaggaatagcgattggatagagaagatcttcattgagatccttccatgaatcattaacttgttcgttaagtttctttatagcttcttcatctgttacaccatattgtttgatgtaacactccacagcagaagccactacatcttttgataattttcttcgatccgactacaacatatatataaatatcaataatatatgcatcaaaaacttatgttgtaactaaaagattgttacaaaagctaatgattatttcttttagtgattatggggatgaacttgcaatttatttgcactataataacaatatatgacatgttttcaatatatgacactataatatttcttatagcaatactcaatatatattagggtttttttttaatattatacttaaaagtgattttatttataaaaatacctttaagaaaattatttatacaaatatcgttgtgtcacgtcagcatacactccgaaattcaaaacaattaccgaaaatggaaaaaattggaaaaatctcgtttctagaaatttttgctttttgggagttttgaaaaagtaactatttagtt

SEQ ID NO: 68910 - DNA, 1017 bp, Cannabis sativa
taaagaacaatggtcattggaaaagtaagtttgctggagttggtattggtgccgaaaaagttgtcggaattagcactggcgctgaaaaatctctggagtttggcactggcactcacagccgttggaaaatttgctgaaattggaatcactcgaaaagtcgctagaaaatggtctgagttgtcgccgtaatcggagttagatgtcggagtcgtcactggagttgaatgttggaatctgacacacagaaactaatttcatttatcaactagttaaaattctaacatataggaaaccatttagtaaagtacaaaccattttcgtgaaataatcaattgaaaaaattgaaacttaaaactcaattatgaaaaataataaaaaaaacaagttatgaaactaattacttaaaaaaatgattatgaaagtcaataaaataataagacataacacaaatttttttaacaaatctatataaaattaaatcatagaaactagttatgtcaaacaaccaattgaaaattaaacacataaaaattaacttcaaatctagaaacaaaataatacaaagaaacttaaaataaaaaatatacaatagtatcataaaatggagcaaccctaatatagaaccctcaaaactcgtaaaactacttacgaacatgtgaaccctctgaaataagtttcaaccttagaaaaaatcataacaaaactgaagttatgaacaatgaagataacataaactaattttatcggtcaaccaaataaaacacactcaccaatataattaaaacaacacataatggacaataataatataaaaataaaatagaagtgtgaaaactaatttcgaacataaaaataaaataataaaaagaaaataaaaaatatataataacatcataaaaaagagtaactcttttacaatactctcagaactgaaatcagttttgaacctatgaaaaatcttaataacaaacctatgaaaccttaataaaacggaaaaaaaaaatcacctgtcccaaa

SEQ ID NO: 68911 - DNA, 715 bp, Cannabis sativa
aaaattacttaaggcaatagaaagcaaaaaaaaaaaaaaaaagtaaatcaacccaaacatatatgtctaataaaattaaataagaaacatattaaactaaaacagagtactaaagactaccaatgaaaacaacttagaaaaataaaagacacaacatcattgtcccaaaacaccaatttatatatacatacatacactcaaacacaagtcactaaaaaaaattataaaataatcgattattcatcaagcatgttgcatatatacatgagcaaaaagacaaaaaaaaaaattcttatcacatagaaggaaatactaaaccaaatcaaatatatggcttataaacctatataaacaattgattaacataggtttgaagactactaatgaactaatgacaaaaaaaaaaaaaaacaatttttttaaatcgattatcatatatatatatattctaaataactacctcacaagattattgttccaaaacacattctcaaataatttatatatatataaatatttatatatttataccctcaaacacaatccttataagagtataaaaaaagtagtagatgacccatcaaaaatataaaccctaaaaaagaaattttctttctaatacaaggaagaacaataaatcgcataaaaaaaatacctttcaatagtatttgagctgatcctacagaaatatttggttagaagctctcataatctg

SEQ ID NO: 68912 - DNA, 737 bp, Cannabis sativa
  modified_base (503)..(513): a, c, t, g, unknown or other
  modified_base (703)..(711): a, c, t, g, unknown or other
ttaccacctcagcaggagatcgattttgttattgatttggcacccggagtggaacaagtttccaaggctccttatcgaatggctccagctgattttaaagaattaaagattcaacttcaagggttacttgacatagggtttatccgccctagtgtgtcaccctggggagctgcggtattattcgtcaagaagaaagatgggtctatgagaatgtgaatttttgctatctcaagtgtctttcttatggcacattgttattaaagatgggatcaaggtggatcccgagaaaatagaatccgtcaaggattggccaagaccgaagacagtgaaagaaattagaagcttcttgggtttagccggttaacaccgtcggttcatggaagggttttctaagatctcaacacccttaaccgaacttacaaagaagaatcagcagattgtgtggtcagataaatgcgaagctagttttcaggagctcaaacagaggttgattacagctccannnnnnnnnnngccttcagacaaagagaaatttgtagtttattgtgatgcatccagacagggtctagggtgtgtactgatgcaagccgatcaggtgatcgcttatgcctcccgttagttaaaggattatgaatagcgatacccgactcatgacttagagtcggccgtcgtggtctttgctttgaagatctggcggcattannnnnnnnnagaaaggtgtgaaatctataccgacc

SEQ ID NO: 68913 - DNA, 1376 bp, Cannabis sativa
  modified_base (29)..(31): a, c, t, g, unknown or other
atagaaaagattacattgaaatagagttnnntttagggcacaaagcccaacagtaggaggttttgtagtgacctgctcggggtttgtccatggtggtcttctcgtctttttccaagttttcaagttgggatctatcaccattgggttgccctgatcagtgaggcctcctctatgggtttgtacaaccatcctatttacctgtcaaaacttaagacaaaagacttgtagtttttctctcaatgaaagtaccaaaatgttgacctcgcttctagccaacaacagtgagtcaaataataaagcgattaagtaacataattaaaagaaagcaaaaacagtaaaatgaagtgaacactagcttttaaagaggttcgaccctataagatggtaatagcctactccccttatattgtattgacttaagagaaggaatagagtattcttcctcttgaaagttcttacaattgatctctgagtaatttctttcttagatcactatttcctctctaaactatattttaacagcaattctctcgatccccttcatagtcaggctaggtcactatatagggacttaatgcatgagggatggttttccttttacatacaatgcacaaaataggaaattacaatgattctataattacaatatacgaagtcagaaataggacaggttgccatttctctctgactcaatctcacgattatagggattgtcttcacgtctggacaatcgagataaatctctaaagcattgtgcgtgctaacatgctcgtacctggtcagatatcttctccacaacacagctcggatagccgactagtacagatgttgattgatcatgtgtagactgctagtgatattttatttcgcctaggtaaatgaaatatggaacacgtgtcatctgatcctattgccacgtcaaggtgcaaaaaattggataacatccttaataaaacacttagcttcttataaatgatatagtaaactaatataattcttgtaatatataagagctcttctatttatgtctattagccaagctctaatgaaacaataattttacttttaaatagttatagaatttatagattatatttctatgattaacgctctcactcaattgtactattgtgttgcaaagatgtaagtattatgcctaccaataagctataacgaacaagttaaagaacacatgcaatacagttaagccagaacttaaccatctcaagattaagatctttgatttataatttataataaattagtaaattaataaaaaattattgaaaaataaaattttaaaatggattattatttagataatttattattttaaaacttgcatgaaattaattttaaatttaaacaatttgatt

SEQ ID NO: 68914 - DNA, 572 bp, Cannabis sativa
tacttttgcatcaaatgctcaaaagagtggttgcaggaatgggtgccttgatcattgataataactcgtggtgtgccaaaatgacataacacattttcttttaagaatttaacaacagttgtgttatctacatttcgacagggcacggcttcaacccacttggagacatagtctatggcgaggagaatgtaaaggcagccagaagaaggcaggaacggtcccataaaatcaattccccaacagtcgaatatttctattacgagcattgggttcaatggcatcatgtattgtcgggatagtgcacctagtttctagcacctttctcaagatcgacataaattgttagtgtctttgaacaaagtgggccagtatagaccacactgtaagatttttgcaacagtctttttcatagagaaatgaccaccacatgtttcgttgtggcaaaagttcaagactctaaaaatttcatcatatggaatgcaacgtctcataatttcttcgggacagtacttgaaaagatatggatcatcccagtaaaagttacggacctcgaccaaaaatttacgtttatc

SEQ ID NO: 68915 - DNA, 966 bp, Cannabis sativa
ctggaagaacaacatcattttgatagtcgtatctttctctaagatctttccataatgcacttggagcttttatagtaagatattcatgttttaaactttcatcaagatgtctgacggagaaaagtcattgtctttgccttttcttgggatgttgcattatttatctgcttaatggtatcagtaaggcccactgattctagatgcatttcaacaccaataatccaagacatataattttttcccatgatatcaagtgcagcaaattcattcttcacaagatttgacatggtaacaactatatgagtatgataagataaagtgatcgtgctgataacgtgttataaatttagacagatatgagcaataatacttgtattcttttctgctcttcactttgctcttcattcttcatcaaacttacacatatatagaagaatatatgcatgtatatgtatataatcattatactttagtacactagtatattacatatctatcctatgtagtcattcataaccctagtatatttatatattgagtgcagtatttttctaaccgaacccagatgacctgaagatattaaaatgatagcccatgactgcaaacaactttaatgtcaaaatccaaatgaatttttaaatcatgggtcaaatactatcttttttatatatgtgacaccaataattggttagcgttaagaatgattagtgatacccatgaatttcgaccaatatattacaaaacttatagctatgtttggtttccaggctgaacacaatcaaataccattgaattcatgaatgttaattgcagttgaggatgaacacaaagcatgttttgtccattttcactaccatttaagtttaaacatcataatttatgttgtttttttcattggcagttggcagagtaataagataattaaccataatttatggtagaaaaaaaaaatatcaaatgttttaa

SEQ ID NO: 68916 - DNA, 919 bp, Cannabis sativa
tttttgctttgctaaatggcaaatgtgacaatgtaaagtggaattaggatgtgaaatgttatgttctttattgaaaaaacttgaaatacacatcgatggatgtccaaggtgattatgccattggtttacattatttttattgaaagaaaaggaaacagtagtagcagtagctgctgtagtaggagtttcttggtgaagcaagaacaatttgccacatttttcagctgtcccaatcaccacattcagagtaggatcctgaataacacaacaattttgatgaaacaacactgagttaagagtattgagcatgtactctgttgtagaaaaaagattgagctgaaattgtggtacaaaaagtacattctgcagtgttatttctgagtttatcttgacagtgccaatgttgtggacaggaagagtttgtccatttggtaaagacacaaatttaggaaattgtgtgttagaaaaagatgaaaaacaactgaaattgcaacacatgtggtgagtggcaccactgtccacaatccaagaagttgagtttaatgttgtacctgccagatttgatgcagtaggggcgattgcagctggttctacatttgttgtgctgctgagttgctgacttaacagagatattaattgctggcattgagaggagagatcaatgtgactagagctgctctcagtgtcgtttttctgggtgtttgcagtagcaatattggccttggctttacctttttcttgctttcttttgtccccataaccaggaggaaatccatggaggaaatagcacttgtcaacaaggtgaccgagtttcccacaatttgagcaagatggtctaggtttcttggatcttgggggggttggtagaactagatgcagcaaccaaggtaattgattcagaagttcctagcgatctttg

SEQ ID NO: 68917 - DNA, 2597 bp, Cannabis sativa
  modified_base (49)..(64): a, c, t, g, unknown or other
accgctcttccgatcttcatattaggatgttaataaaacatacttggtnnnnnnnnnnnnnnnnggtaaaatatttccaacaaaaacacctatgactccatatgtctttatataaccctctccaactatgtcttcctcaaaccctaaaataaccaacaacccttcttcctctcaaacctacgaaaccctcgcccaaccacccctttcttcctcccattttttcatctttcatccgttttacccattttgttttttaaaatcttgtatttttcatagccaaaaatatatccccggagtttgatcatttttttttttggttttttaaggtaaaccgagcttagaggtggtggttatggttgttgtggtggttgtaactccggccaccgcttttggtggagaaatcattgaatcacaacgtccattaaggtataaatctaatatctaataattttattaatggaaattgttttattttgtaaatttttttaggatttttccatattgttaagattgtgttcttgtggttgtgcatggtggccagattttggttggtattggtggccagatttcagtaataaggttaaaatctaaattttaatagtatttatatatatgtatgtattttatattttattgaatgtgtattgtatgtatacatattttgtaattgtatatatattgtatgtatatgtattgtattgtatatgtatgtatgtatgtatgtatgtatacaaatattgtaattatattgtatatttttttatgtattgatgtgtatataatgaatattttaaataaatagttttgttaaatattatgaatgagaacgacatagaagagtattaaaataaaaagtttagaaattagttctatttttcatcattttttttctattttaaattttattcttgtgtttttatttttttagtagttagtaaattgttagttacaattacttaacaaattactaatttttatttctattaatgtattcttaatactaactagtcactaatgagtaactagttagtaactagttactcattaattatataactaataagtagctaaataaagatttttttttaattttgtagtattttttacattgtagattgtgaggttaatttacaaggatccgacttatttggtgttaaacagtttctagctagctcaaggtacacatttactaacttttattattaattaatcatgaatgcgtagtagagtttgaatatcttaagtatttattcgtagtgaagtaggttctgcgatatattgtactctcgtcagatgagtggaataatatgcatgttagatgagtttgaatatctgacatattcatccgtagtgaagtatattctgcgaatacatatactgtggtcggatgggtgataaatttttgtattgctaaatattgttgtgattgttttatattattctaaattgtgttttgttgttgttaataattttaaagttttggaaaacgttcaattatagtcgttatgctgctaaaatttcggtagaattaggactagttactagttagtaatttagtatactatacttagttactagttattaattttgtaagtcttgaggtgtttgatgcgtaagtctcacaaattatattgcaataatattttagaatacctaaggataaataaaatatcacataaaatttaaacataacaatgatgtatcataaaacttaaactaaagtaaagataattatatttctagaactagaaccctaaattctattatcttaaaaaacacatgactcataaaacttgaactaaaatattaatgtaaaatgcaatgataattagaaatcatctaagtcatcatcacttgttttatcttgttttagattgttttttgttgttattggtaactttaaatttttggagaatgttcaattataacccttatgttgtcgaaattttagtggaattagaattaaattatttgatacaagtttttcttaaagttggttgttaggattttttgttaattttgtggataaatcatggatgagtgcggtgcgccggtcaaaacatagttagtaatttagagtaaaattagttactggttagttacaaattatatttagtatactatagttagttaataactagtaattcagtaggttttgtaatatattttactacggccggatcgataggtggaataatatgcatgttagatgagtttaaatatcttaaatattcatccgtagtgaagaagtttatgtgaatacatatactgtggtcggatggatagtaaacttttgtattgctaaatgttgttatgattattttatattattttgaattatgttttgttattattaatatctttaatttttttggaaatgttcaattatagccgttatgctgctgaaattttagtagaattaggtatgctttctttaacctacttttataagaattaacaaatacatcctaactatttattctaatacttaagagaagaattctactaatttattttaagtaaaacaacaaattaaaatattgcacattattaattattcaaaatactaattattatacaaaacataacttaaaaaa

SEQ ID NO: 68918 - DNA, 814 bp, Cannabis sativa
gaagaatgtacatgttcgggccacactagaccaagcaggttggggtctaccaatgatgcattttgtactctgttttgtcgcttaggccggctagaggaaacggacttgtaataatattttgtaaagtactttcgggatcccgacacatgtatcttttgttttgtaaagtgaaaaagtattgtaagtttattttcattccgtttgtaattaaagtttaattcccatgctaattttattagtaatcccgattaggggattagggtttcataagtatactgggtagcgtgcctaattatttagggcgttacactcccggtaggctccagcttgctgccagggttattgttgctattgagaaccctaaggaaatgattgtccagtctgcaaggccttacggtcaaagagtagttcttaagtttgctcagtacactggtgctcatgccatagatggaagacttatgaacaagccaagttgttcaagtactaagcgagatgtctcagcgaaatacactttccagcgtgtcttaatccacgtcagcattgactctaaaagcagtttaaatcacaactgtttgatttctaaataataactgcattatttatgtggatcataattaaggcccacaattttgggaaaatattgttgtgagattcaaatttgaatgtaattaaatgccaacctatgttattataaataggggtagattatagagaaaaaaggacggaaaatccttgagagaaaaaagaatacacggtttgggaagaaccctagttctgtatcagaaaagtcataataagattgactcgtggacta

SEQ ID NO: 68919 - DNA, 950 bp, Cannabis sativa
gatctaattctgggcctggatatcatccctatcctagtcaaggccgtgggaatttcacttgcaatcgtgctcagggaagaacttatggccgtggtcatccatctatcccacacctcctgtgtcaagtatgtcacaaagctggacactcagcagcccgtttgtcataatagatttgacaaaaacttcgtgacacccaagatccatgagcctcgtgcttatatcgctgaaattgatgatcaagacgagcctcaagtctactccagctctgcaattcaagaatttggagatgacttagactggtatgccgacacaggagccacaaaccatattgctcaaggaatggaatttttggactctgaaattccatactctggatcagatacacttgctgttggaaatggaaaacgtctccccatcagtcatgttggtaacctctctatcccttcttctcatgtccctttacaacttaacaatattatcaaagttcctcaaattaccaagaacctaattagtgtgtctaagcttactgaggataaccatatttttctagaatttcactctaagtgttgttttgtaaaggacaaatgcacagggaaagtcctgctcaaggggaggcttaaaaatggcttatacacattgtctcacagttcatttccatcatccaaagtccagcttgattgtaatcttgccaccactcagtccacaccaaagccctctgctgtgtcctccaccacagtccctatcactcacataaatgttgaatcttgtattgataactcatgtaatacaattgatgcttctttagcatccaccacttgtaacagtttcaacattaataacaataagaattcttttcagtctgatatgtctactactgctctctaccttactgaaaaatccaacattaatttgtggcattccaagctaggtcgcccaacccctaatgttct

SEQ ID NO: 68920 - DNA, 1605 bp, Cannabis sativa
caaaaacaccaaagccaaaaatattatggatttcattggctaataacattaattccttggatggagggaccaagcctaacaaccaacccaattacccaacacaacaaaatcagctcctttcattctcctaaagtggctacacaccaaattcaccttctaaagtaaaagcaacgaaacctcatatctcattaactctattttaaatcatctctattattactatctatactacacttcaaacatattcttcttacattatatcttctatttcataatgaatcagatgaaaatggacctgtttgttgcgatccaagatacagaatagagtgtgtcaagacaaaagataaggtaataattataaagaatggagcgagacaccaagaccatcataatatatatggtgcataagcctattattgccttacagtgaggtttttttgtttgaaattgaatgatgttggggtcggcatcaacgatttccttcatagtattatatatcattacccattgttaaatgtgtctcgcttgaatatactattattgtctcttcattaatatttaactttactattctcttttcaataatactaccctccttcatacccactctagagaaaatatttcacaatataatctcagtaattggtatattacagattaaagaatgaattaaatcagatagcacaaaattaaaaagagagaaatatagaactaaattaaggatggcttcacacaatgttaaataatttatggtattgaactttttcaagtgggcttatatttgggcaagcaaattaatctctccaattaacaaacacattcctccaataaaattggaatttggggattttgttggcattagattatcaacagagtgaagtgtgtgtttggtgtttgtgttataatgaagaagaagaagaatcttgactggtttggttttgatatttgtgaagttagaaatggagaagaaaacagccaaactttggaatcaaataaaattacagaccaactcaactgaagactatttaacccaaatggattcattgtctatgattctacgagagagagagagagagaggtataccgcgtcctcttgaatctgaggtgccattgaattcgagacaacgaaaaagagaagggaggccgctggtggaggaagagacgcgggagaagcggagagactaaatcctcggaatcatggtgaggagctgccgtcagaatcgtcggacagactcgtcgggcagaatcgtggtgaggtctgaaatttagggttatttttgtcaagagagatgagatttggtctgaaattgtggtctgagatttggacaggatcgtggtgaggtatcccaatagtttcagcccatatttttttaaaaaaaaattattaattaaatataaaatgcatcttttcccaacagttaataagtgttgggtatactattattctccacagttataaactgttgggtatacttactattcccaacagttaaaaatcgttgggataagctatttttttaaaaaaaaaaaaaaatctatttagtattgccaacggtgaataaccgttggcaataactatcccaacagtttttttgctacagtgct

SEQ ID NO: 68921 - DNA, 751 bp, Cannabis sativa
tcgcttcatggatgcccagagtagtacagatggcttgccgcaaatgggatgaagtattagtgctaaaaaagacagaacacttcccaaaattaagacgttgtcccgttgcagtagcaaacatcctaagcaactgaagaacccgattcatctcgccattggtcaccttacaatacagaaaactgtcatccgcaaagagcatatgagagagactaggctctccattagccactttacaaccatgcaaccacttcctctcttcaaacttgcaaataagagcaaagaaagctacataccaaaaaaagataaggtgatatagggtctccctgtcgaaggcctctactaggcacaataggccccatagttcggccactactcacaatctggtactgtaccgacgacaagcatccaaatataagacgaatccaattatcagcgaatcccaaccgagcaagcatatcatacaagaaatgccaatccacactatcataagctttacttaaatccaatttcaacgccataaaaccatccttgcccacttgcttccgcttaagataatgtagaattttgaaagagaccataatattatctgtaattaacgtgccaggggataaaagcgctttgatatttggagataaccacagacagtaatcccttcattctgttagcaagaaccttagtaataactttggcaatgacattgcagagagaaatggagcgcagctcactcatttgctcaaggttcttctttttt

SEQ ID NO: 68922 - DNA, 3053 bp, Cannabis sativa
  modified_base (157)..(157): a, c, t, g, unknown or other
tttcattcccatacttaacaaaaaatatgatatgtgaatcggtttaccataactaaaatggaaagcaatcaattccttattacaactattttaatttaagatataaaataaataataataaagttaaatatatggttaaaaatatttataatatttnaaatttaaattttttttatataaaatatttataataaagttaaaaatatggttaaaaatatttataataataataaagtcatatctggattcagatttccttacttgtgtgaattattgtaagtttgaagatgtcaaagctagtgggaattttttcacttggacgaataaacaaccaggggctgataggatattttaagatagataggatcatggccaaccaagcttggattggaaaatatgagtttgctgaagctgtatttcttaacgagggactatttgatcattctccaggaattctttctttacatcctcaagtggtggggggaaaaaagccattcaagtattttaggatgtggaaatctcatcctaaatatgatcccatgctaagagatatctggagcttgaaaataaccgggaatccaatgtatcaagctgtttgtaagcttaagcaattcaaagagaggttgaggaagttgaatagggaagcatactgtgatattcagcagcaagttcatgaggccatggaatcacttgatagtctacaaagtcagttacagcaacagcctcttgaagacagtttacaccagcaggaacgagcagcccgtgagatcttaactcaaaaacagaaggattactcattgttcttaaaacagaaagctaaagtggagtggattcaagatggtgactcgaactctgctttatttcatgcttgcattaagcatagaataaggcaaaactgaatcctctccattgaaaacgaagagggcagcagagttacagaccctgaactcattacagcagcattcctagacttctacaaaggtctacttggaaccaaaagagagcagaggaaggaagtggaaaacagtatactcagcaatggccctgtactatcctcaactcaggctgattacttgcttcaggaattcacaaaggatgagataaaaaaggccatattcagcatacctgcaaacaagtccccgggtccagatggtttttctagtagcttctaccaggataattgggagctcattggagaggacatatgtgttgttgtgcgttcttttctgaattcaggtaacatcttgaaagaaataaactctaccattcttacattggtgcctaaggtgaaatgtcctaactctgttaaagactttacctatagcttgctgcaatgtgatttacaagattgcaaccaagttgttgagttctagaatcaataacatccttccttcaataatatcacagactcaaggtggttttgttaaaggaagatttataggacataatatcttgatatgtcaagatttggtgaggcactatggtagaaaggcaaataagcctagctgcatgattaagttggatctgcaaaaggcatatgacacagttgagtggagtttccttgaagagatgttagttggcttgaattttccctcaaaattcacccagctagtcatgaactgtattaccactcctagattctcattgatgttcaatggaactctccatgggttctttgaggcaaaaaggggaattagacaaggtgatccgatctctcctctgctttttgttcttggtatggaatacttgtcgagattgatgaagaaagtgggggaaaaagaggggtttcaatttcatgacaaatgtgctagtttgaaactgaatcatcttacttttgcggatgatgtactattgttttgtcatggggacttcatgagtatcttatacatgttgcatgctctcaaaaccttctctttaacctctggattatatccgaatgccagcaaaactgctttatactgcagcaacatgcaacctagtgaactcaatcacattatgcaaatatctggattcactagacaggaaatgccattcacctatctgggtataccaatatgtgggaaaaggatttcagggaaagaatgtgatatattagctgagagaatgactgctcgaattagaagttggagttcaaggaatctctcttttgctgggagaatcaccctcatcaactcagtccttattgctatacaggcctattggagtcaaataatgattcttccaaagaaggtattgagatctattgaagccatttgtagggcttatctttggaaaggtcaagctatgtttcaaggtgcagggtctgttgcttggaataatatttgtcaacctaaggcaagtggaggtctagggatcaagaacctagaagcatggaacaaggctgcaataagtaagtatgtatgggctatttctgacaagcaagagagcttatggctcagatgggtccatagtgtttacattaagaatcagacatggggggattactctccctccattcattccagttggtattggaagaagatggttgccttgaaagaacaaatccgagaactgatagactttgatgttttccagaagcagaaatatagtatttcagctggctataaaatgttttcccccccaatcaatcgattgttttggagcaacgaaacatggtcaaggcttaacactcctaaacatagtgttatagcttggttggcaatgcttaataggttgaagacacaagataggctgctgaattttggtatgcaagttcaagggacctgctgcttgtgtacgatacatcttgaaacctgccagtacttattctttgagtgcaatgttgctgagaaatgcctacaggatctgaaactttggctgaactggcatgctcaaaccagtagcctacaacagctacttaaatggattgggaagtccaaattgtcccagtttagaaagggggttctctcggctgctgttgtagggctggtgtacaacatttggagagcccgaaatgaagtggtatggcaaaaagctagaattagctcgaaccgaattgttgaagaaacaaaatg

SEQ ID NO: 68923 - DNA, 793 bp, Cannabis sativa
  modified_base (462)..(470): a, c, t, g, unknown or other
tttttttttttttttttgcagggtgattgtattagcttggagaaacaaatagacaaccaccaaattacaatctcaaaaataaaaaataaatacaaccataaatttacaatttcacaaataaattatcacttaaagatgaagtgcatatatcatattaccataggaaataatgactatattttaaactatttactgcctaaaatttataatacaagtagtctttatacacctcaacaatatgctaagcttctcatccaaaaatatgaatatcaaattttggtaaggttttttttttttcaaactttcattgcattatttatatttatctttattctttttatgtacacttgactaaactaaatgttttaaatataggttcctatactactttagtttaatttcgaccgaaatgtttaatttttattgtaatttaattttggaaaattactttatatattattnnnnnnnnnttttttttaaaaaaaaaaatttacggtttgagtttctcagatggtttctccagtagtttctatgtagattgctatacagattttggttacgatttaaattgctcagttagttataatagagatttttatgtagaattccgtatatatatatataaaaactattttaaagtgaaaaataaaaaaaggccctttaattttttgtttttcacttattaactatactagtcagatagtacgtgcttcgcacgtgagtggctcctaaaactatttaggtataactattttaagaaataattaatattttgtctcttgaacttacaaca

SEQ ID NO: 68924 - DNA, 911 bp, Cannabis sativa
gtaatcgtatctctctccttattatataacctacaccacttataatcataactctataaatttatcaacataatataactcatcttaattattatttttatcaatatcatcaataaattttatttattctctctctctatctctatctcacttataactatatataatatatacatgatatgttggttaattatgttttattatatattctaaagaaacttctaattatatttttgcaagatgatcaacattatatgaagccaaaatgtgtcaggataattaataaaattttgacctttaatatttttttttaaatacctttttgaacctttcaaaagtttgatctttagtctttgatttcaatataacacatatattagttgtattggttgaaagccatgaataaggtgaaagaggagaatatgcagagagagagatgatattaaaatgttgataaataaattgtgagacatctataaagatgagtccttagaataagagatcgactggacccgctgtggtgtgtcgttactgaggcggttaacatccagcctttaattgatgttctcttagaagaagctgacagtacagttaagtacgtaaccactccatcgcttggcttatgggacatttgcgttttgtaatgatgattcgtagtatatattatatcatctttttttaaaattgaaaagtcgattgtcccaaattaattgaagactagctgaaatgtgtgtaactaaatcaataatataggatcctatgtgaagaacaagttgaagactaaagatcgattgatcaaaatgggtatcatggtgcagaagaagtgtagcctatgtgaagaacaagctgagaacattcaacaccttttcttttcctgcagggaaactggttactgtttgaaggagataaag

SEQ ID NO: 68925 - DNA, 629 bp, Cannabis sativa
tgcaaatcttgttgctgaagaaatagcagaaaattggaaaacaactgtaaaaaaaaattgatccagaggttgacatcaacaacgcaaagctcataacagataaattgcatcctaaagttgaaaaaggacaggcatgcaaggacaaagaaacactcaagagagtcttgagctactatgcaatcaaaataacttccaatttaaggtatagagatcgtggtctcaagaatacagactgacgtgtgtttatgaaagttttaattagtttctacgagcataataaaatagaccagaaaatacatttataatcaggaggttctcaaacatgcacagttgcccaataaatgttagatatgaataccaaaggcaagaaacaataaaatttataggataatgcatcaaacccaagtttttgaacataaagacaaaagcaacaccactaaatatcaaaggagaattaaaatacatgtacggaataaactacatgaaagcttagaaaagtaaggagcgtgttgtgccaaaaaacacggtgccaaaaaacaaccctagatcattagtggatttgaaaacaatagaagacaacagttttttgtttatttttatggctttgaatgcttcgaaaaaaatggtga

SEQ ID NO: 68926 - DNA, 1117 bp, Cannabis sativa
tatggcttattctttccttgtttatgtaatttgaccagttgcggactgaggtgaatagagtcctagaggttgctcgtactgaaaagttgattggctccagtttggaagccaaagtttatctgtatacttctgatgctagcttggcctctagattgcgtgaaatgtgcgaatcccaaaatgatgcagacacattgcatcgcatattcataacatctcaggtatttctcactcttttttaaattctgtccaaacacaaattagaattatctaaatgctcaacaaatgtgctactagtgacagttagtatgtagtgatcacttccaaatgccaaacgctacaattgaaacccatagctgcagctgctctatggaattaaaaataaaacaagtcacacttgtctttttcataaaattgcttttgaagtcaaacgaataagaaaatcccaatttgataagaaaataaaatcattgctactttttgtttaaatttaaaatgacctatgcaggctgaaatccttcctgcaatggaaaaagaagtgattgaaaatattccacacaatggagaatacttgattgaagggacaactaaaatatggatcggcgtgtctcgggctgagggaagcaagtgtgaaaggtgctggaatttttcacctcaagttggttctttttcagagcatccgactctttgcagccgttgttacaatgtggtaagtgttaaacaatctccagctatagcaatggccacttgagatttattatgtaagatgagctgaggatctaatttctcaacagagccaaaaggtaaatttgataaatatatatatatatatatatattatattcattatgtggagtaacatatatggccacatgaagtactacaacttgtgtttcatacaactcaattttgtaaggtccatttattttttaatctttggcaataataagcgctatagaagcctcttttacagcacaatctaatgcacaggatgattctagttttgatgtattgtgtatgtaaaagttaaagagaaagtagaaaaaagtgatgttttaataatgtattttgaagaaaatttattaagatttttgcttcctaaattttgacatgtaccaaa

SEQ ID NO: 68927 - DNA, 788 bp, Cannabis sativa
gccaataaagagataatatggcttcaaggtttttttttttttgatagaaaacaaactttcattaaaacagtaaacgagaaacaaacacaaaacagggcttacaacacagagtacacaaccgactgatcaaaaaagccacaaaaactctgggacgcagccctggcagcaagcttatgagctgcgccattgttcacactagaaatccaacagacattacaagaagtaccattattaaaaagagttaaacagttgcagaaaaacaggataaagcctccaagaagggacctgcctagccagaatcgcatccaccgccactttacaatctgaaaaaatatcatagccccggaccagccacaagaaagacatctcgagatagcattgaggatggcacgagcctcatcatcaagagacgaaacaacattctccttaccagcaaaggcctccaaaaccttccccgaataatcaagaacaagaaccgcgtagaaagcgacattgtctctcacagtagcatcaacgaagatattcacccggttgcccaaaccaagatcaaccgaagacaaggagtcgcactgcaccaggggagggggatcatctcgatccctgagatcacaagagttcactaagtgtagaatttaaaaataacctcagggggttctcgcacaccttcgtgataacacagattacgaatcttccacagataaaaacagaggtacgccgcaaaaagggagaattgatttgagtcaacacagtcagcaaaaggagggaagaagatccattccacaatgtcc

SEQ ID NO: 68928 - DNA, 759 bp, Cannabis sativa
  modified_base (717)..(732): a, c, t, g, unknown or other
ccgatcttttatgtactaaattatgctccccaaactttgatatctaccaaatgatacccctcaaattttgatatatatatatgtactaaatcatgccccttgaactttcatctatgttagaatttttttattaaaattagacaaaagtccttaaatttaataatctcaatagttcggggggaatttttaacggtcaaaaaagtttagggggcacaatttagtacatgtgaaagttcatgagaaaaaattactaattagccttaaaataaatattaataattttaaaaagttaagaaatgatattaatttatagaaaattatatatttatttattaatatatatatatagaaaaaccttatttagaaaactttttcacataataccatagttgttgaccgaggttttcggcaaccaatttaataatatatgtaagaaagccgtaggaagttaaatgcatgagatttttacgtggttggggcattaatgagccttagtccacgagtctttttttatttatgagagtatttattacagagaatgttcttggtagatattcctcttagttgctctctttaatttttatgaacccaaaattctcgacccccatctcagtgcatctgggggatatttatagtgtttttttgaagtgatccctaaaacttaggggtgttctagtagaactgaatcacttgtctttctgtgcaggtttgataggnnnnnnnnnnnnnnnncaatgcaaaataggaaatacatgacct

SEQ ID NO: 68929 - DNA, 890 bp, Cannabis sativa
ttattttttgttgtttttttgttatttttttgttgttttttcatgttacttttatgttgttttcttgttaattttttgttgtttttcgacttattttttagaaaaccgtaaaaatgtaaaaaacattctttgaacgtaaaaatgtaaatattttacaaaaaatagtaccttatgtaattattcctttatttaatggccccctcaagattttgtttttcatatattggtcccctcataaagtttttctatcttcgctgaaaataagctctatgaaaaaagatggaaacattgagatatgaataagaaaaatcactttctttaaatatcaagccctagattatatcataattataacagcacaaaagaaaaaaaacaaccaaattatatcataattataattaatgaatagagctaccaataatcaaaaaggtaaacaaaatatttagtgttaaattgtttttgaaattcatgttttagactatatttagtaagtggtataaacagaaagaatgagcagtggattaacaaggatagatgcaatggatcaacaagcatacatcatagtgatttttctctaatatttgtatattttatctcactatcactaataaatttggtattatatctatagagatgcatgtcattaaagctcaataatttttttaaaaattttgaaaaaaacaaaaggttaatttatcaaattaaattgaaaatggattttttcttttgaatcaaaaatgattttatttaataacttttagcaaaaacaatagtttttaaatcaaaatgagcatcatactcactaaaagtacaatatgattttaaataagaccctctagcaacacaatgagcggccttgttaacagatcgtttaacaaaaactatagaaa

SEQ ID NO: 68930 - DNA, 2090 bp, Cannabis sativa
tttattgttttgctatgtcaatttttttttcaagtgcaatcaagaaagaaaaataaataaatatttatggtgcaattttatgtattaaatacaattatataaattcttatgtgtatggatatgatgatttgtttgtttgtgtaattatctaaatattttttaataatatgatggtgaaatatttttgcttttttatgtgtatttatagtgattcttttaataaatatttacgaatttatattttaatctcacttttaataaaaatgagaaaaaagatttttgatcttatttttgggtaaatatattagaaaaaaattagaaggtagataaagagactatgagagattttagcttactacacaatttcgtatcagttgcttgctccaattcgaattcgaaagggttttactcaccttctcctgttcttgctccaattgattagtatttcttagagaaattgctattggaaacttattttattaagatcttgatttattaatatgtatgttgattatatgacaataatctaacatcctaaatataaaatttctaaaataataaataaacacataagggattaagaaatctttactgtagttgcagcagaataatatgactcattccgttcagatctctaatccttgatccttcatgttacaaagtataatcaagatctaaatctagattctttttctaataaaaattgaaccatagagtcttcctctcactatgatgagtattgctttgatatatgtgggcaatctctaaacaccaaggagcgcaaatttagagagagaaaacacgctccaaattttcaaaaattaaaaaaaaaaaaacagcttttaagggttaactagctataaaaatcatcatctgataaagttttcttctctttctattaatagacttaacttagggttaaaattagatgagattggcttaaaataaaaatttgagctgaatcaacacttagggccaaattacttatgagttttagaattagatttatgccactttattttatttaaatgaaacaaaaatgtcttttctattttactacttatctcttctaattatttatataccaattggaatttaataattaccaaataaaatacaatttaaatatatatattaattagactcacaaagtgacttaattaataaataaactcatatttctctttttattcttaaatattaaacttcacaaataagatatagtcttacctagagttctaattgattaaataaatcaattaattgaggctacaaaataatattatctcagttaatgtgggaacaatgagtctatgtaaccaaactcctaatgagtagattcgaaataattataatgattgggtgggttatattccgtcgggtttggtttgcgttttttatcatgttatctcaatttagtttagacaaattattggaattgacagtttactgtggtaaagtttgatggccagatttacttaagtatgtattaataagtctttttgacgtcttttggcattcgcataataaagatttcaattcattaaaaaaaaaaggtgtagactttttttttttttcctggtctggtctccagtagaatgccatccaaactgagcaaaagactctcacacagcaaccctagcaatcccctaatcgatagaaccttgcaatccctaagaatcatcatgaccctgctcaacttttcagaagctgataatgaccttctgaaccacacaattaaaacatgcatacattacattgacacacacatctaccaaactttgtgcaattcaaacatgtgaaactattaaaggaaaagttcctttctttctcctataaatacagtaggccattacatcaaacaagtgtgtaaacgaattacaaaagaaataaaaatattaattaagtataggagagtaaatgatgaagaagtttttggtaatggcgttggtagtgggtgtgatggttgtggggtgttttggtcgactacaaccggatatacatctgaatttggtacctagtaatgagcggtgtagggtacctggtgaatattgtcattgggcacaaagcaagtattgttgtgaaggact

SEQ ID NO: 68931 - DNA, 1637 bp, Cannabis sativa
gccaatccgtatggctaacttcctgttaacccaagagaagagcttattggacaaatgacgacaagagttgatcctacaatgcaagcatagcttgatcaactcaagacccttatacaaggcctttccaactaaaagatttctctaacctcgaacttgacagggcttgaggattgcctttctctgcgcattaacgtgttgcccttaccaataaagtttaagatgccaatttagaaaaagtacaatgggaaagaagatcctttggcccatatcaaatactttgagatctagatggatctgcaggggttgatagaggatgttcgttgtaggatttttatagcaagcttgtgtaatactgcatagcagtggtattttaagttgtccccagggagatttgattcctgagacactttttactgctgagttttacacacagttctaatcctagagatagataccttcctaattggaggacttggtggaaataaagcataggtcagaagaacctttgatagattacatccaaaggctcatgactgaggccacaaagttcaaaggcctgacggaagaagggaagtatacattcattctaggaggtatcctacctatgagtgatctttcgagggacatcaggaaaagatcaaccaacaatatgagtgagtttttagaccgagctaatggtttcacaaaacttgaagaagttgtttgaaaggtataaattggcgtgcaaaaaaatagctacccctagcaacacacctgccacagctaggggaggcaatactgttcagcttaaaaccaacaacaatagtggagggaaacaaaataatattggttcccaccaaggaaatggaaaaaaaaaaaaaaaaaaaaaaaggaagggaaatctaataaccccctacataatagcaccctcaggaaaaggagaagaagttcacatgcttcaccgtcctgacagacacccccgagactatcctaatagccatacaggccattgttctgtataagaagcccctccgatgaaaaaatacatcagtaagagggatcctactaagtaatgtcgattccataaagattttggccacaacactaatgagtgtaagaacttgaaagaagagatcgagttcttgataagaaggaacagtcctcacctacgtcgatatgtccaagtcaaccaaaactaggaacatgtccaacagaataacgacatgttgccctcactagttgctggccatttacaagtcatcatcggtggaccccacatcactgggcactcaaataaagcattggaccgctacgcttggacccttcgtcatgagcaaagaaacgaagtcctagctgtagaggaaataaattcaatacagccaaaggtcgaagagcttgccatcaccttcacttatgaaggtgttactctcgtcaggttccttcataatgaccctctattcataaccacacaaatagggaatatgatggtagcactctgcatggtggattatggagtctcctccaacatcatcttcaagactgtgtaggagaagatggggcttcgtttaaaagacttaacaccctttacatacctcatgtacgggttctcgagccaaggactaactcctttagcatacatccaattgtcattgacaatc

SEQ ID NO: 68932 - DNA, 512 bp, Cannabis sativa
tatatatgcaccgtcccacgtgatcacacagaatactatgtctatattttgtcacgcatccatgcacgtgcaattcacacattcatatgtagtgaaccacgtgatgatctctctcatctcctttctctttatttatataaactaataattaacaaacatatatacaagaatatattattaattaatggaggaaattaatgaattagtacgacgtagtaatagtatattattagcatatctataagagaggatctagctatcgagctagcatgtaatttgctttgaatacaaatattatgatgaacttcttccaacattgcttttaggatataattaaacagcgcctcaccattgttcaccgaataaaacgaggtttgtattttttctattttaatttttacatttattttattgctctataatttatacttaattttataagtattagaaattctaatttcaataaattatgtaaaactatattttgttataaaataatataaagtagatga

SEQ ID NO: 68933 - DNA, 1032 bp, Cannabis sativa
atcaaaagttatgcattttcaaaattcgacacaactgcccaaaaaacacgagggcgggccgcgacatgcccaagccatgtcgcggcacctgggatgaaacctcaggttccatcagtaggggcaggccgcggcatgctccagagcatgctgcgacatttgggttccaaacccagaaaccagcaagcttgagcacaattgtcagcaagaaaatccaatcttttcaccccaaatcacaagcaaacactcgaaacatgttcacaatttatcaagctcaaagctagggtattaaaattcgtacaacatgcatcaaaacccacaatttaccctaaaaatcgagattgcttaatcatctcaaaaccatgcttaaattcacaactcattaagctcataaacatgaacctcaacccattccaacctataatttccagctgcaaactcaactaacaagtacataatttctgacctagaaaatacttaataatctcaaccaataatcaacaataacctcacaactatatcttgaaatttcacaaccaaaatcaacaaagtcaagcaccaattcctcttctcatgcaaatccaagaacaacaccactttcatgtttttcaacaattaaaaaccagcaagaaattcaattgaattcaatgaaagagagctacctcaagccttaatcaagaattaagcataagcacaccaaaatctaagttcaactccaagcaattcctccaaatcaagaaattgaaacaaaagagggtttatgagagtgaagggttcgggtttggggtagagaacactagaaaattacatttcaattcttaaaaattcatctcctttattagttatccaaagaaggtcaaaatgaccattttacccctagggctaaaaagcatactcttttacacataagggcaatttagtcattcatgcatatttataccccaaataaattttttagattatcacccataaataaaaatgccaaataattcaatcaaatttacatttcgggcccgaaccccgttcggcccgaaa

SEQ ID NO: 68934 - DNA, 21353 bp, Cannabis sativa
tagagaaatggaggaggtaatggatgactgtgttctttgattttgtattgcctactttgaatagtatttgaaaagttaactcctttttggtctgatcagaaggaatattctaaccgggatgcactatgcctgagaattgctatcgttgaactccaaattgctagtttaaaatataatcgtttgggcatttatatgtatgtgtagttatgctattctaattgatttgtttaattggctgccggtgtattaaaagttgtgttttttattgttaaaaagttttcatgccgtagctatgacacatgaagtgtatgagcaaaactgtaggctttatctatccgatcttgtagaattaggttgcagactcaaaaaacaatctttgcttggttttaatatttcatttttttctgactttctttcttgattcgtgtactccactttaccagagtgctatgtttaagggtagtggaagctaagtttctattgctgcctctgatttattcatatgtttaccggtttcaaagccgcgttttgcaggcttttttattctttcatatttgtaatgttaatggtcttggtgatgctgcaggttgaagggcaaactgaggaagttatttttgatcatttgcatgcaactgctttccaatacactcctctcggcagaacaattcttggtcccgctcagaatattaagactatcactaaggagcatcttcagaactatattaaaacacactacacagctcccagaatggtatttgagaattttcttttttaaattatggtattgatctgtaataagtgttgaagcaggcttcttttttaacctgggatatgtatactaagataacagttttgagaatttcattttaaagtgattatgatgagtttttattattttttggaacttctgttttaggtaattgtcgcttctggagctgttaagcatgaagattttgttggggcagtaaagaattctttcaccaagctgtcatctgattcaacaactgcttctcagttggttgaaaaggaacctgccatttttaccggttctgaggtgtgaaatgttatcctatttggttatcatctattggctcgttatttctttaactaaaatatccttttgatatcatcatcaggttagaatcattgatgatgatattccccttgcacaatttgccgttgctttcaatggagcatcttggacagatccagactctattccattgatggtcatgcaagctctgttgggctcgtggaataagaatgctggtggcggaaagcacatggggtgagccttttgtttaacatgtcttatttttgtcttcagcagttcactttggcaatttcattcaaagagaacatgtattgattagttctgtcctgctgcttacagttctgagctggcacagaggattggcattaacgaaattgcagaaagcatgatggcttttaacaccaactacaaagacaccggcctgtttggtgtttatgctgttgctaaggttttctatctacttttaacttcaatgtttgctttgaatttttatgcaggcagcatctttgatgcatagtattgaaagccacagtgtacaaatatattcaaaaaaaaaatttctttgctctaactgacatctttctcttgataattattattaaacttgtattaagtatgatctagtgtgtctttggcctgcattaatttgattgcatttttttaatctatgttggaaattgtctcagtgtttgtagtgtatattaaatcataactgacagtcagttacagatggtatgttatgtgtatattttccttaaaagtgagtttaattgcaatgcttgatcctcttgtttcagcctgattgcttagatgacttggcctgggcaattatgtatgagataacaaagttagcttatagagtttcagaagctgatgttatccgtgctcgtaatcaggtattcgcattctacttttactggctctggaatattctttgataatttgtcatgtttgcatcggtgtaatcatggaactgaggctatgactgggatttttgtaatttagattagttgcctaatatatccatatgaaacggttgtcaaagcagttttataatactgatgttcccaactgtcttgctcaagttttgttaaatccatatcatgaaattttaatgttaacggttgtcaaacgtatgatacagttgtggtagtcatgacaactgaacttattttctgtcattttcagctgaaatcttctctgttgcttcacattgatgggactagtcctgtagcagaagatattgggcgccaggtatatttttttttatattaaatatgagtaagaattagatcaggataaaagaattggagctttacttgatgccaaagtttttcttattttaacattgtttttttactattattttatgtttgttttttatatgattataacctgggatcgcaataaaaataatgaattgtacgagtattgggttccaattaaaaatggtgatattccagagttggatggtgtcgttctaagaattgagaatagtaactttttacgttctaaaaataaaataaaatagtaccctacctacactacaggttgtaaattactgatttattgatgttttaactttaatttaattatgctactattcagcctttctgaattttctactgataatgaattttctacaggttgtaaattactgatttattgatgttttaaatttaatttaattatgctactattcagcctttctgaattttctactgataatggatttttcttgcagttactaacttatggccgaagaattccgttcgctgaactgtttgcaaggattgatgctgttgacacaagcaccatcaaacgtgttgccaaccgatttatttacgacagggtaaagactatagtgcacccctaaccctttcaattaacacccataattttgaattacatcagcatcactacattgtgttaccttacaacttgctaaggcttgtcttttattcccgacaggatattgctattgccgccatgggaccaatccagagtttgccagactacaactggttcagacgcaggacctactggaacagatactagtttcgttcttataattatttccgcacaaccattctccagcagtctggcatcggatactttggttgctcttttgcaattgttgtccttcaaaagctttaaaggctggtttatatttttttcaataaattttttttagatctttcctttcccaacatttcattttcggaaaataagcaatgcacacgctgtttttcagtgatatatactgtgatttatcaaagctgagagtttttccagatagctcttaatgtcgagacctccaactacaaagtgtaaattaccgtttgttatttaaagcccttattttctttctttctttctttctcaactaatgttttgggtcattgatggtgatgatgtaaacctctgattttgacttccacatggtattaaataataatcaagttacatagatgaagtaagtaaatattgcatataacattaaggccgacagtacaataaaatacagcccttaaatgagtttggttggatttgatttgtttttttaaaccaaaaccaaaacgcattggtactctatggaggcaaagtctttaaagttggaaacctaaccttgtgttctcctctctcaataagtacatttacatttatttaacgtgtctgacacagagagagatgaagtgtgaatttgcgttagttctgaggttcgtggttgtttgttgaggttagttaaaagggcgatgttgatgggtctcattgtaagtatcggattcacaaaacccaataatacttaaagttatagaatcaatcaaacagttacttcaaagcctttttgttaaaagtttcgtatatatcttcgatcctatcgccgcctacccaattaaatctgttttcagatcagaaataaataattaaattacccttctttattcttcttcttcttccaattttggcttgtttttggtcattctttggtaaactcggatctggggttgtggtgttcttgttccattaccagttccgtactttggtttcttctattaaaagggttggtttcagttttgagtgagaaccactacaatggctacattcacggtgccctgccccaaagcgacggcctctaactcattgggtcgcgttggtttgacggtcaggaattctcttcctttccaccacccaaggcggctcacctttcaaaatgccgataatgcatctctctctttcggctttcaggttagtgtatgtgtgtatgtatatataaatatcgtttctttccgaatcaaatccatggcgtacctactctctctcacttttcgttgtttatagacttacccttttccctctctcaaattaatatttgaggggctttatttcatggtttatgattgattagtactccacctttactaaattgaagtttaaaaactgtatgatacttgtgcattgtcagatgacaccaatttatttaatgctagctctgaatctgatatacacatgaggatttgttgtgttaatttagtatccaatgagatttcataatcatattgtgggttcaaattggtttaatgtactttatgttgaaagatgtaaattgacagagttgtaagtacttagtaataaaacaaaatgtgagagaatttgttaaagggtttttttttgtgattcagtaagttttaatgatgaattaatgactagaggaaggtcaatgttacacactggctttctatgttgagacaaaagtaatagaatttcattgtgattttttttcttatgtgagattatcttctgcagtctcagaacagtaagcagccagctatatggaaggtgcatgctcagctaaataaggtaacgagttgaaatgtgtgctataaaaatcttggtatgtttgtagagatgaatgatcaccaaagatttctaataaaactaatttttgaatttcaggttgctgttgcttcaaattctatccctgtacctcccccaaagtctgctatcgagtcaccggaagagaaggatgagtctttggaagaaaatactgcacataacagtgttcctgatccatcatcaatcgcggcattcatggctcaagtatcagaccttgtcaagtaagcttgaatgagtctcatttattttcttcttcttatttcatgtattctattagtttgaaattggttaatctgaatgttatagtgactgaggtgtatattattttgatgttgtaggttagtggattcaagagatattatggagctggaattgaagcagttggattgtgagcttttaataaggaaaaaggaggctattcaacaaccagcacccccggctgtcccaatgcaaactcattatccccaaggcatgtacctatcagcaccgccaccacaagccccaacatcttatgctcctcctgcaagccctcctccttccgcacctgcacctgtctcacctgcacagtctagcaagtcatctcacccgccactgaaatgccccatggctggtaccttttaccggtctcccgcacctggggagccaccatttgttaaggtaattaacgtcttagtttatcaattggcattttctgtttttattttctcctaggcattatactaaaatatatgcaactctatattgtttcttcaggtaggagataaagtacagaaaggtcaagtcatttgcatcattgaagccatgaagctgatgaatgaaatagaggtatcccctatgttcttaattagtcatatctaataaatagtggctatatttttattgaacaagttagctcactcaatttctatatgttcttaattagtcatatctaataaatatttccagtactgagttacaaattccgtctttcaggctgatcaatctggaactgtagcagaggtattggctgaggacgggaagcccgttagcgtggacacggtaacctttttctctctctctctctctctgtcccgtctatttatatgtatttttatctcaattactgttctaagcaataaccactgtcccatgcagcctctgtacgtgattataccatgagtaacttgttggctgagaacctttccaaggttgttcgtgcaagtgcaaacactgtttcatgagtttaggtctgcaactgcaacggttaatgtgttgtattttcacttttgttagtacgttgtttgtttcaagtatttatttttatttaattttccgacaacaaacttattaatttaagagtataatatggcaaaatgctgaatatgttgcgcaatgagtgagtaatgttaaatattgaaatggcattgacagttttgggtagtgtaataattttctcttcttatacatctcttttattgcgtggcttgtaaatgataacaatgagcattcaattactgaatattataccttttattcaacaaaaatacacacaaacacaaattagtgaatattatcaaatctacttatcgtaaatcttaaaacaatgatacctatcaaggctatctaattattcattgtttcgaacatttatagtctctattgaatagaacgtgaaagcatgcaattccttgtattaagaagtattgaatcaaacctagcatcattttctctgtaaatgctttgctgctagagccgagaggcctccttggggtgttgatggctgtatttgggcttcagcagcgatctcttggtttggtggcttggctaggttgtccatggctttttagcattttggtgggactttcatggtgagggtttgtctgtttggtagcagtgggcacgaacatcctgctaagcattgttgcttcggctggtgcacagtagtgcttcaatagcttgtcatcctcagtttaccttttaggcacgattgtacttgacatgataaaagtacaattactttgtttctatgttattgtgctcaacttttgttgtccactttcttttcagtttagcttgacctctagagctttgttcctttttcactaaataataaagaaaaagaacatgaaaaagcatggactacttctcataaaataaaaaataaaatacaaatgtaagcatgccctaagacgtgggactttacgacacagaaaccaattaggtagttcaactgaactttgttccaaggaatcgaagaaagttcaaaaaatttacccccacgacgttatcccaaaggaaaaactataattctaacaaaaaaaagatgcatttaactttttataaaaaaataatgcaattgctataatgccaaaaaccaattacaaatgacggaaacattaaagagaaagcattgcattgctctaacaaatccctctcttgtttcccaaatttctttcttttttgctctgtctcctatatctttttttgctttccacctaaaagctgtacaggttagcctagctgtcatatatctacaactataatcggaccctactcctggtgttaacggctttcctcccactactactcagccttcgacctccaccagcccaatcatcgtcgtcgtcatcatcatcatcatcgtcgtctcctcctctggtcattggcagtggcacagcagctttcctcacttttctaggggttgggcgtttcctctttatgtttgctgtgtaagttgagtaatcaacagtatcttctttaagtgcgtttttgaaatcctgtacaataacaacaccagtgaacaaaaagtgcagagacagttctgacagatctaagagatgaaactgagagagagcacaattcaatcattgcttccagtacctgataaatttctactaattcttgataggttgtgggcaaggttgtccgtgtgtcgctgatgttaaagggaatgctttgcctggaaaatacatctccagccttaaggggttcatttggagaaaaagcctggtatcgtaaaaacaacaacattattcactactcccgccattgaaatacaaaactcgcttgtctagtgagggtctttacctgacaacgtgcatcattcaagctataaacaatcttaaggtgtctctttaacttcagaagaagctgcaaggcaatagcgcacagacaatccggctgtagaacacagaagatgagagttacaaaaaaagcgttttatctgtaacagaggaaaaatgataaagtataaattatacgttacctggatcatctgctcctcttcttttgatatgccagaagattcaccctgatctgaggtaactttcccatcttccggctctggttttactgtaccattcaaatccactaaaaacatatgattatgagatgctacctcttcataatttgtctcactcatgttcatataagccatctcattatgaataataggctgggcactggattcatctctaacttttccattctcacgagaggcaactctttgtgaaagatgcaaactcaaagctttcagttttgcttcgagggcaccagccctaacttgtattactcgatttatagcataaatcaaatagaggggttcatcaggtaatgtaaatggtagcaaggctagaacttctgtgcagtgcctgggaaaggaaacaaaatcgttagttcacttggaccgaaaggagctctacaactaaaactagacatttaacttacatcaagaaaggtattacagaagtgctccaatttggattatcaaatttgcggacaatagatgacataaatttgttccttgaaattcgatttccgcgaataagcttgtagatacgagaaactcctagccttgcttgagtcaaagaagcaggatcagttttcccctttgcattgctagaaggtttggtggcgttcacatgcccagaactcgagctaatggattgtgtaaatagaaaagacatttgaaggccatcccctaagcggctctcaaaaaacgcagggtacctataaaattgtttttagttcaatgtaaaaggaaaaagagaaaaaaagaaagagccaaaagcattaagagaggaatacttttcattcatattcatgagtaaatgatgagccaactttgagttcacttctaaaggatctgtctctaatgctatgaggtatggaacacacgtaattggatgaacaagaccttggcgcagaacaacttcaacaatctgcattcaacatataattatcataattactataataaacgtgtgataatgataatacaaaaaacatataagaataataagtgtgccaaccattctaataatcataattactataatacgtgtggtaataataagactaatcatataaatgacatcaaatgagtgcaaaagggcataatacaaaataataatcatatctcgaaatatagtcaaggataataccagacttcacacatttatttgatacaaataccagcatttaaaatattttttttaacaacataatagacaggtttttaccttaagagcagtttggcgaatttgttcattaaaatccaaacatcttcctaatatgttatcccaatacaactgaactataccaccacagatattagtatctccagcaccagcagcaacaggtaccacttgaccaccttctacagagtaatggactgtcttgttgtcaacagcatctgctcccaattgactttccgcatcaagaagatactcatacatattttgcagtgattgcatctgataaatacaatgattagcaatgtgataactgctacaaagtaatattaccaacagacaacgttaccttaatgcgatcatcagagcttgatgacagggtcacctctaacattttcccaatatctttttccaacatgaattcaggccttgcaattagaacaaagcctaatgcctgcaaatgtggaaaggaacattatgaataaactacatagataagaaagtagggaaagagatggaaaagagatggtagctcacctgcaacgctctaacctttagcacaaaatcatccatatgaagatactttttaaataagttgatactgtgtgctacatcaaccactctattaccggagctactcaacaaagaatggccatatcgaatgagcaatccaagacagaaaagagaccggcccacctgctgagataagcaaaagtaccaacatttataattattcatgaaaaattgctgaaaggctaattaatataatccagaacttatagcaactacagatatgtgctctttgaggctaaaatgccaaaagtcaagttagagatctctaagaattccaaaacacatatatgcagaaacctttccagatttgatcctttatgtactgcctattgagaatcttaaattaagctatagaaactccaggtgttgtcaaggtcctgtgcaagtcaagccccacaagcagtgaagagaaattataccaatccacaaaaatactggagttcaatgacaatctatgaagatgcaaataagctcagaaacatagctgcttgcccacaatcaaagttcaggcttaccaacaaagaaaagactgaaaaaaagaggatcaaatccaaaatttcattataaaatgggaagtatgacactagagcacagtaaacaccatacatatgtcagaaaaatactaaaactgcaaaacctcaatttcactaagacaataaaatgcaaccagaacaatatatattttcattcttttcttgaacagaacaatttaaaatacgttcttctcttgattctagcaaccaacctgcttgttctcaactgccaaagcatctaaacgtttgaagaaaacctgaatgagatactctactacagtagcaccttttccagcaattctactcacagcacataggcacctgttcaaatgtaaatatgagagatatagaaatgcaagtctcacatgttgagtaaaaatcagcatggacatacacattatcattacagagtgtaaagtaaaaagtaaaatctactgctaacatactatgatacacaacattgaatacaggcattatgactacaagtggggaatgccacacataattagttcacttttctcccactgcaccccagtagagatgacataatcttctatttaactacgtacacagtagttttacagaagaggaatcaaaactgtcttcggagtaactactgcctccttatataaagtagtgtgcatacatggaaacagtaacagttaagaaaatagtaatttagaaaggaaaaaaaaaagcaaacaaagttacttgatgcaagcatggacaacagtcaagaaggaatgtcgaacaatcatatgcttcaagtcttgctctagttcttcaataacactttgaggtaactttcgaagtaaagggagcacagaatcaatgatatagattatgctctccaataacttcgccaccgctttattatcagactgaacacgaaaaaaaaaaaaaaaagagtaaaagaccaaaaaatttctgcatttcattcaactgaaatatacttctgtgaatttgtatatgctcaaacttggaaaaaaaaataaataaacgaaagggacttacatgactcttaagataaggctgaagagtgaccacaaactgtgaagggtctgaagctggtgcacatattgttggatctacagtgcaaaatgaatgcaaaaccagtacatatgaaagtccacgcatttctatttcctgcccactcatttcctccacctaaccgaaaagaaattctgaaagtaagctttcaaatccaaaaagccaatagtctagggtgtttatcaaagcacacaaatcaccatacctgtaatatcctttccaataagcacttgcacattaactcacagcgcttacgaactgatgcaagtgactgtgggttgataccaattgctttagctgactgaggaaaaaaatcaagcactaagttacgtgtaatgacagtgaccagatattgatggtttggcatcctcttcatcatctcaacaatctgctcagtttttctggccacctccaatggaacagaacttccaactccatagccttgcatttgtgaaccagaaggttcttcaaaccaaaactcataaaatgtcttgcaaacaaggtcctgaaaattgggaaaaacaacttgataagcgtatttcctcaacgccagtgctcagtttattcctaacaactttctgcgaagaatactggtcatatatacatatcatcattgaaaaaagtttttgacatgacatacttatctcttgagaaaatgtagcacaaccccctatccacccccaaccccattatttttttttataacttctattacctgtatgcttgattcttcatcaccaacccgcgaaatgatctcaatgcaagctctggtgaattcagagaagtttggatttgaagtacacatatcacgaatgattttgatagctcgtttcctgacactaactccagtgtctttgattctttctgcaaccttgtcaaaatactgcaagaaaacccttactcagaaaaagatgaaactaaccatcataatagttaactgttaactagagcatgggagtttcagtaacacctgcaaaccaacatcaggatgcgaggcaatatgcctgccaacaagttccaatgctgcttctcttacagatattgcagaatcacagaatcttccttcaactgccaattgtacacgtttgtcacgtagtacctcaggatcagcttctacaatgatgctgacctgcacatcataacaagcaagaagaatgataaatttaaagttgttaaagaaagactaaaaattctaagagaatcctccacttaccgctcgcaaagccttagctcttattacaggagaatgctcccttaaaccaacctgtaatttgaaatttcaaagaacaaaaatgagaagaaaaaaaagtaacagcaatgtaatttgatatttccctttattgattgttatcaccttattaataacaaagatgtagaaaaagagacagttaactaaccaaaagcatgttaagaattgtatcaaaccctctggagaaagaattgttttgtcccaaagctaaagtaaccttcttgactaaatctcttttcaataatgacgaaacagagccagaatctcgcactatttcatttgactttagtctagcaacgtagtacattaacttctgttctgaatttggatcatccttgtaccacaagcagagataaaacctacaaatacatgcataagtacaatgagaatacttaacaacaatataaataaaatataaaaaataaatcaattattacgtaccagcgaacaaagagatgagcatcatcagctgagctggcctcttgaaggtaatttaaaagtaactgctgaataatctctggttctgtaatagaaaaagaagagtcagactttttctctgttcgatttttatcctttttcccatcatttttgcaatgtgacttgcagtaggactgtaaaacaagaagttgtttcctgcaaacgcatatctggcaatgccatcccctgttagaaatgtcattttcttttactcccaagcaatcagcatgaaacattctttggcagtcttggcacatcaaaaacaatctttcaactttcccttccaaacaaatagcacattcatctttttgatcattctcttcagtctcatctttcctgtcaatctcctgtaatatccaaaatttttctttgctgcaaaataaagcatcacgcttcaaccttgcagcaattgtaccaagaatatcaatggccatagaacgtgcagtaatgtccttggattttgggccagcattctggagaagtaatacgcaaaggacctataaatagcactgactcagtatggaatgcttaaacctaattacaaaaacaaaataatataatgaaatatgttacctctaaaataggcgcagaaccaggatattctggaaggtttagtgttgtcagcagatcagtaacaagattttccatcattaatttcaactcagatgcttcctgagctttcaaattagcaaggcgctgaagtacacgagtccaaaataaacagcatgcttcagtagcggcctcaagacattttgttggatagttagcttcaagtgataattccaacatgggattaccatttgatgtctgccttaatgtttcaggaaggtttgaactacaatggaccaactgaataagtaaagcagttatcatctgaatctgcttttgttcctcatcaggtaagtgataggctctcaaagctcgcttggacattggcaacttacaaaggagctgtagtaattcatctatcacataagtcctgtgttgtgagtatgaatagaatatctgaaacaccataaaatagatatcagtgacttacaaaacagtagtactgagaaataacattataccaatctaaaaacatattcataaacataaatgagcgtgccacacgtgtcgcatgcttgaagagagaacaagctgcaaaggagatgataatggtacagatgtctaccccactaagcaaaccaattgccttgagttgcaagagctgaatattgtccactaagaatgtcgtaaagcttgttttcactaattgtaagatacaactatctgacaacttctccatcatcaacaaatctttaagcaagccaagaatagtgcacatcttttgaagcatggtattaacagaagcagaaaccctacacatacagagtaacaaattagaaaaaactcctccagtaagtcaatattgccaaattcaatgtcacagacacagcatagataagcacacttgtttactgctgatctcttcactttaacagtcttagcagaacgtcgtctcttcgttgctgagccaaactcaggatcgtcatcttcatcttcctcagctgtagaagaaatgttgagagtaagactcaatatcaatccaacaactggagacacagcatatagaaaaagtattgccctatgggtgcaaatatcagataagttaataaacaaaatatgcagattaatgcaaattaggatatatagttcaatgaaactcaaactgttctagcataacatcaccttcaactgtcccattatcatttggtctatgaatagcacggtatgatggatcataagcacacatgatatctgcaatctgatgccgggaaaactcgagaactctttcaattatctggcttcaaaagttcatgtaagtcatctccgtaactcataagtaacaagattaagctaagtaaactgaagcattaagatcataaaatcaaccaccctcaataaaaaataaaaaaatgaaaaaaagaattcacctcttctttatatagttgctttggcatctcattatgagccatcactgccagaaccgcatgaatggactcgagcgcgcaaaaaattgatgaaaagacatctgaatcagactgaaaaaataaagatagaaagaagatcatgcaaaaggctatgatgtttacttcattccaaatccagaaactctctgcaacgtaataagctcacctaatatttccaaactcaaatgcagttttcaacatacaaaaataaaatctaacatagttttaacccaaaaaaaaaaaccatacaatatgcacaagatcatgcgacaatgaaaagtacgcctcaaacttacatgttcgtaatcattaatggacaagccttcagaccgatgtatttgctgatccaaaactgtcaaaagtctaacaagactctctacaggaagcaaatgtagaagtttctttgtacgaatagacattatctcatttacaatgtctctaatatcagaaagaggcaaggataaccattctgcttcatcctggtcatctccaaatatttcagctttgccacagaagtcatccaccaattcacaaaaactgctaataacagcatctacaagaaaaccaggaaaaataatatattagtaaaacaagcaaacatgaaagattattgatttaacaaaaattttaaaaacctcaaggtcaaccttgaatctcagttggatcaggttcaactgatgttgaagtgttctcagtgactttcttcttggctcttgtttttctagaagatgacattgatacatcctataatttacaacatctaggttaacacacaataaactcaaacataaactaccaaaggtagatgcatgtatatctttagccaaaaataacaagggtggtgttatacatgagcaggagcttcactaaacagacgactgcgagttgtgacacccctctgatcatgacttggaataggtaatgctggctcgaaggtcttctcaggtactgtaccagcagagatctggtccttgagaggacctgagaaacttgaacagtgcaagaaacaataagaatagtacattgtatatgttttaagactaactatgtcaaggcaaagcaacagggggaaagcaagaagaagaagaagaagaaaaaaaccagaagacaacaacaaggctcaagcatgtgcacaagcaatcattgagatacaataatatcccagagtctatatttttgcctaacaatacagtacccatttggcattaaaaaaatgtataatagacatttaagtgttcgtatatgatatataaaaaaataaattattataactaaatatgacggatacagaaagatacaaactagtcgtatgttttgcaggtctgattcaaactgttgggtcaaaccaaattcatcatactatggaataagtggctatgtatataaaactaaggaaatcaattaaccaacatctgaagtaccagtcaataccaaataaaagtaaccaatcattgctttcgtagattcaatttaaattgcgaactcaaaagcactactactaacttctaagcaagccatcaaggcagctaaaaagcaatcaaatactttctttacctggatcacttaagtcaaatgcttctggattgaatctaagcacttcatcgtgaagatttaatggttccaaataaccatatgaaactgctctggagtcctctctgaggttcctgcaaatggcacgatatatgagaaaccatgatatataaggaagatatgaccatttgcttctttttttccccttcatatagatatgtgatggtctaccaacattccttttcccgtaatgtgggaggaatcagattaaaaaccttaaccaaaagctcattaagtatcaaattttgctctcaatttgccattttaaaaataaaataaaaattatcccacgcaatcaccagtcaactcacttgataatgccattgaatcttattacatcaaaggttcctttacccaaaataatgcaaaattatttataccattaattatttaagttactgtgaaactaataattttattggcctcgctttaatggtaactctataaacaaatgattcgactactgtaagtaactaagttctcattaatcatcaaattccgctttaagaagaaaaagaaattacaaactttacatgagaccaaatgcaaaagaaatatcaaaattcaaattacttatacgtaagctacctaaaacagcatttctaattactaaaacaacgtaaatacataaattcaaatgtaacaacgaatcaaaattacatttccagaaaaacatcactcactatacaaaatcaaaatttcgaaatgtaacttcatacaccaaaatagaaaattcgaatagttctgaggaagcaaacacttacaagtaagaaacatcagtttgtcgaagcagatcagcaattttacccgactgagcaagaacttcactccgatccaacgcccaaaaactattccgatttggcacgtcgaacaaactgagctcggggtctgaagcaccacagaagacgggaagagaaggcaaaggcaagcatggcgcaacctcagagtgtatagtattggtgagaccgatgccgcgttggctccaggccacgggaccaaagccggagggttgctgataactcatcgattggtcaaccggtgagtccccaattggcaccgtaagggcatgtatgaaggtcggacaagtggcttagcctgtaaatacgaagaaatccaggggcttttacaacgaaattagggttttcttcgcagagagagtaactatgagtaagaacaagagcagtttgaaaatactgaaagccctaagaattagagatttgggaacagaatttttatgtgggagacaattggcggggaaagtgagaaaatggaaaataaatctttttttcttttttttccctattaaaatttgagaagatcgaaaatctgtagatgggaaaccaataagaaaattaaaaattaaaattgaaaaatatcttacaattacggaattctcctttggttgaaaatgtttatttatttatttatttatttatttttgtcagattgaacatatgtttattctatccctacacaatttcaaaattaaattcttaatacgtgttagcttgctgtggaagctttacccatttcagttaggagtgtaaacggatcgttcggatctgatccgactcgatccggatcagtttaagaaccgtcatgtccagctgaactaaattttttcggatccaattttatttttagatttttgtttttttttacaaatttatattttttatattaattttttttaatatatacattttacaattatcctcttaagtgaatacatgaatgttgtacttaaaaaaaaaaacacatgaatataagatgatctcacatgacattattagaacaataaaaccactcatctcaagtatcccgaccactcaattcatgtgactgatgtgggtggtcgacaaatttcactgtagacctatcaaccaacccgcatccaccacgtggatcgaaatagttggcttagaatgaatagccgagttcttattagaaatagaaaaaaaaaatatgattagaatttagaaacgtataaaaatgtatttcaaaatactaatatcttaaaaataaagaagagatgaagtgatcagatgagtcattttaattttgttttagacatagctaaaatatgtcgctacatgtaaatattaatcattctttaaaatatattttattaatttatcactctttttttttctctctatttcttttactttcttctctataatttttttgccgcttttttataattttggcaccaaacactaaatcagaattacttttttttaggacttttatattttgataaatttttattattttcaatcttctctcttcttctataactcgtgtatttttcttttttttttttctaatatgggtttctcatgaggtgagtattttttttttgttctttctttttggttgatttaatgttgtttcaaaatcattcagcaaaaacatgttgttccaaaatcataataagtttgggtttttttttttaaagtatgttttccaatttggggagttagataatcataacttctactcttctcatgttaaactattatttaagcgcatatgtatataaatgttattggtttgtttaaatataagcaaatgttggttgattttatgaatttttttcttttcaactttattcaccataatcatttaataatgtttcatctgatatacatctctaccaaatattcaaagtggggaacagtttagagagacatttcatattaatcttatgctaagttgattttatagtgaatctaagaaaaaaaaaaagttaaagcccaattcatgaatttgacttagaatgagttcatggaaataccaattgtaagaattggtttcatggaaatgtcaattgtaatatatgtatataggtgtacattatgatattttaattggctttcatagactcttattagatttttttctgtttttttgaacaggtggtgactaaaggtccttgccaagaaatatatcttcatataagttatggtattttgcttttatgcactctgttaacgcagttttttgtcaacagatctaaaaaaaattataattgagcaagaaaaacataaacaattattaatcaaaataaaccagcttgtgaaagaaaatttaacaaagacaaaaacaagaattttatagttgtaataactgcattattagattatgaattagtagggcgattaacattaattatcgatagtttatgattatgcattattatatttgttgtgggtcctatctatttttagaaataggtattaaaattttaatttctcaattctataaattttattaaaacctaagagtataatttatgctaaatataaaatttataatttttataatttttgtccgataatgatggaaaatgtgacagatggctaatagagtcacatgagtgaatttagaactttttatttagcggggtattcatatggaatatttggaatatcgcagttaggcggaattatggtttcagacaattttaccactaaacttataggttatttaagtgtgaagtaaggggcaaaattagaattttacaatttattttgtctttttgtgaaatttgacttgaaggtttcgttttatcccttatataagatttaaaaaaaaaaattaagaaaactcaaaccttgcctctttactctctctattcgaacccaaggagaacttaacaggaatcaaggaatcaaccaacagtaaacgtgatgcatgaacgcatacagataaaacatataaaatattatttaagttatttcacgataaaattttctgacaattgatcgtcactttagagtcggtatcaagtcaatttcattgagcctattataattttaaaacttaaatatctcataaatcactttcaaaatatgaaataccgttatttggtcaagttaacaactaaccacgtggaagcttagttgcactttgtgagtgtaacccaatatttcagatttcatgacttaacttagtaacgccgccttagagttggtatcgcactaaaatacatcacttcctcctatcttaatcaaaaaagtaactataaacaatagtatagacaaatgtcttccttagggggacaaaaataaagccgtctcgaggccagtctatactcttttagtgtcgaccaataatggagaccgtaggttacattgacatgtactccttctcccactcactattttaagttaatgtgtttattttattaattttcagaattaatacatattaaccactttaataattataattaatttagttataataaaagcctcaaaatttgtgatttcattattcgttattagatcaaaatttgatagtttgatatttttaaaattaatatttatagtttaatttgtttagtaaccattcatgggtaatacctattaagaagtgttccatatatatataatatagtgggttcaagtatatataggaggggactggtcaccatggtcggcaactgcagtagacaccaca

SEQ ID NO: 68935 - DNA, 1401 bp, Cannabis sativa
  modified_base (529)..(533): a, c, t, g, unknown or other
caatttgatagtgttataaattctgtagataaaatattaatgatttttttaaaataattgtgcctaaatgagctacacgtgcgaagcacgtgagattcactagtatttataaaaagtgttgaggatctaataacaaagctcattaattacatagcagccaaacttggaaaatggctttcactttatacaaaaaaaaaaaaaaggctcatatttaaatctaatcatgattaatttgagcccaaaattcattccatcatttttattattatagcttttttgactttgttttcttcaacttaactaattctacaaaatctgagagcattgtttatacaatttgggaacttacaaaattatttgaaattttggttaacttttacaaaaatactgtcacataaatttttttgtaaaaatactttttttttataaaatacaagtagaacacaaaacagaacaactcaaaacaatagtagaacaacaaaaaaacaccagtagaacaacagtaacttaacacagtatactgcagtannnnncttataaaaaaatacagtaaaaatgtaaaaaataaccgcatgacagtatttttgtaaaaaaataacaaaaattaatataccatgtaaatttctcatacaattaccattgggcccaaaaataacaaaatgagatcagtgactttgccttttcgaaactgacattttcagagaggaaattacattgttttcttttttttttctttgccaagttagaagttacattgaattataccaatttttttggctatcttttgtattaatatggaagtctcatattataattactagtatgataaatactgaatgttgctattgattgcatgtttgtataattatatgtttttagatctttcttctttctttttgttctatcttcttttatttttgattgctcttagccattacaatacatttctaggtcaaaacatgaatataaaatctatttttcaaaatctaaaaattcccatcacacgaacaagttaccactttctcaggttcaaagtgagaaccggctacaacttttctcagcttgagagaagtgaggattactagactttttatataaatatatatatatatattaattgttttttttaccatactaaaattttaaacttttttattttttttactgtgaggcagcatttttttcaaaaatactacatttttttcaaaaatattgtactgtgtactgtattaagttttcacggttgttttttagttgttccactattgtgtttaattgttttgttttgtgttttacagttgttttattaaaagatagtatttttataaataatttcgtgtaactgtaaaattgtaaaattgtaaaatctatttttcgaaatctaaaaattcccatcacacg

SEQ ID NO: 68936 - DNA, 871 bp, Cannabis sativa
  modified_base (159)..(176): a, c, t, g, unknown or other
atttattatttaattttaaattactaactttttaaaatttatcaaatcaatttattacatattaacttatatattacatgttataattatattatttctaaatcatatattagtaaattaaaattacaaaatttttaaaatttataatatcactttatnnnnnnnnnnnnnnnnnnttacatttttcacttttattattttttttaatcatttattatttaaatttaaattactaacttttaaaatttataatatcactttattatattttaaattatatattacattattttttacttttattattttttaatcatttattatttgaattaaaattactaaccttttaaaaaaatttaatacgactttattacattttaaattatatattacatttttttatttttttttattttttaatcatttattaattaaattaaaagtactaacttattaaaactaataatatcattttattatatttaaaattttaaattacatgtcataattaaatatttttctaattatttattatttaaattgatttttttttttaaagtattactttactaactttttaattaatgttttcaagttcaattttatgttttacattatttattttcttttatcaacgattaatttattaatttattcttaatagtaaatcaattttatttcatttaaacaattaattaattttacattttctctactaaaatttcggcagcataacagcttaaaaaatgtaaatccaaaatttctaaaacctataaataacacaaacaaatatttcacgacaatatataaacaaaaaaataatccatccatccaacaacaatcaatgttatcacagaaccaacttcactaa

SEQ ID NO: 68937 - DNA, 946 bp, Cannabis sativa
gtagagcttagtaacatggtttgagccattgagatttacactgaataatatttgtagttagtaactaacaaatactacttgttgtaaatataattctctcaatttaatttggggggaaaggaggaagaagatggagaattgaagaagatgatttctatctttctaattaaatgagtgcgttttggtttcgttggtttaaaaggaaagagtggtatgtgaatgtgatgtaaatatggttacttcgatgaaaggcaattagagtgatcacgtctctggttgtactttgtgatgtttgaaaactaaaatattatgagtttcttcttttcttttttttgtcaaaattaattttgaaggcttttctggttttctttttttctttttttgtcaaaattaatttttattattattgctttctgatgtattttttgttaggtgggttatgtttgcttgcttcattggtttgtttttttttcttcgatagcattttttgggcatgtgggtttggatggaatgagatattttgcatgtgggtggttgtataagtttccaagctgttttgaatgtttttaaggacataggtcctcgttttttaatctgcttttttgagtattgaaacttgagtttgagatgaaaatcaggatattctggatgctatattattgccggtgcataaccatgtactctgcgttcaagttgttgtgtatacaacatggggaaccagcactcttgatgtatgtatcttttgatatggaacttttgagtatatgctttttactccattgcatgagtacatgactaaaataataccagtctttttagagggtcggattggttagaactatgcatgttctacgagtttttgaatagtgtttttaagtttgacgtgtctagctttgtctttttctagtttttataagagcagaactgttaagtgtgtattatcact

SEQ ID NO: 68938 - DNA, 1121 bp, Cannabis sativa
tttttcgggtttgcaggtctaaatgtgcacctctagtgaccgtagaccaagcatataattacaaaaggctacttaattaacttaagttagtaaaaactaagtataatgtacttaattattcaaatattaattctaaaattataaatatacagtttcatatttatcattaaaatattatttatgtaattatatttttgtattgactctcgaattacagtaaataatcgtgaatcagtcttacatcaaaaaaattatttgtaaaaataaacaaaatacaatcgaaatagcaaaattataactgttctcaaattttaaggggtatttttttacaatgaaataatttaggggtaaaatcatacaaatgtgaaaatttaaaaagtaaaattcttatttattcttaatggtatagaaaattgttaactatttggcataatgttaggtagctataaatagtaatgctcacatatttgaaaaagacaagtttggatttggttaagagagagagagagagattggtgttgttgtgttgtgggggagacattatataatgatagaaaagaaagaataaatataagttgcagacttgcagtagtgcagagctgtctaaatctaaatccaataatgggaaatcaaagatcaaagatcacaatatacaacttctctccggctccaccatctccctaccccacgcgtgaacctcacgcgccaccacatacactctcttctccaagccaaatttagggctaccaaatttatcaacatttctattcaccataaaaattgtctcaacaatttattgtacatcttttaaaatggatgttttggtacgatagggataaggtaggtagtagttatttagaattatttgtaaattttttaatttttttaaataatttacacacgattggctttaaaatttagtgggttatagataaaaaattatttttggacttttatttagaaaaaaatataatatttttcaaaattagtaaaaaaaaattatataattttaaaagaaaaagattttttttgagcccctgggctaggtgggtcctaagcacaggcctagcccgcttatacctaaggttagatctgagtttacagtgtcaaaaataaaattc

SEQ ID NO: 68939 - DNA, 704 bp, Cannabis sativa
tgactagtgaagataccacaagcgtgccttcctatagcgagatggacgcctcgctattagttgtatgggtttacttgattattatacttagtttgtctaccgtgtattatacgctaagtgtcttatcggccattgtatctcatcttctaatgcgtagcgaggttgacgccttgccttgtacatctgaaattgtatggtttctcactaatgcacgaggcaacagtttgcatatctttatctcgcctaagacttttcagtcaatcgagttataaatatactgtgtcaattttgcatttaacgagttattctatttcaaatataatcatcattacgtgtgttgatttgtattcttcccagtttgacacgtgtcctcctctgattgctagccgaatttcgagtataacaataccccttaagttaatgtaaactagaaaacaaactgcgatttgcatgcagtgtaagggtgagcaaaaaatctaggaaaccgaccaaaccgagtacaccaaccgtttaaacaccgaaaaaaccaacaccgaaaaaattaaaaactgaaaaaaccgccttcggttaaaactgccttaacacggtcggttttagtatcaatgacaaaccaaccgattaaactgagaactaactgaacatatatattatacattgtatataatataattatttttgtacatatttaatagggtaaataccat

SEQ ID NO: 68940 - DNA, 2310 bp, Cannabis sativa
ataacttttcaagtgaaagctttgagtaacacttgtccgtgtccacatgggatccttcactacagccatacaccacacaatggagctaccaaccaacgatcagatctacatgtgtagtgtctgaccttgtagcatgtttagtacggaaccctaggtgggtgttatcccgaattttgtctacttgatgtggcatgtccacataagccaaagaaggagtacatgtggaatacaaccttgctagtagaaagatagggtctccatacaaggtatggcaaaattgtcaagcagtaactgaaaggagtgaagcgagccatcaagaagttgtaccaatatgtctggctggcaaagagaagcctataggccggctagagtgagcttgtatggctggccaatatctaggcacaagttggcccgcgaaaatgtgacttccagaccaaggaagcttttgtttgtccaaggaaaactgacctctagaaggaaatggtgtacaaagctgtcctccccttgccaaaggctggcctcatcttggtaaagctgacagtgacctgcaagcacatgacctgctaggtcctattaggggcatggccggccagactatatcttctactgtatggtaggctaggattggcctggcaggatttctgtacaacctgatacctggaatctaagctacttctgaattgggcccttaatgacccaacaaactgatagaaaatatttactttcaaggggaaatttagtcttttgtatttaattaatttaatgtgtaaatatctaagattttaattgtaaattgggatttaggctttcatatataaagtccttaactttaacctagaaaacctaagtctaattctgtcctctaagtctcaaaccctagcctctcttcatctctctattggacacgccctaggggttttcttctcacttcctttctcacacgcctttaaggtaataccactctctcaatagagatcggcctacttgatctattctttgtaaccttatagagagccatatcagatcccacatatagcgatctgaatagtatagctcttggtatccatacaacaaaaaaggtgagttggtcattacccgctaactaagggggtcaaacctctattaaaatccttgtctcatttacattactgttcttattgtgaaacaagtggaaagcatgagatccatacaaccccgttatcgattgatcacttttcaaggtaatagtttggtgctttcattaagagagagttgatatcgtatcatatcaaatggcatggttaacatgagaagaactgcggttgcaccatttgcatcttcagttcttcctcaagacccacaaagtgcggaaactgatgtccatgttgcagccaggacttgaattcccattaatgctgcagaagtcgtcaatgctgtcatcttggcaggcaacacgaatctagcaactacaactggctaagatgttataaacatccctgtggatctgaacaatcatcccctacctccaatggaggaccctccacaggtgcctgaaggtagaatcctgggtggcacctccaaggagcaataaccaaatttcttccctgctactatgtaggagagataagacaaggaattggcgcacgtggacttcggagaagatctcaagttagccagacttagagaggtcatctactaagctggctaattgaaaaacaatgcactgctaattgcaatgcattcgctcaacagagacgcaaattccttgaagaaacacacgcggctgatttcaatgcattagcccagtagagacgcggatttgtaagatagatggatgaaaaatagtacatcctttgattacactaggtagagttagatctccttaacagagaggcgaacgatttgataatgcgattcaactagagaactaatttaagaggccaagatctcgttagagatccactacaaggaaggctaattgatagattagggagggtctatggccaagctgaccaacttggccccttagggactaggaaaaatcttccctcgctagaaggaagacaaccatgcctcaaaggtctaatggcaggaacaactagatcttagcaaccggcgacatagaaggccgtccagggacctcagtctcagcaacaacccctacctatcttatggccacacaaccacaaacaagagtccctgtggccgaccaaccacaagcaagagtccctatgtccagccagcaacctaaagaagtccctattgggctttgtgtgctaaataaaacttatttcaatataattagatatactaattaataaagatcagaaa

SEQ ID NO: 68941 - DNA, 1044 bp, Cannabis sativa
cacaaactaataaactaatatagtgagctaaaatggcttctacacctcttttgctctctctctcagtttgtttcctcatcttgtttcatggctgctcggctagaagccgaacagctgtgtacggagaccaaaacgagtgtcagctcaacaggcttgaagcccgtgagccagatcaccgagttgagtgtgaaggaggcatgattgagtcatggaaccctaaccacgagcagttccaatgcgccggcgtggctctactccgtctcaccattcagcctaatggccttcacttgccttcttacactaatggcccacaactcatccacgtcatccgaggtatatataaatcaaaataatatatatacatatatattaaatataaattagatttttaatgagcaatcctatcaaaaaattgacatatttcacatattttaatttgtaatatttataattattatacatgtgattctacttaaaaaaaaaagtattctattttacgattttattaaatcgtatattttttagttgttaagtaacagcttagaaacacgtagcaacatatatttttaacttaattaatacgtaatttaatagtatgtcgtcacatattgatcgtaaaaaaaaaataccactactataaaattttaagatagataaagtaaatttaaaaattataaatattaaaaataaattcgcctcaaatattccaaataaataatacaaaaaaactacttaattacatatcaatactcaaattttattattaacatgtatttatttatatgtttaggacgaggagttctaggaacgttgttcccaggttgtgcagagacatttgaagaggcacaagtatcagttggtggtggtcgatcaagccagagagatcgtcaccagaagacacgtcacatcaaagaaggagatatcatcgcaattccagctggcatggcttactggtgtaacaacgacggtgaccaacccctcgtcacagtcaacctcattgacgtcagcaaccacaacaaccaactcgatctcactccaagagta

SEQ ID NO: 68942 - DNA, 1427 bp, Cannabis sativa
ggcataaaacccaacaacatacttattaaatattttaagtctcttttcacctcttccgatccttgtatacctcaggatctccaagggctgatctcgggtgaaattactgcttctgaaaacgaggtcctcatgtcaattcctacacatgaagagattactcaccatgttttccaaatgcatcccctgaaatcccctggcccggatggattctctggatgttttttccgtaagtgttggaattcgataggacctgaaatcacaagctgtattcagacgatcttcaggtctggtagccttcctcctttgctgaattatactttcatatgtttgataccaaagtgtgagaacccagactcagttgataagtttcagcctatagctttgtgcaactttgtctataaagtggtaactagaatcatagcacatcgtctccggcctctgttggatcgacttgtctcccctctgcaatctgcctttgtccctggtagatggattgctgaatcctctcttctcactcaggagttggttcatacaatcaagtctaaaaaaggaaagggtggcttaatggcgattaaaatcgatatgaataaggcctatgacagacttgaatggaagtttatcgagaaggttcttcaggtatttggctttcattctcattttataaccctgattatgaaatgtattactactatctcctattctattctgcttaatggccggcctcttaagaaatttctccctcaaaggggaattcgtcagggagatcccatgtctccgtttcttttcattctctgtaatgaagttttttctagactgattgccagagatcaatcccttgggaaagtgaatggtatccgaatagctcgcaatgccccggccacctcccatctcatgtttgccgatgacaccattcttttcttcagacccaatgtggaagaggctgaatctcttcagaactgtatggagacttatgggagttggtctggccagcaatgtagtaagcacaaatcgggtattctgttttcaggaagttgtactaatgattctcgacgtcagatcatggagaaattgggagtggggttggtgaaaggtaatgagaaacacctgggtaatcctttcctcttttcccgtagtaagagaaaggactttcaattcctcaaaaccaatctctgtaatagattggagggttggcgtatgaaaactctatctaccattgggagaatggtgactattaaatcggtggctatggcgatgccgttgtataccatgagctcttgtaaaatccctattacctcttgtcaggaattagatgccatagtcagaaaattctggtggaaaggtaatttggatagctctcggtttcttgctactaaaacctgggatgtgctttgtcaacctaaaggatgtggtggcttgggtttcagaag

SEQ ID NO: 68943 - DNA, 4057 bp, Cannabis sativa
cgagcacttacaatcatttgttagctgtaaactttgttgggtttttttcgccactgatgcttggttttgtgaactttgataaaagtcacacttcttgtttattattattattacttatagattttgttattaagttgtgaagaagaaaaaagaaaagtgcggattggaatattatctgtgatcccatgggaatgtctaaattgtaataggaaaacgaatacaataaataattaaagaaaacccaatcgtagatgtaaaaacccaatcgtatttttttggatttaatgtgatttattttattatatataaataaaaggtgatccatgatttttttcataaaccattttatttttaataataaaccattttatttttaatataaataaaaaattatataagcacactttatatagaatagatataacgttggaaagttattttctttcataaccctagaaagctgttaccatggttttaaagtaaattaatttgtgtttatagtcaactcatgctaatggctagcatttataatgtatatcaatatattatcagggccggctttatagccgtaaaacaaatttgattttcgggtgtctaaaatatatataatttttaaaaaaaagtgttatgagattcgaaccaataatattgtataatatgtcatttaccttaaccaattaagctatgaatatttattgtttataatatacttaattttacttaaaaaaaaaagttttaattttttttttattttttattctggccccaaaaggtatgggccttaagtacgggcttaacccgcctaatgttaaaattagtagtgtcttgtattttcttacgtattaatattactgttgatgtaattaattaagtattgaatcttatataattaaatgtaattattaggaagtatcgctaagcaattataaggtaacacttttagaaagtgctagtcactactagtgtccaataccataccgatgtgacgtcctataattggttaataatttctcatattcaattaaaatatgtggaatctgatattaaaatacaccaataacaatatatcgtggtacttgacaccttaaagtgctacttaacatttttcttattcatattcatatttattgaatatgatgaagtaaactgctaatcatcattatcgtctagctcaccatagacaatgtgtaataatagtttagtagaatatttataaataagtcactgtactataaaaatatattgtcaactacactaatgcaacttaaatgcaaaaaccaaacttaataatatcgtaaaacacttggccaccttttaatcggaaagaaaataacatcaattgatctactaatgtactcaaaagtactcataataagtttgattagttttcgttttaaaatcaatgatgctatttcgttgttgtttaaatttaatcaacaatgtcgcagttatgccttttaatatataagagaaatgataaggagcccttaaaataccattttgatttaccaaataatataaaaaaccattatgcacaaaaaaaaaaaaaaaaaaacagcattgtcaatgttatgtacgtacatattggctggactagagagcttataaattagaatatctttttttttgagagagtataaattagaatatcttttttttttgagagagtataaacgataaaaaaatcatttacagtttatatttacgaatatattatgtaagtattctgagtagtagtatcatgtgtacgatttttttgatagttttatatcatgcaatagaatttcgatacagtggtatttcgagtggactgttttatcttggggacaaccgataatttctgaatgcttgcacattcctgggcagtactgcaaatgtcttaaagagatcgagtgacttagtccgcaactcaacccaaaaatttcatttggtaatatcgtccctcttttatttttcagtggcagtctattcaacaatttttagacgtactacgaatgatttttttggtggcattagaaaagcttctcgttttgagagtttgcattttaaactttggagatagaagatgttgttttttctgactattaaaaaagctacgtttgtgctgactttttgaaaccagttatgtctgagactctacctcctgtcgagaagaaagatgaaatcgagaagtacgaattgtgggttaaaaaaaagggagtagagaatgattttctttgtaaaaattttattttgaatgacttgtttaatgatttatatgattactataattctgataaatctaccaacaaaatatgggaatagcattacagaaaaaatatgatactgtggaggtcggaacaaagatatatgtcgtgagccactacatgaagttttaaatgatcgatgataaatcagttaaagtccagtctcatgagcttcagaaaatagctcatgaaattctatctgaaggtatgactattgatgaacaatttcaagttgctgttatgattgatagattaccccttttgtggaaagattttaaaaaactctcagttaaaattctgatcactcgccttcgaactgaggaggaagctcaaaaacaagaccaaaaggaagaggtgcttattgttggaaacaacaacaacactattaaaagatccactgcttttctgaaacccaatgaagcgaatacaaaccgcaacagtcaatctcgaactaataataacaatcagaattggaaccatcaaaggagacaaaataatatgcagcaagtgtcccctaatagtaataattttggtttgttcgtgtgttacaagtgtaacaagccatgtcacgaaagtgtaagaacaggcctaaatctgcttcgcaggctaacttgacagaagagctgtcgtttacagctacgatttgagagatcaacctcattggtggtttgaaggggggtgggtagatattggcgcttcacaccatgtctgctatgatagaactatgtttaaaacatatgttgctactattgaggatcagtaaatattgttaggtgactccaataccactatagttgctgcaactggaaatgtagaattaaacttcacctttaaaagaagtgtgattctaaaatatatgatgcacactccagagatgacaaagaatctggtcttgggctaccttctcaacaaggcagggtttacacagactatagggactgatttatttactttagctaaaaatgatatatttataggagaggggtatgcaactgagggaatgattaaattgaatgttcaagttaataatgttaattttctgcttaaatgttgtgttcttataatacttaacatgctagactttttcacataaataaacgcataatcaagaatatgagtagtttaggcctaatttatctttaaatgacattgaaaaatgtgaattttgtagccaagccaagattattaaacaccacataaacctctgataggaaaagaaacctagcctctagttttaatccattctgataattgtgaacttgatggaactttgactaggaatggtaaacgctactttatcacttttattgatgattgtccttatttcatctttgtgtatttaatgaataataatagtgaagctcttaatatgtttaagttatttgtggctgaaattaaaaattaacttagtagaaattacgtagtgatagagtcattgaatatgattctattacttttgttgaattttataactcatatggaatcatacacgataagattgcaccttattcacctgaaatgaatggcaaaactgaaagaaaaaatagaactcacactgaatatgttgttgttattttatttaattcgtgtgctgcttgtcattggtggggagaaattttataaactgtgcgaaatctcttcatacaaaagtttaaaaaatgaataacccaatatctcatactttaaaagttagggttgtttggcatatgttagaattcatgatccaaagggagttaaattggctagtagagcatataaaagtgtgtttattggatatgttgttaatagtataggtgtcgtttggtaacact

SEQ ID NO: 68944 - DNA, 747 bp, Cannabis sativa
ataacatttattcaattattttaattctatctagaaattaaagcttagtagctactaaataaaatgtaaaaaccacaaattattcacacattcaaaatatagaaaatatagaaccattcagaacaaaaaatagcatcttatttataattatagcccctttttaagttttcactttgttgtttattaggtttaataggtttcctttttctctaataatttgtatacaataacatattttacataagtgctactatcaatatcatattttaatctcttccttaatttttatatttaaaaatacatgttagaatattttttttttaatttttttaatagtaatatatgttatagttaaaatataaaatctttatttttttttttgaaaaaaaaaaactctaaatagtttctagtacgaacaaaaaaatttattcaaatttatatacattttttaaaatttcaaatatgtttttgaccttgtaaacttaagaatttttcaaaaaatttactttggataaagttaataaaggataacttcaatttattatttatgcctttttattaagaaaaataaaaaagaaagaaaaagagaacttattatttgtggcacgtaaattgtagagaatagtttatgagttgtattaatttaaatttattctcattgtcgtttatattcttaggataataacttgacaaagtggtcctcatatgtattttgttggtgcattcttagaatttgatttatttctt

SEQ ID NO: 68945 - DNA, 3456 bp, Cannabis sativa
  modified_base (2155)..(2159): a, c, t, g, unknown or other
tgacttcaggttagtgcttccgctcatcttttattatcttcttctttaatttagcggttttttatattaaagcacttttaggaatatgtttagatctgtaacttatatttatgaagtgttttataaatcctaacaagacattgttttcacgttgttttcttgttgaaataatgtgaaaataacactccgtatttaaaaaagaaaattaaaattcgtaaaaatgtaaaaataattgtagatccataaaaatgcaaattttttgttatttttgagtgtttattaaataatcccgtttttaatttccaaaaaaaattaataacatgttttttaagatttaaatgtttaaatttaaaaacaaaatatgaaaaaagaaaatattatacaagcaggcacacatttaaaaattgtatttttttttcatcttctctagtctaacaatttatttattgaaaaagaacttcaaaagaatagccaacaaaaatttattaaaacaataaaataaattaaataattacctacaataaagtgtattgtattaaagggaaattcaaaattatacttgataattggtggaaaaaaattcctcatactatatggaaaaaagagtaagcggcacagtagacaatccctatatatatatatggcaagattattgtaggacctagcaaaagtttcctaccggtagggaacttttcttgaccattgatttcagatcttgtggttattatgatgtaaggtgtatactattactataagactgtttgtatacaattaaaattttatacatattataataatatttaataatatatttatttacaaaaataaaatgatattaataattaaaaattttattaatttttaattttaattataattatttttttaaagttaattcgaattgttttatataggtatttattttcaagaaataattttacttacaaattttgttatcaattcttttatgttaatagttaattataacaaaattgattacttaattactttcgtttttaatttgtttacatacatagttctaccataattatctttaaattaatttgttttaatatttttataaaattatgtaataatattttgatttgaaatattttattattttttttatcaagaaagataatttctattaatcaaaccgagtcaattacatccacaaaaggatttccctttaaaagagaattttatctctactagacaattaattttttgtacaagattaagtctaattttgaggctctctttaattttactatctatacaactcggtttcataaactttttttttcttttatatagaaattttaatttaatcaaatactataaattgtacctgctaacacattcttatgaacataatatattttttaatgacacattaatatttttttttcattttcaaaattatatatgtattttttaaaacatatttgtttttttaatgataaaaaaaatacattattttaatgtgaaaatataaaataaaaaataaattctaactaatatttttataaagttaataaaaattttcgtatgcatatattctaatctttagttaatttagtagggaaaatagtattgtatggcatatttggaaagaaaaaaagaaaaaaaagagcaaatacaaagcccaaaacaaataaaaacgtttgtatatgtaattcaaacaaaggcagaaaaatcaacccacaaaattttcaatcaacacgtggcgagtcctcagcccctctgccaggatagtacccaccagctgcaaatatgaaaaaatctgctaaatatgtcttaacaaaaattatttacacttacatttctttaacttcttattggctcaatttctttcctcatagcatgcggaaaaaataaggagtcccacaatagatttatcctataaatatatataagagaattaagacagtggcatagcgctctataactactccaaatacttttatctattctctccttaattctctcatttttttttaattttttattaggtttataaatattgttttattaatttttctattttttaaattttttattaagtttataatattattctaattaattaaaaaataaaaaatttaattaataaaaaaattatacatacgtaactattattattattatnnnnnttattattattattataaatatttactataattaaatatatatatatacatgtttaccgagtttttcgaaagccaaataattttagagcttaaaaaaataatgaaggtatgaataatgtaataacaagcaaaagattttatgtggttcaagcgttaagtatccttagtccacgggtttattttattaggctctttagccgaagattgtttatacaaatacaaaatgatagactttgctcctattcctccatgttcctcttgaagaagaagaagcttagtagaaatattatggagttaacattagggttacagactaatgtgttctttatgcaaagaaaaggtcttggatcttcaagtgagaattcgagggatgggtctggatcccttctcttgtgcactcgttggagtatttataggccgacttcatggcatgggccaccttagatagatcttcataggatgaactcccaccattggattggtagatgatatattttctatgtgatttttaccgatgtcagatcgtactggctaccccgacggggtcttagacgcgtgtcaccaggaccactctcatttgaatttcccttgtttcctagccattggattgctttgcacaatacataaggacacgcatgctttgtatggccatgtgttgtgggagacaaactctaatatcgtacatgggaaaaaggcatggtcagtgggccccgtagcctggcatgcgtgggctgaacttccgcgggtcgaaggcatatcccagatttggtggaaggctcatacccctcacgagaccaaagggtcccgtcttctagaatggagaatgtcgttggctcgtgaacatatctttcgtggtctcttcccgagaagatttctctcgcagggacttgttctgtgagattaatgctattatctttccgaagcgcaaggcgaggcacttagggggcttaattactcctcgtcctcctttaattagtatccacgtgtagttccgacaaaaatgtagataacaatacctaattatatccctaaaatgtataattctaaatttaattattttgtaagtccctctctcttttcttctcctctcttgtgttcatttatatgattagtatatattgattcaagttttgattacacatatatttttagcaacaatgattaaatttacatatatataagtttatgtattgattagtgtttatattattctgttatctattataaacagagtataaaattacctattgcttgaaaagaaatgtaatgaccgcttaagtaatttggattagtaaag

SEQ ID NO: 68946 - DNA, 911 bp, Cannabis sativa
aaatatatgtgaaagttggagatgaatcggatctatgtaatgcatgatcaatatattacctaatttcattaggtatatatatatatttcattaggtatatatatatataaatatatatatatttatatatatagcattctattcatcacttaccaatcataaaaatgtgttttttttcttgagttttatatataatcataaaactaaatagtgattaatatatagtgaaaattatatgtttataaaaacatatgtatattaatatatcgatcgatcattgaaatgaatatttcaacaatatattgaaaacaaaatcaagaaaaatatatattccaatttatgtaagattctctaacaataaatatgatatatatctttgagataattttgagtaagaatggattatatcgcaaataaaaattaacaatcctaattaaatagaaatcaaaatgatgcatattaaagaatttcaaaaaaatatatatttatataatgaaatggttggttggaccactaaataaaaaataataagaagaagaaatgtttgatctatttaatcgattttaatctacaaaaacctaatcatcgatattttacctaattatttacgtacgtgagagtacgtgcatgtaaatttgccatatataataaattaccaataataatatatatgaacacctttcatggacatgcatgcaataacaatacaaaatatatccatattaatttgtgtataaaacaagcatagaagccaaactcatgaaattaattaatgatatacaatcgaatctttatttaataatactctattaaaaaatttctaatatttattataaataaattaagtctcaatttgagcaaatcataaataagaataacatctaaattacaattagttatacattttttaa

SEQ ID NO: 68947 - DNA, 685 bp, Cannabis sativa
agagagagagagagagagtccaaaatggaaaagtggaaagtagtatttggaagggagttgatgagaggaatcaatggttaggtaatggcttgtggcctcttgtctttaaagaaggtgtttgtgttagcttacaactttttgggagggattttcctcttgttatgttttatcttacagaaatagtaaaaggcactagcaataaacattgttataagatatcaacaccgtctagtactacttatagttagtgtcttataaatagttaacgatattttataataattattaaattaaattatataagacttgatatttaattacattaatagctaacaaaaaatatttataagaagatcaaagtgcaaaagaaaaaaatttagggaggttaaaaaatacatttttaaataaaaaattagaaaagaaaaatatttggggggaagcaaggcccccatattaaatatacatattcgccattacaaacaacgacatgacatttttaagtggtgttaagaattactagtatttttctaataatagtgctcgtacaacaccataaaatgtcatacttttattaatataattaaacatcgaatttttatatattttaatttaataattattaaaaaaactgctaatttataatagtattaaataccactaatactttataagaatgctactctta

SEQ ID NO: 68948 - DNA, 988 bp, Cannabis sativa
  modified_base (512)..(512): a, c, t, g, unknown or other
  modified_base (560)..(564): a, c, t, g, unknown or other
ctgttataattttttttttacaaaaagaactatatacgatgatgcctcacaacataaaaccaaaatacacaatagatacagcccaaaacaactcttggcaacccagtacgcaggtcgacaaggtcaatatgtacattgctagagaagaatgtcacctcatggttgatctagcttttctggcatttacctgcaccacatagcacccgtgagtcacaaggacttaggaagagaagtaagaataagaatcatatagtttattactcgaatattgtcatttacatacaacaagaatcaaaccattacacattgttcattagatgaaatccaaattactattggcatctgccacgaataaacattagtatacatatatttggtaatacaaaacctttataccaataatagaattcataatcatttagtcatataaattatatatatgttacctatgtcacctaatcaggtgagcatgtgccaaagacctgcactcatatatcatataattgcatcanctaatcaggtgagcctgtgccaaagacctgcacccatatatcatatannnnnatcacctaatcaggtgagctcgtgccacaatctggcaccaatatatcgcatcgtctaatcagatgagcccgtacctatgactggtacttatcataagtaactaatgcccgtacttatgcccagtacgtttttaggaaaatcgcatcacctaatcaggtgagcctgtacctacgctcggtactcattaaatatcactaatgctcgtacttacgcccactacgtcactaggaaaatcgcatcacctaatgaggtgagctcgtacctacgctcagtactcatcatatatgattgacgctcgtacttacgcctagtacgtcaccaggaaattgcatcagctaatcaagtgagctcgtacttacgcccagtacgttgccaggaaatgacatcacctaatcaggtgagcctatatatcacatgcataata

SEQ ID NO: 68949 - DNA, 851 bp, Cannabis sativa
ttttcacttgttgctgagatggaacagctcccctttcccaaacaagcctgaaatgttgccattacaaaaccaaacaatttatatcaatatgaaattttctttgaaactttagtaatgtaagagaaagtactctcacctgttcaacaattgttttggaattaaatgcatgacaacttccttgtgcatagctttcacaattaccagaaggggtaccatagcttgcaaataagatttgggaaatgttctttccccgaggacaacggagttgaatagacggcgacacccttttgagattgcggtgtttatcgttctttccttgtctttccttctcttctacccatgatctcactggtggtagatgagattcagatactagtccacatgctcttgctcttaaaactttgtctatagatatcccaagtgggttcccattctcttcttctaaaagtatcaacaagttcttactaggcttgaggaaagaccttggaacattgtacctaaaaaaataacatgttaataatatattgagattgagaaagtaacaccaaacacattcaatgtagagaactcattttcaccatgtttgagatggttttcctttaggtgtgtggaaagagacccaataccgaccgatgccctgaccgttgatccaagcttgaccttttcccatcgaaccaagattcaaggcaagaggctcattcccagttggtgcatcaaattcaatctgtcatttaacataacagaagagtctgatcagtaacttttacaaaatagaaagtccaaaacgatattaaatatagaactagtaatcgatattcgataccttgtaccatgtgagtggttgtgtttga

SEQ ID NO: 68950 - DNA, 950 bp, Cannabis sativa
tatttttataaatatttgtatgtggactgtataaatgtttaatgggccggcccaaagtatttttgtaattttttttccttttttgtatttttttgtttttttccccatatttaattatattttcaatttttattatctgtatttaaaattttataaattaaaaaaaaattaattaatttttcaattttattttcttaaaaaaaatatttaaagttttaaaaatttaaggaaaataaatataaaatttaaaaatattaaaattgaacatactcctaatattaaaaataacaataaaaaataataatacatataatatatataaatatttatatatgtttaaattcattaaaaatcaatataagttcaattaatataaaataaataatattaacatttatatatatatatttaaattaatttaaaataaataatttactaacaccgtctaatttgatggactattcttatattcttaaaatattttgttaaattcacaaaaactgttacaaagccacatttcataaataaatatttttttctttttctttgctatattcttaaagatccataaaaaaattatatgtaaataaaaatatgttttaaatatacaacataaaaaatgagaaaaaaaattacatataaaaatcatatgaaacaaatataatcaagaaaatgattgaaactaataaaaaaaaatgtgacaaacttgaaactaatttctagtatgaacacatataaaaatataactagttttgtcataatatttttaggctacgttattagtaagttttaattcgataaaaattaaactcaaaatctattatttatactattttaaaaatacaaagtctgaattattatttaataaaaaaaggtgtctactcaataatttttgcaaaatataacattcaaaataatattatcacaattcaaatttgttattaatataa

SEQ ID NO: 68951 - DNA, 962 bp, Cannabis sativa
attacaatggatatggcgaatctcgccgaatagcttgactcgcacaaaggggaacaacccctacccacatggcactagctttgttaatcaaagcatcattagctaaaatatgtgcaacttggtttgcttctctaaatgcaaaggaaatccctgccactctttcattttgcagcagccatttaatctgcgcaatgagcccatcgacatctcgacatccttcctcctctttcatcactaagttaactgcttgaaggcaatcggattcaatagagaaggaggacaagttgcgctgtataccggcctgaagacccatcagaatcgcttgcaattccccctgcaatggcgtgagtttcttctgcacaaaactattagcagccacaacaacccgaccttcatgatcccgaacgactgaactaagcccagctatgccttccccaaccttgacccctgcatccacattgattttaaaagagcctcgcctaggtggagtccatcttgcctcttctctcggttgtccagcttgattcgacacattactctctctaaattcatgaaggaacttgttgcaccattctaatattgcactagcttgaggcttgtgtcccccatgattaaccgagttgcgaatataccaaaggttccaagatagaaccagaaaaaattcaaattcatccttagcgaaagaacttgaaattcgcatgaggaatgcaagcacatcctctcggccttgtcgctgtattttcccataaaacccagctccattccaaacctcctcggttaaactctacaaccccataatgcatgaaaaacattctcatacgcacctgtagaacaccgcttacaataaggttatacctgcatatgccgatgagcaagagctgaattagtaggaatccatgaatgagctatcttccaaacaaagtgtttcaccttcggcagaagtttcagcttccaaagcttgc

SEQ ID NO: 68952 - DNA, 523 bp, Cannabis sativa
cttaagagcaatatacttgacaaggaattattcttgaagagtaaacttctagagaattctttttgggggctagctctcgggctacctctagaaatgaatatcttctctcaatagttttacacttagttgctgagcaatttaacattctaaggaactctctctaaatgtgccacatgtcaaagtaaaaaaaatatggtacatatattaattaaaaaaaaaatacaaattaaaagcatgatatgtttaaaaatatgtattttatgaaaataaaaacacaaaaaaagtaatgatatatgcacatataattcacacataaataatattatatttgtgtgtgatttatgtgtgcacatattattactcttattataatatgtatattaaaaaattaaaaaaaatatgttaaaattaattaattacttttattgtttcgattcatcctggttcggagaatgctaaagtagctcagcttgtggtctcgagttctggggtttgggatgttgacttgttgtctaaccttttt

SEQ ID NO: 68953 - DNA, 1124 bp, Cannabis sativa
aacctgatacacttaccctgagtgtcccagttgtaaggagcatcataggggtgaatgtagaggacaaggatgtttccagtgtgagttgtcaagacactctacaagagattgcccgcaacttaagaaagaggaatagaagtcaacaataaaacccgctctagcaagggtgtttgctttaactcaggctgatgtagaagctagcccctcagttctaataggtcaactctcggtcaacaacatttacttctctgtattgtttgactttggggccactcactcttatttggcagctagaatttttgataaattgggtagaccgcatgatagttattatataggtttggaaccctactgcctggcgaagaattagttatctccaaagggaagggttaggtctatgccgatatgaattaatgataggaaattgagtgctaacttgatagcattgggtttagcagattttgatattatactaggaatggatttcttatccaagtactcagctagtattgactgtaaaggaaagatggtgatcttccaactcgagggcaaggaaccatttgtatttgtgggatcggtttagggatcccagattccagtgattttagtattaacatctagagattttttacaagaagggcgcttaagatttcttgcagtggtattggataccacacaacttgaaatagtttgactagatgatatcaaggtagttcaggaatttttagatgttttccctaatgaacttctaggtttaccaccgtagagagaaatagattttgttattgatttggcactaggagcagaaccagtttctaaggcaccttacagaatggctctggcagaacttaaagaattgaagatccaacttcaagggatgcttgacctagggttttctcgacctagtgtttcatcctggggagctcccgtattgtttgttaggaagaaagacggatccttatgcatatgtattgactatcgggaattaaataaaaagaccatcaagaaaaagtatcctttacctagaattgatgatctttttgatcaacttcaggagaagacggtcttcttaaggattgaactctgatcaggttatcgtcagttgaaaatccgagaggaggaca

SEQ ID NO: 68954 - DNA, 1081 bp, Cannabis sativa
  modified_base (986)..(1029): a, c, t, g, unknown or other
atctatatatcatgtgtggaattgaataatagtagtcacgtacctatactgacacacttacaatcaaaataatttatatttagttattgaatagaatgtaaattgtacacatattttaatatatcgtaaattcattgtacatttagaatatttaaatatcattccctgaagcgaatgaatagagatgaaattctgtttcaaaaaatatagatttttacatatattagtaatgcgagaagcaaattaatatatacatgttttattatttcttgaaatcaatagtttcaaactattattggtacaagatatgtatatatacatttactatctaattcaatttgcatattcccataaatgaatatatataatttactaatatttgttagtgatcctttataatcttatataatcaaagtgataaagaatcacaaaataattatatgaaaaaaactttttgaagaagtcttacatacaattgctacttaaagtagttaactatatttgtatgtatctagatgtaaaaaaatttatcaagtcatgaaagtaacaagtcatgataattagactgttgaatagtctattattaagaaattagacgacttgttagaaagatacaaggaaaaatgaatgttatattatggttatatttatttgaccatgacaacaacatgatgaagtacaacttgtacctttcaaatgtacgcatcattgaattgatgatgaagaaatataaagtttgatatacataatagtaactcctaaagagtatatattttttagagaataatataattattttattcgtgtatataaaaataaaactggtaatgattacttatatgttgtagtgattttacattaccttatgaaagtttcattgaaatacaaattatactaaacatgtcctctgtgaaacaccccaatgcgccctcacctcatttgtgagttacaaaaattattatttagcagagaagaagaagaagaannnnnnnnnnnnnnnnnnnnnnnnnnnnnnnnnnnnnnnnnnnnaggaggaggaggaggaggaggcgggtagtgcaatgagagagagagagagaga

SEQ ID NO: 68955 - DNA, 2656 bp, Cannabis sativa
gaatttctgttgaattttaagtagttttttcataagttcctgtcctagttgtgcagatctgtagaagaataaaagcatggaaattgtgaaaattctgggaaaagacttcataaaaaataaatttccatgtcatattgaagacacggcggtatgcaatgaaattatttacctctcggaaagtttctcatctttgattacatcaagcgacgcaatggcaattgcactggccaatgggttcccgccaaaggtactaaatcaataacaaatcaaagcaaggtgagctcttgcttggtaagtgtcaattggaaagaaaagaaattataaagacgaaattcttagctagtgatgattagaatcaatattagcaagtaagcataagtgcaaaccttccatgctctccaggtctgatacagagcatcacatctttgtctgcaagaactgcacttaccgggattactccaccgcctaaggcttttcctaaaatctgaagagaaaaaaagaatgaatataaactttcgtttcatgagtgagtagagtgtgaaaaagaaagtgacggcttaccactacatctgggcgaacttcttcccaatcacaagcgagcaattttcccgatctagctaagccagattggatttcgtcagcaatcattaaaatgttgtattttgagcaaagttctctgacagattttaaataaccatcaggaggaataacaacctaccaaccaacaaccaaaagatacaatttttctcaggtagtttaaatgaacaaacacatgaacacttgtacatgctttctttaattttaacttattaaactcaagaaaaaatatctgttttgcaaaaacgtaccccggcctctccttggatgggttcaaacaaaaatccagctatatgatctccattttctgcacttcacagcaatcataagttaacatataaaataaattgacattacaaagatatctctatataaaatttcccctctttctcaaaattgaaaaggcaagaaagcttagagaacacaaacctttaaaagctttttcaagggcttctaaatcaccaaaatcaactttgagatgaccaggcaataagggtccaaaacctcgggttgcctcattgtcgcagctcattgagatgacacccaacgtacgaccatggaagcatccacagcatgacacaatgatagcctacacatattgtcattgtgaataagagaaatattatcatagaaggatagtcttaggcataaccatataaatttcttaacaattaaataaatgcagatagaatgaggacacaagttccgaatactaacatgattaggattttcaagatactatctaaacaaaaactacaaggttcttcatatcagcaactggataatttgtcttcaataagcatattcaaatttaacaccgagtgtttataatgagcaggcaacagaaaaatccataactaaacgagtttaagaacagatcaacgcaaattggaaacttaaatgagataaattaaacctatactccacacaacagctaaataacagcttaactcaatcattgtttataaaggtcagtaaataaccaagacatagagagatgaccttgcatctgttgtatataatctccatgaattttaccttatcatttggaattttctttttctcgtaaccccatttcctggctaacttcagagctgtttctacaccttcagcaccagtgttcataggcagaaccatgtcatatccgaacatgtctgttaggcgctcagcaaatatcggaaatttatcattatagaatgctcgagagctaagggtgagcctttccgcctgttcttgtaatgctttcatgattttcggatgacaatgtccctataacaagaacttatgaaataagaatccataaaaactcatatgaaaaacacaaaaagggaactggaaatcgatataaattcgattgaattgaacatcagtaaattgtctgccttacatcttctatgaaaagcaattgtcacagtaataagcaagttggctcagagagaaacaaattcagtgatcaagtaacaaaaatacacataacaacaaaaattctcaatcttgtgtacctgattaactgcagaataagcagagagaaaatctagataccgtttgccttcaggatcccatatacatgatccctttgcctgagagaacacaactggtattgggtgatagctgcataatttcaacaagtactaaaatgtcttagacaaatattaatctattagcaacaggtgctcaattagattgctctaacagaagaaattaacatacaagaaaaaccatacacaagataatgtaaaggtggaaacttcagaacatgaaaatgaaaatgacacaagttgaagaacaaaaaatagtaaagtctctctctctttctctattaaataaacaatttagcactgaaattactaagtccaatatcaggattagcattcaaaatcatcatcataataatctttcacaaaaaaagtgatatttggaaaacaaagaggaaccttttgctcaacccaagaacactcaaaatcttgcctacccattcccccaaaacccaaaaacgctaagttatcaaaaaaaggtataattcagagaaaacccattgaagcataatgagagagagaga

SEQ ID NO: 68956 - DNA, 596 bp, Cannabis sativa
gtgtcactatatcctattttttttattaatatttttagagatatagtgacacacaaaaatgccactatattaaatatttttcttttttttattaatgttgttaattttatttatttattttattttgatactaaaaaataaaataaaagtccaatttattgttagtttagtaaattgtacacaaaaatcaaaaaaattataatttatatttttacaaactaatctattcaattcagattggtaaaattattaagtgtaagtgaatataaaataatttacaatgtaatacatgatcaaaatgtacaaatattttttcagatctatatcaatataaaataatttacaatgtaattacatgactaaaaatttaaaatgtacaaatatttttccaaatctatattgaaacccaaacaaaagcacaagtcgaaaccagaagaacattaaccaaaaaaccgaaaccaaactcaagtccaattaatcctgacctccccacccactgcctctgcaactcggactctggccaactgcgcaacctccaaagcaagcctttgtcgatgatctacagagaagacagacaaagagagagatagataaca

SEQ ID NO: 68957 - DNA, 1182 bp, Cannabis sativa
taaagcttgcctcaaatgccatggggtggccctcctacatgagtacccctcccaaagcatagtttgacgcatcggtttgtacttcgaagggtttgcatacatctggcaaggctaatacaggatcttcaatcatggcctcttttaaacttcgaaaagcttcttcgcacttcacagaccatgtccatataacacccttcttcaacaactctgtcaagggtgtcgctcttctcgaatagccctccacaaatcttctatagtaattggctagaccgagaaacgagcgtagttgtttcacattggctggggtcgtcaactcttggatcacccgcaccttttccaaatccatacggatcttcccgtgttccacaacatgacccaagaagttaatacttttttgagcaaaagagcacttctcccgctttacatacaactgttctttcctcaacttccgaaacaccgttgccaagtgctcctgatgctcttctaaagtggcgctgtagaccacgatatcatcaaggtacaccacaacgaacttgtctaagacatcatggaagatttcattcatgagtgtacagaatgtggctagcgcatttgtcaacccaaacgacatgacgcgaaactcgaatgtcccataccgagtaacacaagttgtctttggttcatcctcttctgtgatccaaacctgatagtacgctgatctcaagtccaactttgtgaagtattttgctccacttagctggtcaaacagatcagcgatcaagggaatggggtatctattgcacacagtcatattgttgagggcgcggtagtctatgcacagtctcaaggtcccgtccttcttcttctggaacaacacgggggcaccaaaaggtgcctttgatgaattgatgaattctgcctcctacatcttcgttagctgcctcattaacttcttaagttccaggggagacaatcggtatgctgctttagctggggcctttgcaccccgcaccagctctatttggtgatcaactcccctcccaggaggcagtctctttgggagttcttccggtatcacaactttgaattcatctaacaccttctcaactacatgtggagtggactcttccactttttcatcgtacacggtgggagcaatgacaaatgttggcctcttcttcttcaagcccctcttcagttgca

SEQ ID NO: 68958 - DNA, 703 bp, Cannabis sativa
accgtatttcataattaaatattaatatatgcatacatacataataatcctaagctgtatctcaaaattaatatgtatatatatacatagataataatcttaaactacatacacatcattctatccaaaattcaaattatatattttatattttgcttgaatcacttatatatttttagaatttttttcttgcattttttttttctcagcctccatcaatttttttctctcatatatattttggtatttgttattttttacttcggatcccagcctattatattagggaaatttcattttttgcccctaataaaactcccaatatcaaaatttagaccctccactaatttgtacaaattaattctattgttacatgaatttcccattttatccttgttttaaaaaaattgttaaaaactaaaaaaaacttccccctctgtcttccccctctctcttgcctctagtgcaccccctctctctctagaaaaaattgaaaaaacttccctctctctcttccctgtcgaatgtttatttcttggtgggcggtggtagaaaatccgagcacaccccaattactcaagaatcttacaccattataatgtatgagttgtgttttaagcattttgttagattttatgtagtttgctttcgttatatgtgtcgtatttgttagaactgatattttttggtctgaaatggtaga

SEQ ID NO: 68959 - DNA, 960 bp, Cannabis sativa
ttgtgaaaaattgcatgcaacacggacaatatgtccgcgcacagatgaaggggagcttaccgaggagggaggttgcatgcagcctcagaaatgttttgtctgaaaacgtgtcccaaccgaggaagggggctcatccgcgcgcgcatgggtagaaaccctagcctgatttttcaaaattttcaaaatatcacaaattttcaattttaatcgaaattaagttctgtaaaaaagtaatttgcttaattttttatcaactttccaaataaaatatttctagaacaaaaataaaaatatttttcatagattattttgtgattcacattcaatcattaaatagtcacataaaccaacatgaacacatctaaatcaaccaaacatcattttaaattcatatttcatgaaaataaatcattactatggctctcaggccagttgttggaaattatattaccaagatttagatttactaacatgtatgttgataataaatctataatctaacatcctaaatatgaatttcttaaataataaaataaatacatataaagttataaaaaatcttatattggtggcagcggaatatgatgactccttttgtttagatctctaacccttgatcttttttgttgtagagtatgatcaagatctgaacttagatctcatttaggtgacaacatgaactacacaatctttcttactataatctaacatcctaaatataaatttcctaaataataaaataaatacatataaagttatagaaaatcttacattggtggcagcaaaatatgatgactccttttgttcagaactttaacccttgatcctctctgttgtagagtatgatcaaggtctgaacttagatctcattcaggtgacaacatgaactacacaatctttcttactataatctaacatcctaaatatgaatttcctaataataaaataaatacatataaa

SEQ ID NO: 68960 - DNA, 795 bp, Cannabis sativa
taattaagcttaagaaaaaataaattgaagaagaagaaaattaagattttatgtggttgtggcgttaatgagtcttagtctacgagtcaatattattgagctagaaaaacttcaagatatttttacccaaacgtttttgtcctagctggagaaccctaattcttagctcttagttgcagaaagatgatttttccaccaatccctttgcacgaagggatcatgttctttttagagcttaaactcgggtatgggtaaacccgaacccggtagaatttagaggtgtcaactaagcccactgatgggataaaatataatatatcttgactttgtgccaattgggtgaggcctaattcacaagataaaggtatctagtacgagtggggactgatcatgatgccacgtgtcgtgagctattgtgttggtactgagaatgtcagagaacatggcgttatacaaaaatatagttgccctttggtggtgcacacactccctcggtctgatgcaagggataaactcatgacatggtggggtcctatgtctggaggatgccacataggataatatctggaggtctcgaaatgtctcttcaattgtctgtatccagattatcccatgaaaacatctagatagattatgatcgacctttcaccttttgggccaaacatcattttctcaaaccgaaatggtccgaccttgtcatgtttgtaagctagatttacaacccagatccagagccatagcttgaatctgtaggtgggttgatgtaatgaccgctctagtaatgtggattagtaa

SEQ ID NO: 68961 - DNA, 539 bp, Cannabis sativa
  modified_base (350)..(355): a, c, t, g, unknown or other
ccaggtccctgtttgggtctgggtttgggtcacgattcaggtcccaatcaaggtctaggtcctgagcgaggtttttgtttgggtttgggtttgggttcaggtcctgagtttgggtctaggttcgggtttagatccgggtccaggtctaggtcttgggttctgatctcggtatgggtatgggtttgggcccgtgtcaaggttagggtatagggtttacggttttggatttattgtttagggatttagagtttagggtttagggcttagggtttaggggtaagtgtaaagattttaagatttagggtatcaagtttagggtttagggtttaagggtctgcttccagtgccgnnnnnnattttgggtcacagggtacgatttaaggtttgggtgtgggtctgggtccgagtcctggtctaggtctaggtctgtgtttgggttcatgtccgattccgatcttgggtcccgatccgtgtccgggtccgaatctgggaccgagaccaaggtctggtcttaggtcccagtccctttcctgggtcct

SEQ ID NO: 68962 - DNA, 2119 bp, Cannabis sativa
aagctagccctaaccagattcacccactcagaaccaaaattaacaaagtcaaccctaaacctaacaacacttcctatttacatgtgaaaagtcataatagaccaagcttaggacattacctttgattaagtcctcaaaactacacttaatatcccttaaaattgaaagaaaactccaccctaggctggtggttccttctggccgaacaaagaggaagaaggagaatgaaggagccctttttcttctattttctaaatcctctaaattgcctaataaaaggttaattaactaacctttatctaaatatatggaagctatccctaattggcaaggccactcaataataataatacaaaaatggtgaattacttaaatagccccaatactaaacctagttcaataatcggcttagggtaaaatggtccacaaccacaatcccactaataccaaccaattaaacttacatgatatattttctaacattaccaaattctatatatcctcaagtgactaagatatcctccgttgccttttccatcgtcgccgagctaaaatcacagagatagcatattattcacatttaacataatcattcacataaaaattccaatataatgataataataataaaattagcacttataatctcactaatctatatttaattcttacggtcgctacagtaacaccaccatatactcttgaatccaatagagtggcagaacaaataaattatcctttaaaggagataatgaatgacatattattaagttctagattaccacaaaacatgtggggtgaagctattttgtgaactaattatcttttgtataagattccccaaaagaaagagcaaaagataccatatgaattatggaaaggtagacaacctctatacaaatacttaaaagtctaggggtgttttgttaaggtgattgcaccatttccaaagagaatgaaaataggtccaaaaacagtagattgtattttcatatcctatgcaaaaaatagcaaagcatatggatttgttgtacatgagtctaaaaaccaaaacattcctaagaatacgataatagaattaaagactgcatcattctttgaacatgtatttccttcaaaggtaatgtggttaagccaaatgaacatctaaaatgttcaatcattgaaggtactttaataattgggccaaatttctaatttgtattatagcggcagaacctcaagcatataaagaagttagcgagctctattgaaggtagttttcgaaaggaaaccataaggagtgaaatcgattccatcttgcaaaatcatacttaagaactgattgacctttctcctggatgtaaatctttaggttctgagtggattttcaaaagaaaaatgaaaatagatggaataattgataagtacaacgtccgattgataataaaaagttagaaacaataagaaggccatgactaatttgatacttattctttggtgacgatactaaattctatcaggatgattttggcaattgttgcattgtgaaatctagaagtccttccaatggatgaaaatactttctttctaaatcgagatctttatgaagaaatatacatggaaaaacctaagggttttgtagtttcaggaaaagaaataaaaatttgcaaacttgttaagtcaatgtaaggacttaaggaagcaccaaagtaatggcatgaaaaaattctgtcttgatgacaaatgagtttggcaaatgtgtgtatatcaaaactacaaacaagggatacatcattctatgttgtatgtagatgacatactcattgttagaagaaatcaaggaatggttaaatctaccaaaataatgttaaactcaagttttgacatgaaggttatgggactagctaatgtaattttagggataaaaattataaggacactaaatggacttagtttgagtcagtcacactatgtggacaagacacttgaaaaattcggtaaagatgattctagaatttccagaacaccaatcgatacgagtcaacatctgtcctagaataatggtgaaagtgtgtcacaagtagaatatgctagagtcataggaagtctaatgtacttgatgagttgtactcgacca

SEQ ID NO: 68963 - DNA, 889 bp, Cannabis sativa
aggggtgaaatagaaatttgctatattatataccactatcatataggaatattttacagtgtaccccttttaaatagatgtagtgatgcattcctatttattttagcatctgaaatagttttttagtcaaattttttctcataggcatgtacgttatagctatttaagatatcttgtaaaattttaaaaaatttaacatgtcaaaaatagggttcgcgtgattattttattttatacgcgtgtgaaatagattatttgaacactactttttataatgtaaattattccaaatttcttaaaattttgtaagatattttaaataactataacgtaaacgaatataaaaaaatattagactaaaaaaattttttggatgccgaaataactaaaaatgcatcaataaacccctctttaaggaggtacattgtggcctctaacatatacactacaatctacttggtaggataagtttaattatgcaagtagggtatagaggaaatggtgtgcatgtgaaagaatcatggttatttttttatttattttttttgaaacaagaatcatggttattagatttagatcaaaccaaatctactagtagttgtaaaaactagtataattataaatatctaattattttatttagtttgaattttacagcatgtataaaatatcaaatcaatctaatcaaaccttcttgaagtttgtctagccatatttgtttgttctctaaagagcatcttaattaaaactccattcaaacacaatgtctttgtaatatagttttaagtcgatctctgtggaagaaataagaaaagtatgtgaagtttagcagggcattttgaccattattattattattctttatttattatttgaccaagataagtga

SEQ ID NO: 68964 - DNA, 1779 bp, Cannabis sativa
tctcaactatattatttgactatatctattatttaagattttttttttcgtaaaaggaaaaattcaataatgtaagattattatatatgattatattattacttattttatagtgacaatagcatatgtcccgactaatttagggttaagtgataaatttggccacaaagaaatacaaaagacgattttatttatattgtgtgatgattaattttgtgctaatcatataaaagagatttattatatagtattcatattatttattaatttaataataaaataatattcgatttaaaattttattcataataaaataaaatattaactttgttatatatataattttgaaaagttattaaaaccgcgcgcgaagcgcggtactattctctagttctacataaaaagagtaatctcggtaaatatctaaaaaaaaggtaactaaatcgtattcaacataagcttcttttgtagagcaatttcgataaatttctaaaaaaatatacccactcgtctctcttctcgtctttttttttacagcacaacgttagtcggttgagctcaaaaatagtgtcatcatgacttacttttaaaaaggattattttaatatatgggaatcatatattttttcgctcaatcaagaaaaaatgatcaaaatcaacaacaaccatttaatttcttttatagtttgttaacaaaaaatcaaactataaaattaatcaaagtttagtagattataaattattttcttatttcattttaaaagttacctaatagtattctaaataagtttatcttattgaaataattttgataaattactaaaagaacttttaaaaaaactaaatagtattttaatcagtattagaatcgtttatattaaaaaaattaactctactaattttcatattaagtatactttatcataactctataattttgtcacacatgtttaagggtgacgaaagttactaaaaaaagtaaaggtgttttaaataacaaaattagttacattatgaaaaattactatatatactatttttttgaaatagttatgtatactaattttactaataagtgcttatactttattgtaccttattaaatttttaaactagttttgaagtaatataaatgttactaaaaaaattaaatgtataagtattttaaacaacaatataacataatagtagctaaaagaaagttttgtaatgaaattaattttgtggtgtttaagagattatttagtttccttacaaattttataaaaaatttattgaaatcgttctataaaatactcatttagatactatcaagtagtttttgagtatgaaataataagttactcttaatatatttaattttaatatttagttactcttatttgataataaattacaaaagtaacttaaatattacttttaattttatatatattatcagatgatcatcttgaaaataatatccatgttaatatctaaaatataatagtaactttttttttatttggtaagaataataactacagaaaaaacaaagaaataaaagaaaaaaaaataaaaaagtgactgatcttcacataattgagaaataaaatatcaaagaaaaagactgtcatgcgaaagaaaaaaattagaatatgcacatgtattattttatattaagtgtaaaagtatacataatatttatatttaaaattttattggtatgtgtataaataattttagtatttggtatataattgaaatataattgaaagttgaggaaattacactctatac

SEQ ID NO: 68965 - DNA, 565 bp, Cannabis sativa
ggaagatttggtgcctatggcaatcaaagttgaaaggtagctcaagaagggtagttagagctcaaaaccaaggccgagtctaaataatccaaatacaacaccttgaagatcaaacttcccaaagaaagaaggcgaaccgagttcatcctctacactcaaaccagccacgacaactacaacttctcaaggaaaaacaacccctatttcatctcaatctagtgcgataaagtgtttcaaatgttaggggcgaggacacatagctagccaatgtccaaataagagagttatggtgattcgggaaaatggtaaagtagattctgaagatgaagaatagtttgttgatatgccaccattagaatatgcttctatagaagatcaagagtatgggccagaatatggtgacatgcttgcactagtcaccagacgagcattaaatttgcaagtaaaagaagaggaagaagaggtacaacatgagaacatttttcatactcgttgtcatgtgaaagacaaggtatgtagtgtgatccttgatgggggtagttgtactaacattgcaagttcatat

SEQ ID NO: 68966 - DNA, 716 bp, Cannabis sativa
atgtaaatattctaataagcttagtaatgatgccatgcaaaataacaactaatttatatattagaaaatgtaggtgtcaattagggaggagggggagaccaccatgaaagtcctgtaattatggttaatttaatttaattaagcttcttctttttccttttgctccctttattccttattgaagaggtggcctgatatggattagtaatatatatatgatatataatataaatatatataagaatgagaaaaaggtgtgacaaaaagtagagaagtatgatggttatgatgttaggcacatatcatatcgatatatcttttcttatatataccaacacaacgcaaaatttgaaaaaaggtaattaatgaggtatatatatatataattgtcttattcgatctatatcgatctcatatcatcatcgtaatttctatttggaaaagagaaatgttaaaaggataaaatagggtgtctatagctttgtgaaatgtgtattacaattagtgtaatttattattagatctcacttattttattttaataaatattatatataaaaaaatattaattaattatagagtgatactttatctatcgataagtactgcctcataccaatgttgtttaaaaaagggatattggcggctaaaccacctgaactttacggtttgtaacacttaaccacaaaaaacgaatttttggcggctaaactacc

SEQ ID NO: 68967 - DNA, 541 bp, Cannabis sativa
ttaaggaaagagaatatatatatatatatgtaagaccttgatggtgaataatggtgttggcccttaatgaaacaaagagaatttggaaataggaaattagagaggtcagtagaagaatgcttgagtggaaagagaatgacatctagttctggtttttgagtgagtgaataaatgtgagagtcatgagttgtatttatatagtctaacactaactaaactcctactaatcatatgacgtggttattgttaacttttgaataattcaaatgaataactaaaatttataacttcaccatatgattcggtcaactagttcacagtgaaaggctattcttagactatcgtctgtagttgttgttcgttgagatgtttactctccgtgatctccatgtgctcctcttctttaaactaggtttagtttatttaaaatttgaatgtactaactgatttttcatgcacagattgcacactgcttcataaacttcttttacctctcataatttattccttaaatgcaaatggcatataacttacaagaaat

SEQ ID NO: 68968 - DNA, 1178 bp, Cannabis sativa
atggccaatccatgtcgtgccattgtcccttaccagttggggtttgatgattctacttgctttccaagtccattgctgtcttcgtctccgccattgcctccagtcactcaaaagcctcacacatttcaaggtaagagccctcccctttctaaaatggcttcttcttcatcgtcacacactcagtctatttcaaagagagtcactcgttcctctttgagtttaaagtctcctgtgtcccctgcctagccttcgtcgttgcctaaatcgaaccccataggaccacctcgtcctccatctaaggtctttataccttcccaaaaccaagaaagggtttagccaaaaagaaaatcatcgcgtgataccacttatcaaccacttgtcaaaaagtccaagacaaagtctattcctgtccccactacagacacttctccaaaacagtgtccaaaggctccaaaaagacaaaacctccaaaagcccctatctcaactgtcgacccatcctctgttcaatgctttgttgatgcctccaaagcatttgtgtaccaacgatggtttggtagtcgtaagctatggttcgaataaatagtgattgtagatgactttcctgacgtgcatgaatttttaaaaattaggaaatgggttcacactgtctctaagttgtctgcacctcatcccatttttcgtgaattctatgccaatctagatagaactgttattgctgagggtcatccatgttgtgtgagtgcatttgttaggggtactcgtattccttttggtccatctactattgcatgcattttgaaggttgagttgataaaaaatccaacatatgggaaacagttcaatccagatcaaactatgatgggtagagtgctaacttgcagggatgactatctatgggaaaagcaagaaattttagctactcatctaactccattctatagggtttttcatcgggttgctttgtacaattggtttcctaattcccatttgtcctctgtcacacttgagattggaaagttcttgtatgctgtgggaactcatgtatccattgatctgcgaactctcatctttgaaaggattctcgaagcctcagaaataactggcactcgtaacaaactcccctttccaggtctcattcaacaagtgctcatagctgctcaccctcctcttacaact

SEQ ID NO: 68969 - DNA, 2096 bp, Cannabis sativa
ttttttttttgctggagggagaagtggatggatgtgtgatagttttcattaaaaatgggttaaacaaacactctaccccaaatccataagaataatattcttactcctcttctacttttttcccataccagtcttttacatatttttatgtacaatacaaagtgggaagttatgtcttgttcataaatgccttttttcctttgtcatttctacattttggtccttttacattacttccacgattcctcaatcttatttaagttattttcttaccttacaattatcttagcctattattttttgcgaaaaaataaatatatgacaagattgtgatctcatgcatatttagagggtaataggttgaaaatgaaggaagataaataatgaaagttattttgtctattcataggttacaaataaggatactaatgtgtgtattacccatttgatagtgtgttttatctaaacacaaatttggtaccctttgaatttttacattgtattattaaattattaagcgtcataactcatctataactcgtactatgcataccaaatatatatatttaaaatataggattaatttttttaaaaaaaaaattatacatatataaggtactaaatgagtgtatttaacatatcgccaaatcagagcaccagcagtgctggcgtctctgctcgttgcatgtttgacaccacaatcaattttaagcaattcaccaaatcaaacaaaatggagaaaaataacgtataataaataaataaataaaaatttaagccaataattcttgcttctttgcttaaaatgtttttttgtgacttcaggctggccctacctatttgacagatgaaggtaaagtactatggttagtgtcattggtacttgtttttattgtaatttaaaatccaaagctccccaaagttgatcataccataaaacagagaagaaaatcatatgagagtaaatatcattttagatcgtttgttttgtaaatggtatctttcaaaatagtttgaaataataaattgtgttcaatttttattaattttttttttaaatataattaacttaaagtcaattttttaatatgaaaagatgtaaaaaaaatgtagccaatataatcataatgcatctaggttaggttaggttattattatacattattttgataaaaattgagctcaaagtattattttatactatttaagattttatgttacttttattttttgagattatttatgtattgtttttaagtttcttttgatttgatgtctaattaatttacatattaaattgaggctgctattcaattgtttatttgttattttttaattcaatcaagaaaaaaaagagagtacgtttaatttttttatggtgtataggtaatttgcagttattttgtttttatgtttttttataaattatcgacacaatatgttgatatctcgtttatttgcatattcaacgtctttgtgcagttattttttttttaatttttattttttgagaaaaagactattatattaacttggaaacaaattacataacagtcataagtggaggtggaatttcctccaaccaaatacattcggtatctaccgtaagagcaaactaaaccaacaaatgggcttcgttattagcaaaccgtgctcgtgggaaattggacactagaaagtgtacatcattaagaatagcatgaaaagatgtgagatgtgtagtggacttcttcaaattttgaacaaccaagagtgagtcagtttcaattagatgcactggtagttcaagttgaagcagtgttttgaggctccaggatagtgccattgcctctatctcctctggtttgcaacgccctttgactgatgtagacattgcagcaactatctttccatgagagtttcgaagtatagcacccaaaccaatcaaacttgaagacatatttattgccgcatctgtattcaatttaagttggcctggaggtggagctgtccattttggggtaggcttctctgtcatggttgtagcagcaggaatattagcactggtagtggtgtgatgctgctgtgtaaaagatgatgttcgtgcttgagccttg

SEQ ID NO: 68970 - DNA, 744 bp, Cannabis sativa
aatcactattatttatctaattatcagaactttattatagaactaagtctaatataaacatcatacattatttacacgatcacacaccttttttttttctataaaataaattatagctaacttataacggattggttttattcggctcaataaattattttgaaaatatatatatatgagatatgattttgttctgttattgtactttcacggattgtaatccgtgatgtacggaaaccgtcagataagtgagttatttgatctgacggctgagatttatctatggggtaattagggttaaaaagtagaaaaccctgacactcaatttaatgtaccctgagacccatctaatgtaccacagaatacattccgtaaaagtacatcacggaacaaaatcgtatccctatatatatatttataaaatataatatagaccataaaataaaaattataattatccacaaaaagaacaagtacatcaatctcttcctcaattatggagtaatgagcagctagtgccattaaatatttcaagtcaatggcgtatagatgcaatattcacattataaaacatatgtaataatcatatataagaaatttatatatacgtattatataagaatacatatatatatgtatacatatgaccccagtcagttttcgagagctgttaccactgtgttggtgtatattgacaaattcatggagcccagataaatatattgacatatatttatacaagta

SEQ ID NO: 68971 - DNA, 1505 bp, Cannabis sativa
tatttacccatgaaagattgaatgctaaattaaagaataatgttagaaatttggttattagatattcatatagaattttatacattcgaaactagtttttaaagtttgtatcatttttagattgtaatcttttgcattgtatttttttcattatgttgttgatgaaactagttttttctgctacttttgatgaaataattaatttatccacatgatgaaaaatacaaggtaaaactattttttagtaaccattttctgagctgaagtaataacatcattggatctggcataaaaataatatttctggaatcttttgttgtaatgaaaatatgaaatcatcagtctcgtacacttattcttttaattatttcacagagttcacaggttcaaaactagtattacaaggcttccatctattcacaggtttaaagttagtttaacaagttttaagagttttgaaaatagtttaataggtcttaagggttttgtaatggggttgttctattttatgatgttattgtatattttgattttaagtttctttttattaatttatttttaggttcgaaactggttttcacacttatattttatttttagaatattgtagtgcattgtatgatgttttaattatatttttagagtttttcttttgtatttttgtattttattgtgtgtgtgtccgttttcatttagttaactgaagaaactagttttagttatcttcaatgtttttcatttatgttttgttttcataatcttcattgttattgtgtgacaaaattgatcttatttagttttcataatgttcatcgttgttgtaagataaaattagtttcagtttattttttgttttttgtttagatggaaatttgattcccccaataaggatgcaacgaacgatgtttctaaagatttaagtactgactttgagaagaaacttcctctaattaaaattaaaattcttaggaaggttattcacaagaaaaaaaaagtaaatttgatccaaattttaagggttcatctttggcatgtatttttttaagcatattaatttttttaatttattttcttatgtatgttcaattttttagttgttcatactagataactggttttcgtgtttaattgttatcttatgtaattgaggtttaagtttcattcattcttttgttattttaaaaaactagttttactgtgtcagattaacgtaatttatttgctttatgtaattggtatttatgtgccacttttcaattggttgtttaacataattattttcagtaatttaaattaatttatttatatattaagaattctcttgtggtatgctttaattttttaaattaattagctatttcgtgtttcaatatatcattttattgttttaggcttcttatgttttgtttgtatattaattgttagttttatttaattagctatctgatgtaactggttcctccattttttaaagaaactatttttttttttcaatttatctaatg

SEQ ID NO: 68972 - DNA, 726 bp, Cannabis sativa
gacagcagcatgcatcacagtcatcccatttcctcctaacacagagaaatcggcaaaagtagtgtccaaaatgatggaagcaatatcataaaatcgtctctctacggcaagaaacagaggagattcccctgccttgttcagcaaagatgtcaatgttggatcttctcgaatcaaccgctttgcaatctcaaaccgaccgttgatcacagcttcatgaagtgctgtgttctgcttcacataattcaccttcctcagcagatatctatagtcactgtggccttctgcggcggctaacaccttggcgtgatttatcaaaaccaccgcgaaactctcatgtcctaatctggccgccatatgtagaggcgtgtcgcctttattgtttggttgaaaggcaagcaaggaatgcgagagtagcaatgtgtttacagatgttgctcgtggattagctgcgcattttatggcaagatgaaagatgttgttttcttggccaaaagttttggcaagaggatccaaattgccgatgtctaatgtggtcaaatgttcttctttatcaaatacccaaccaaagtgtgaattatgagttagaaaagactttatcatgtctactattgtggccattattgtttgttaacagaccagaatcagaaacaacaatgaacaacctgagttggttgttgtctaaattcaatcttttagtgtcttaataatttgtctttctatgtcttg

SEQ ID NO: 68973 - DNA, 804 bp, Cannabis sativa
ttaacatgtgggacaatgttcttcaatactaaaagagaaaaaataataaactcaaaaagagaaaaagctctaatagagggagcttaagagaagtttttataggatttgaaaaatttcaagtgtacaaatggaaataaaatttgtccggaagatgagaaagaatataaagtgagaaaaaaaagaacaaagattgtatggaaataaagaaaaacaatggtaccataaggcacatgagaaaatctgaaataagagattatatatgtatataaatataagagatactatgaaattaataaaagaaattataattaaagaaatacgatgcgtgtatatatgcgataaaatttagattagatttagaaaaattattgtagcttttttgaaaatggaaaaaaaaaattataaatatagaatgtactaataaaaaatatgtttattatttataattatagtaacattgtcataattaaaaataattatgattatatatatgtcatatatttttagtctagaaatatttttaatatgactttgaaagtttatcaggcaccaataaatagaatataatagcatctggtgttttatttataattatagtgacgttgcaataaaaaataattatgatatatactttaaatatttttagttccaagatattttttatatattgaaactttatctagtacttatgtgaacaaaacatataacaaagtcaaaatataatttttgaatattgataacaaataacattacactaaaatataattttatttaaggcacaaaacattgaaacaactataaaaa

SEQ ID NO: 68974 - DNA, 2966 bp, Cannabis sativa
taattacaatttaaagtcaagtgaaatttggtgaatatgaagaataatgttttatccaatatggatggtccattaagaagaagaccgacccgtaaatgaacccgagtcactcacagtcacaggtgtgaaacttggttggtcccagtggagtccagtcagtgaccagaccaccacagattcctcatctcaatttgttgtgtggcgaagaaagagataacatttgtgtgaaaatcccatactcagttcagaatcaccttcattcccaatccgaaatccctattcacaatcaattaatcaatcgaacacaacaacaaccagactcgaaggattcctgaaccctccatggccaacgtcatcatggcctcctccaaactcatttccccaccctctatctccatctcctccgttgccccaacttccaggcccaaaatctcactcctccaagtctcagtccccaaaatctccaagacccaattgcaatccctctcctcctcagctcttaaaaccctctccctggctgcagccacctctctggctctggctcccccatcactagccgtggaaatcgaaaaggcagctcttttcgacttcaatttgacattgcccataataatgggggagtttctgttgttgatggtggcgttggacaagatctacttcacacctttaggcaacttcatggacgagagggactcggctattaaagagaaactgggtggagttaaggacacgtccgaggaggttaagaagcttgaggaacaggcggccgcggtgatgaaggcggctagagctgagatatcggcggctctgaacaagatgaagaaggagacacagttggaagtggagcagaaattggcggaggagaagaagaaattggatgcagaattgcaggaagctttggccaagttggaggaacagaagattgagtctatcaaatctcttgattcccaaattgctaatctcagtcaggatattgtcaagaaggttcttcctctttgattttaattttaattttaattttattcctttttgaaaggccaagatttatatttgtatgataatattatgtgatgcatgtaatgataatatggtgtaatcaaatctcaggagatacatttgatatatatatttaaattctcaaagcttagttttgagttgacaacttgacacgccaccatgaaaaaaaaaagaaaagaaaattaagtttgtaatctaaacctacatagatgatcaaatgaaaagttgactgaattcaagcaccaatcaatttttctgtgataagaaattggtaaattggtgggcatgagcatacaacaccacagtgcatgtttcaactttgatgtaattatataccgattcttttttagttagcagcaattgataataatcaatcttcgaataatgaactaatacgagttcacaaaaatgaaaagaaaaaataaaatcagtatatatgttgtcaattacccttagttcacttgaaacactaatttaaatatttccaacatgtaaaatttcttggttttgatcgcaattctatttttccaaatgtgatataaatacaaatggtccaacgggagtgggaatttacaggaacacttagaaatcaacagaattttaagcaaaaatgatgatttacaattgtcacatgaaaaagttattctaaaagcaaaaaaacaaaatgctaaaacaatagtttaatatggtcccataaaaattaaattttaaagggcctgcaaagatctcatgaaaacttaatcttagaggtgaacaaataatgcaaatagttgtttgcatgtggttaaaatatgcataatattgataaaactttaatagatattacttttcactctattgtctctgcttaagaaattttctattttgaatttgggttttccttttaaatctaaacaatccaaaatgttagagaaatgctaaaatgcattacaagtatatcgcttttggtgtaaaataaatatcacgtatcatatatttaaattaaattatgtagaacatgttcttacattataacaataacgatatgtcaagtcgtaggatgttgggtaccttatggtgtcttataacaatgcttaaattattgaacatgctactttatcaaaaaaggaaaaaaaaaaaaacaaacaaactcattttggtacctaaaattaagtgttttgagttttatatcagtacaacatcgtttttacgttaattctagctttcaagatcacttttcgatagaacatcgatatatttttgcattgattttcacttccaaaatatggtttactatcgagatcattccatgaacatcaagttggcatcactttttacctctaaaatcaagtttcaatgagactatcacagactatggttttaggcctctaaaatcaagtttatatggggttgtcattggagcatcgcaaactatcattttatcgttattttttgcctctaaaatcaagttttgttggactttcgttttagtattattttaataccttaaattaagttttcaaggaatcatcgcatgtcgtcattttagcactgtttttcgcctctaaaagcaaatatttgtcggattagtgcaaactattgttttagtattattttttattataccgtcaaaaagtatcattttagtattgattctaaaattgtactgaatttcacattaaaaattacgaataccagaactaataaatgatgcaagatgtgctcatgatatttaaattagtttatggatatgttttacatcaacgatatggtcaattatgaatgttattatttaactgtgaaaattgaaattatccttaaatgttgaagaaaaaatagcataaagcaatttttttgctattatgaaatgtttatgtaataagggtttaagtaaatattttctcaggtgtgtgttctatattgatgttgaataattaagaaattaaaagaaataatggatgctttaatgg

SEQ ID NO: 68975 - DNA, 1198 bp, Cannabis sativa
attaaattggaaactaccactagtgaaatacatgctgaaattatattgttatggtgctgctataaatttctcaaagtttgcatttaactctaacttcttacttcttgtaggaggcagctgtaaagaaaaagtatggtggaattatgcccaagaaaccaccactcatctcaaaggtgatttttgaactctggtattaatggattaaaacagtttctcttattattttggcttcatctaagactttggaatggtgtcaggaccatgaacgtgcgtactttgattctgctgattgggcacttggaaaggtatcattcttgtatcaccaacattatatagggacttgatttttttgcagaatcaaagaacctagtaggttaattaccccgtattttctatgataacagcaaggtgttgagaagccaaaaggaccactggaagcccttaggccaaaattgcaggtattcttccattcccttgtcaaaataacagtcctctgagctgttttatatcatgttgcaaatatatttatttattgctatttataagctttcatgctacatttcacaaggcatggtagtttactttcttagagtagtttcaaatttgtagcatctactgagcatggcttatataaaaaagaattacaaactctgtaatgctaacctagacagctgtgaactaatcagttgttttagatagcaaacaagagtcttgatcagatttctgtttgcctgaatatagttaattcagagtattaaggggaatagttgattttgtgccatccagtcatcctaaggtggtgcagtaaatcttattctttatcatatcagagcaaaccgtgttggaagttaggttctgataaacaactgtatatttcagttatagaacagaacatgaccttagtttcacaattattccttaagtgaaaagaatgctcattgctcgatgcaaatcaatccgttgccagcagtgtgtcttcctaccttcctggttaggataggaaaaagatgaagtgcttgctttttgtggtttaatgctattcgattcactaaattgtgatgtgttcttgtgtttgcagcccacacaacaacagacacgataccgaaagtccccttatgcccctacaggtgaaggtaacagttaaaaaacttgttagttagtactgatgctataagctttttcttttctgcaatctcag

SEQ ID NO: 68976 - DNA, 771 bp, Cannabis sativa
actcagaatcgcaaatggaactagaaccgaactaggagtaggaccaggacaaagacctaaacccaaactcgaaccgagatcaaaacccccaaacagtgacctaaacccggactcagaccccaaactcaaaccaggactcagaccccgacccaaacccaaacccaaacctgaacccaaacactgaatcaaaatcaaaactaggactatgaccaaaacccgaacatggacccagactgagaggtaggacccagacctggacctacgcctcggaacccagacccagatcataactcgagactcaaacccaaacctggaccaagactcgaacccaaatcatgacccaaacctagatcggaacctgaacccagactcggaccaggagtttaaccccgaccggctcttaaactcggacaaggacctcggaccttgacccagatgagggacctagactcgagaaatgggcatcagaactgggaccaagacccaagacccaatcccggatccagaccatgaccttggactgggactgggacctggacccaaagtggaactagagggggacccggggcttggacgtgactcatagtcagtgtttgaatttgggacccatacccggacttaaacccagacccagactcggacctcgaatcaaacccaaacccaggcatgtacccagacctaagtcccagtccgagtctaggtttgagtccgggaactagaatttgaataggacccagacccaaacccggaccgggacacggactcgaataa

SEQ ID NO: 68977 - DNA, 1079 bp, Cannabis sativa
aaaaaaaaggcacacatgatcatgtacatgcacaactattgtaccttaattaatctagggacacatacaattatccaaatataccagatgtcctaaaacactaaatttcccaggcaataatttcatagtgtcggctttacaggctccaacacatctatacacacacttagaagtcctgcgaagaaaattttgtccattaatcgcgagttaccaaataaaaaaacattgtcattatgaattatgaaatgtaatagaaaattggaaataaattatgaataaaatatataatcttaataagaagaaataaattacatcaaataattttaaataaaatcaagaaaagagacttcctaaaactctataatcttatataatacccattatcttattcactctttattattctcaatatcttcaaagatgaccctttacgtcaaaagatattaaatcaaaaaggtgaaataacgacagcataatagattgagatttacaatatcataaataataaaataatatggtatttattcactaattgggtacataatttaacagaaaatctccatctatattaacagagcaaatgaaggtccacaaaatgaaaagtctgacagtttttcacatatataatcttaataagaaaataatgtcaaaagataagtacatacctcaaacaagacccaaatggaacgttatgtgcctagtgcacagtttcaaacacctaagagtagagacaatatttttatgaatagatagagacataaataaaagtaatctcgagggcacatgggacacgtacagagggatgaattttacttatttaacttgaccatcatatttatatgcagtatggcactatctcatttgagaacaaaaacccagttagagcataattttacatcaatagaagcatcactgaactaccaaattgtctcatttacaatgtaaaaaaactaagaactcatcaaacttacctttggttaaccattcacaagaagaaaattattgacagcaaattatctttgacaaattcactgcatagggtcttataggttgtgaaatctagataaacagaaaattaa

SEQ ID NO: 68978 - DNA, 664 bp, Cannabis sativa
tagtagattgctttacaaaatcagcacattttttactagtaaaagtaacctatacaatggatcagtatgctgatttgtatgtgaaagaaattgttcgtcttcatggggtaccaaaatctataatttcaaatagagaccctaaatttacctcgaagttctgggtaagtttgcagatgggaactagtttgaaaatcagcacggcctttcatccttaaatgaacgggtagtctaagtgaactatccaaatactcaaagacttgttacgagcttgtgtcatggactttgaaggttcatggagtaaatatttgcctctgatttagttctcctataataatagttaccaaagtaccataggaatggatccctacaagctgctttatggtaggaaatgtcactccccaattcattgggacgaaacaggagaacaaaaatatttaggccctgaattggtctagaagacaaatgaggcaatagataagattaaagctcgaatgctttcttcttagagcaagctgaaaagttatgttgatcccaagcgccgggacattacatttcaatcgacaaatcatgtcctcttatgggtttcaccaatgaaaggaatcaagcgctttagaaagaaaggcaagttaagtcctaagtttataggaccttttgaaatacttga

SEQ ID NO: 68979 - DNA, 2458 bp, Cannabis sativa
aattaaatttgaatcataataatttacttattcgtatattgacacaatgtcaaatgtaatgttgttatgacccaaaaataaacataattcattacattttcctttaattaatttcgtccaaccactacaaaaaattttacttttagtcataacataacttgtgactaaaagtaaaatagttgtgactaattaaaaatcacaattcctatgttgtgaccaaaaagtccgtagctaaaagtattaatcacaaaaattacaaattgttatgattaaatatgtttttagtcacaatatatacttgttgtaactaaaactaaattaatgacaacttgtgtctaaatactatattttagtcacaagtaactttttgttgtcactaaaagtcacatttagtcataaaaaatttatgttcagactaaaaagttgtcactaaaaaaagctattttactccccctacatatcaattttggaatgccatgcatgcaaacctcttaaattttcaaagtaaaatgtgaggataataggtaaaaggagaaatttttgaattgttattacaaccttagaaagtggtatacacataggttatattgcaaacacaatattcatgaaggcttcttaggcagataagacaaaaaagtgacctttaatttgtgttggagtgaacgcaaggcatccatattcaaacaaacactccacgttattagttttactttaaagtagattatacaaatttggggcaattcttttgcactattataggtatatcatgaatgaatagtgaattggaaaaagctcatttgtcaccattcaacatttttatctatacttttgacttcatcttttggcctatttttgtctcaattttactaaaggaccaacacaagtgatataatatgatgtaaacaagattgattattttttattcttatctaaattaatattattgtttgtatattggataagatgaggatgtatgttttgtcaaaaaaatgatgggttggtataatgtctttgtctttggtatcttttattctttattattcatcaattttgtgtgatatgaaagtaaattataaatatcgcatatctatatgagttttattaaataagttttattattataattacaaaggggtttggactttggaggagataaccctcatatatattaataggaataaatatatatttttcccaacatatactatgacttttttatcttaaaataaaatgacaataataaatcatttttctctcaaaaaaatcatttttaatttatttgtaaaattttatacttagtacatttcatttataatataatattcaaactctaactaaattttattgtatatcacaacagaataataataaattcttattaaaaaattgcaaattaaaatatttgtaatgaaaatatttaaattattacatttgtaatatttaagtattcgagttatttattatttattttatttttttaagcaaaaaaaaatctagtttgatttatgttttggagcaatcatatgttccaccatacatttgcctacatgatgcaaaatctacttataacttagtaattttactgcaaattttttattggatactaagaaataatattacgataacaactaaaagttatatatattcaaataattttatatttttacagtaaattttagacataaattttctaattgttgattttgattcaaataaattctcgagctcaaaattgcatcataaatcctcaaggtctcaattctactaatttctgttagtgcttattttaactaatttgttagttactgcaaaaaaaaaagtcaggtgttgatgctaatttatagtgtaaagtcccaaattgttgagtttaatgtaaataattcccaaattcaaaatattgttgcataagcttaagctcccaatttctctaatgggaatttatttgcatcaaactcaataatttgagaatttacgccgcaaattaacatcagtacgtggtattttttggaacaactacaaaatggtcaaaatgagtactgataggattacaaaaattgagagcttgtggatttttgccgaaactttttgaggttgaagatttatccgcatcaaacccaacaatatgagaatttatcttgcaaattctttaaattttatttactttacggtttgaattcatagttaatataacatgtatgatgtacaacttaaattattataaaactaaatatattgatattttttctcttaaattattaccaatgctaccttaaacaattctcattatgagttgtgactttttttcttactatctgttctacaaaaacaatattaagttgatttggaacgttaaattgtagcgtgtttttgtaggatcgatcaatgtaaaataagtaaatattttgccttttaataattataaaaaaattgtatgtatttgaaaataactgtgtaatta

SEQ ID NO: 68980 - DNA, 750 bp, Cannabis sativa
tataaaaaatatgacctcccataggatatttgtgggtgattagtttatatttatacatatcattactcaatttatataaaagaaaaatgctaaaatatacttatatatctagtatcattctcagtgtcatattaataatagtgtaattaagtatcgaatctcacataatttaagataataacttttaaaaaaacattgccaatcaatcgtaaagcatcacataagtggtgctacacaacactggtgcccaatagaaaaaatattaaaaggcactactggtgcctaacactttcctaagtttcatatcgttgttggtacaattaagtattgggttcatataattcaatgtaataacttttaagaaatattgttaaccaattgtaggataaaattaatgcccctctagaaggtgttgaacactaatggtatccaatatcaatgctctgagaaatgttaaagggcaccatgatgtctagcatccttgtagggtgtaatattaattttagcacaataatattaagtcctaggtttcatatcattgttggtacaattaattatcgagttcatataattcaatgtaataacttttaaggaatattgctaaccaattgtaggatagaatgcccctctagaaagtgttggacaccaatggtatccaatatcaatgctctgagaaatgttaaagggcaccatggtgtctagtatccttgtagggtgtaatattaattttagcacaataatattaagtcc

SEQ ID NO: 68981 - DNA, 511 bp, Cannabis sativa
gtttattgcattaaaggccctaatcactatattattagctaaaaaggatgatcacatcaaaccacttgtgaaacttagcaaattttgttgttgatgaattcaaattggctttggattttgggtgtaacttcattagcatattgcactttaacgtatgaaacattataagaggtggcctttaatgaataattagtattttttttatttattaaattaaaatacatacagaacctaatattaaaatgagcaataagaagcttgaaagttggtttgttggggttttcttctaaaaaaatgagcaataacaatatatcatatagtatggttaccattttttcttgaattggtactgtatagtgtatagtataagaattctaccacatttgttatatcaattttttataacacaattactagtcttgacgtggtaaaaatattataattgagactttgagggtaaattgttcgccaactattgccatttggtcattgtcaccaaaaaaaaaaaaaa

SEQ ID NO: 68982 - DNA, 724 bp, Cannabis sativa
ttttgttaaatgacaaaattaatcatcctaaaatagtacaaataggaccttgaattgatttttttttttcaaaataaaacctaatcataattcgatctatgacaaaatttgttatattttctgtatctgttcatattaggaattgtcttcaaattggttatattaaaaaatattgattaagttcaggggtcttatttttataattttaaaaaatacaagatctattttgttatttaacaaaacagagagttcaatcaataatttttacaaaacacaatgtcaaaaatattattttccctaaacaaaatgtggtgactcgtgagtgtatttgtaatataattaaaacctatttttggcactatttacacaaagagtgaaagtaacatttttggctttattttgtttcatttttactaggtgcacttgtgaattttaaatggaagtatctggtaaaaaaaagaaacattgacttgaaatttaatatattgatatgtgtatttaatcaaaaatatatatatattgatatgtgtaacggccgcaatgaaagtggggaccaaaaatgttgaaagaatgaaagcaaaggaaatgaaatgaagtaataacaataacaataagtgttgtcgttgttcattaattggtattttcagaaggtttgccagtttacagacagacattatataataaaacacaattttgccacttgcaaatatgtatgcaatattac

SEQ ID NO: 68983 - DNA, 2275 bp, Cannabis sativa
  modified_base (199)..(203): a, c, t, g, unknown or other
ttttttatcttaattaaaaattaaaaaaaaaaaaaaactcttatttttatattatataagttggagatgttccatcgactaaaaaaaaattaagaaaaaaaaaaattcaacaataaaaaattaaatttagcttaagtattttgtatataaacatatttttgatataatataaatagtaatattttttgatatttttttnnnnngtagctaaattaagtatataaatttaaaattttcttttattattcgtcattagatcaaaatgtaataatttaatatttatagttaaattttttagtaaatatcaatgggtaatacctatcgagaattgttctatatatcaatatataagagaagtataaggtcatcatatgttattctaaaattacttcaagtaactatatctcttttctctttaattttctcaatttttaattttttaataaatttataaatattaattatttaagaataataataaagatatcaaaaaaattactaagaaaaatatcctaagtcgaaattgtactaattaaaatatgtgaagataacgagagtagagagaaagaattgaaagttctgtacattgatgaaaaatattttacagaaatttatgtacaagtattggataagcaagtaaagaagagaagttgttacaacatcacagttagttacttagttacttagttacatcatttaactaacaattaacagaaagttagttgagtaaaaaccaactaacttagcatctctttatagcccccctcaaatgaagtgtcctctgggcaagagacactgagtttgcttcttagaacatgaaatctggtgcttgaaattggcttggtatgacagccagcaacttgatgttcagtggggacatgctgcacttgaatctctttgttgagcactttgtctcgaacaaaatatagatcaatttctatatgttttgttcaagcatgaaggatgggattgacaacaagcataacagagctgatgctgtcacaccagaccataggtggagctgcaataggacatgtaactctgttaacatacctaagtaatttcagagaccacagcagcaaggcttcgaaattcaacctctgtagaaaatcttgagattgttggttgctttttggattgccatgtaattaaattgtcaccaaagaagacacaaaaccctgttgtagatcttctatcatctgggtctgctgcccaatcagcatcacaatgggcttcaagttgaaagttggaaactctgttcaactgaagaccataatcaagtgtaccatccaagtatcttaagatcttttttactgcaacccaatgagactaaagtagattatgcatgtaatgacaaaccttattgacactaaaagcaatatctggcttggtgattgtggcatactgcctttataattgatctgtacaaggttggatcagtgacaagaacactgccatagttgaaaagctttagtccactgttcataggagtgctatgagtcttggcaccttgcatctcagccttgcataggagttcttggatgtaccttttctaagaaagtatcataccagttgctgttggcagggccttaataccaagtaaataattcaatgtgctaagatctttaagtgcgaaagatttatttaacctggttatcaaggcagcaacttgagtaccattagaaccagttattaagatatcatcaacacatataggaacatacaaacaacaggctgaatcaatcttaacaaaaagtgaatgatctatttttgttgaaacagaaccaagtgatatcaaaacagatgatttttcaaaccaagctcttggatcctgctttaggacataaattgccttctgtagttagcacactttgtgaggagcatatggatcaacaaaaataggtggctaaaccatgtatatatcttcttgcaagtcaccatttagaaaagcattgttgacatctaattgcctcacaacccacccttttgtgagagcaatagttagaacaattctaatggtgataggttttataatagggctaaaggtttcattgaaatcataccctagttgttgacgatacctcttggtaacaagtcttgctttgaactgagtaacatttccatcttcatcttctttaattctatatacccatttacagtctatgggttttctgccttcagggagattaacaaggatccaagtcttgttctttaataaagcaagatgttcaacatccatggctttaagccatttttcattttgcatagcagcttt

SEQ ID NO: 68984 - DNA, 855 bp, Cannabis sativa
tgactattttgttttatacgcgtgtaaaatagactatttaaattttattttctatattataaattattccgaatttctcaaaattttataggatatactaaatatttataacatacatgaatatgaaaaaaattaaaataaaaaattcttctggatgccgaaacaagtagaggggagtgcattatagaatcacccattaacttttaaaactcattttttagtagttaaatttcctaaactcgtaatttgttagcaactagccacttttatctaaatttttctgttaaatatcatgttatactatccacgtgtatattctgtgtatactctttacacatggtatatttttattaatccgtgtaatatacttattaacaaatttattttaaattaaaattaatttaacttaaaaataattaaaaaaaataattttttttttaaaaaataacaaattagttcgtttttttttccctcaacttcttccctctcccgtaagtaccattgcctaaccaccagccaaacttccgtcaccgcaaccactccattgagaccatctccaccattacaagatcaacatcactacaagcacaaaataaaacacaaactagattcaaaccaacacctattaaaacacaaaataaaaattgacaagaattatgctctgtctatttactctgttttactgtccttggttagttgtaatattagttaagtcggttggcagttatattagttaatgtaggtcctacactttcggttgttagttgctagtccagcttctctttatatatacttccctatctttgtacatattccttaattcaattcatcaataaaatacatttctggttttac

SEQ ID NO: 68985 - DNA, 724 bp, Cannabis sativa
  modified_base (194)..(195): a, c, t, g, unknown or other
tcacaagctttatgctaagttcaggtgttggattcttcacagtcttacacactatgactgagtactagacttgctatgtgtgggcatgtactgtaccaatatgtggctcgaaaatttaaagagaaagagagagagaaggatttgaaaatagagagagagagagagagaggagcctaattctccttcaggtgttnnattcttcacagtcttacacactataattaagtactagacttgctatgtgtgggcatgtactctatcactatgtggctcaaaaacttgaagagaaagagagagataaggattcaaaaatagagagagagagagagagagagagagaagactcaaatttgacggaaagacttatgattcatcatttgccagttttgagtctatcactatctatttttaagaatccttctagatttagttttgaattatatgacattaaaaaattgatatataaatggataaaaagagcttaagaggccgaccgtaggatgtgggtccaaccaattacaattttgccattttatacaactatttatcattttctttcacaaatgtcatattttccaatttcaatcatttaaatgttaaaactatttatttaatatataaaattaattatcaaataaagtttccatttattttatttattaataagacttaatacagtctgttaattaacaaataaactctaaaatatcttttctttacaatt

SEQ ID NO: 68986 - DNA, 1081 bp, Cannabis sativa
  modified_base (974)..(981): a, c, t, g, unknown or other
tttcagctatgaagattattaaaataaggcttcggaataaaatgaaagatgattttccagcaaacaatttagttgtttatattgaaagagagatagttgagacttttgatttagattcaatacttgatgattttgtttctttaaaagaacgtaggttgcagttttagacaatatattactttacatgatatatatttatatgtgtctttatattttctcaatcaatgatatatatttgcatatgttatattattttatatgtgttggataaagctccttatttaacttcttatattaatttatataatactatatactaaaaacaaaataggtaaaaatacattttgtttggcccctccttgttttgtgatctggttccgccactcataataagttattacattaaactgtttttcttttcataaaataattattttgaaaaataatcatatttttgcgaattttgtataaaatatttaatttccactctagttttcaatcacattccatgatatattcagtggtaaccaaacatatattcagtgactaaaattgagtatgggaacttcggattcctttatttgattgtacgaacatgttaagaaaactgtcaaatttttattctgttcagttattttataaattgagatttttggtttgtttttttttttctttttctcatgcatatcctaatattttatgtttcaattgtcaactccaattaataagacaagctatagaatacaacaaacaaaatttgatttggaacaaccgaagtgagacgtaaagctcttgaaaaaggctaaataaaaataatatgccaacttttattatatagtattttcaatgtcaataatctctttattacttgctttgaaaaaaatctctttattactttaatgatgtccatgcataattaagaagcaaacatatatatttgttcgagaagaaaaaacagatatatatatatatannnnnnnnagcaaaaaactacgtgcgaggcacgtatagtaaattttatgctaggttttttttatgttatttgaaagtgagattattattgaatactgaatgcaatata

SEQ ID NO: 68987 - DNA, 1144 bp, Cannabis sativa
  modified_base (817)..(827): a, c, t, g, unknown or other
gatgaatccaattattatttttttggggggaattatctcatatatactgttttttttaattttttttttcagatttatggtttgagtttctaaagtggttgcagtgctagttgcaataggggtttttatacaattttttattgcaatttaggctgcagcgctagttgcaataggggtttttatgtagaatttcataaagatgtaaaaaaaaaattattttgaagtgtaaaaataaaaaaaaaacttttttttttccaattattaatctagcaatttgtaagagagataaataaaagtgagagatttttacacaaattacttacaatgatatttttttcctttttatatttttacggatttattttaatattttttatggaattcagcaaaagcaacattctaacaatatagtataaatataaaataacgtgtaaataatatagtgataatgttaatattgtgaagatatttagaaaaaaaaaaataattcttatttttgtaaataaaaacatacatacttgtaaaaatattaaaaaaaaaacccgtaaatctgttttttttattatttatagaaaaatatctaaaagttagttataatttatggaaaaaaatccgatgattccaattgttacaatatttttgtttccaaggtatcctaattagcgtgattactttgataactaatattaacacttttttgtcatttaaaggcttgtttggtagctgtattgtattgtagtgtattgtattgtgttgtattatattgtattatattagtattatttaatacaatacaatatttggtattgacttgtannnnnnnnnnntgtaaagttataatatattttcaagacactcgactccaacaccaactacgagtctgggtccggttcgggtccaggtctagggtctggggtctgggatttgggttcggggtctgggtctgggttcgggtgggggctagggtctgggttcgggtggggtctagggtccgggtccaggtcccgagtttgggttggggttcaggtccgggtcccgagtctgggtttgggtgagagattggtgttgatctcgaattctttgtaaatattataatacaagctaatacggaccatttgttatgtattaaataatacaacatata

SEQ ID NO: 68988 - DNA, 1010 bp, Cannabis sativa
tacggcttgcctcacaaaatagtctcggacaatggaaagcagtttgactgcgaagaattcaccaacttctacaacgaacacgaagtcattaaaagcttctttgtggtggcaaggccacaacaaatggacaggcagaagccgtcaacaaaatcctcaaggtcaccctaaagaaaaagctgctggcctgtaagaacaactggcccaaagaatttccaagagtattatgggcctaccggataaccccaagaaccacaaccggacactcaccattctcaatagtgtacggctgtgaagctatggtcccggtggaaaccttattcccatcacacagaagagcgacaaatgatctggcaacaaacaaagctttattacaagaagcactggatcaaattgacgaactccgggatgagtctcaaatatggatggcagcttaccaaagaaaggtggccaaacatttcaacgccaaagtcaaaaataggaaattcacaattggtgatctagtcctacgaagagtcttcccagccactcaagaacccagagtgggggtacttgggccgaattgggaaggaccttatgaaattgaggatgaaattgactccaggacctacaagctaaaaagaattgacggaaccacagtgcttagggcctggaatactgatcatctccaaaagtattatcaatagctaaaaagcaaagtttatatcctgtaaaagaatttgtaccaacaaatgtacgcaacctcttatttaattttgtaagactaagtgacttaaaaactgcttttcatgtcacttagggggtattaaggcatatcatacgggcaaatataaataggatgcgtatctctttattgggaactgggtcaggccggtagcgaaatggctcatcaactctgaagcaaagggagccatggtaggtccaatgaaacggttgaaccagtcagtcaagggatccaaatttaagtcccagacattcccggcgtattcactacgagtaaagctatcctgggc

SEQ ID NO: 68989 - DNA, 1857 bp, Cannabis sativa
gacttaggtctggggttcgggttctggtcggggtctaggtttgaggttcaggttgagatccgggtctagggtccgtgtccaagtttgggtcgaggttagggttcttatttgggttccaagctctaagtcggggtcggagtctaaaatattaattaagaaaaaatctattctaaaaatttttgaaagtgacttttttttttcaaaattttaattctctattaaaaaaaataaaaaaaaatgaaaacagatttataaaatatgattttgaaaaatatttctacttttctaatttaaaaaataaaaaaaagtgattaaaatgttgacaaatgtactctaaatttttcaaaatttgaatgcgatcatttaaataaattatttataattttgttcaattcttaaaatggagacatccctatctgtagggaccaaaataattaataaagtcactgctgatataatttttcaatattagtcgaccatcatattcaatgtcagtcgaactcatggacttggtcaaattggaagacttggaaaaatctaaggtaaccttttgtaattatgtatttatgtataaattattatttgtctacatgacgaagacattataaataatattttattatacagttatatatattacaaaatatatatataagaaaatcaaagtattttattaaattattattgattctaatacaaaatgatagaagaaaagaatataaaagatttgaaaaaaataataataaatagcagtaatcaattttgtttattttttaaaatgcatgtgagtgaccgcaaccacaagttattagctagtgttttggaaaactgggttcctataaaaataaaagtcttaaaagacattaaagaagttgtgtaggtagagagtggtgctgcatgttcctgtgaagttgtggaggaatttcttggatgcgtgaaacagtaccctacttgattcgaaaattaaagtcctacaatcgcataccaattaatggtccacaccttttgttgtgaacttgcaaagcacttcacatgtgaacaacacttaaatattctacacaatacttttctcaaatttgggtcaaatattataacgccacaatttttatttatttatgtatgaataattattattcccaaactaggctgacgatatatatatacatacgcagaataccaatattattaatcattattttttattgcttttagtcttgtgagagaaaagagaaagtgagataaatatttatatatatacatataagtacttcattcagaaaaatattataattatggatttattatcgcacaaaattgacaagagcagtttgaagattggagatcacatctacacttacagaaacctacacacatgcaccattcatggtcagtttatatgtataaatatatatatatatttctcttatatatacattagctatatatagctactctatcttataataaaatagaaaaataataaaatttaaatatagtatttaaatacaagttgttattaatttaattgtgactctcagaccttttagtcataatattaaaatgataatttataattagtaacaattttttatttttcgtcacaagttttgttgtgactaaaaatcaaattttttatagtgtatacatacgcaataattgtacgaaatggttacaggaatttacgtggaaaacgatcgagtgatttactacaaaagtaagaacaacaaaagcaaatatagcggaaattgtgaaaggtgtggatacaatccaacaaggagtagaggagtggtgaaatcgtgtttggagtgtttccttcaaggccacgggctgtacctgttccagtacggagtctccgat

SEQ ID NO: 68990 - DNA, 925 bp, Cannabis sativa
ttcatttgaaacatttactagattggagcaccattcgaagaattagacttcgacaatgagtgattggatgaatgtgattcatcatgatcatcaaacccaggagttgaagtagcaattggagagccaatggtcggaggaaaaacgaggttgtaagtcgacttttgagcttgggtcttcgactttcagactgtttttcgtcgaagcagacgacgatctagggactctggtcactggtgcaggtggcacaggtggggagatcggagaaacataagtagtgccacgagaaggcttcttggacggttgagcatttttggtttttgccatttttttctttaaaccctagaaagcaaacacactctcacacttaaaaagattataattttgagaaaaaatagaaagagaggtgtgaatagtggtgaacgtgggtaagtgggaagttgaacatatatagcacttagaattaaatccccaataatcagaaaaatatgaaaaaggaaagtaacttccttaccttagacaccacatgaggagagaaaagaggaaaccaaaaagattttttaaaaaattggtgaaaggttaccttaaatggaaaaaggaaacaacatatccccacaaaatctaagaattaaaaacccaaccgaatctgaaattgccaccaaaaaggaaaccacacaataactaattaattaaaaataaatttcctaaaacaccacaaaaataagaccaaatttctaaaaataaaggaaacacattagataaaatgcaatgaaaacatgtttccataaacgaaaaaataaaagaaaaaaaatagccgaatcgaaaaattatgccccttttttctttaattttttcaaaatatgccccccatattaatttgcaaagaatgaacaagacaacacacaatgacacataaaacaccaatcaa

SEQ ID NO: 68991 - DNA, 1019 bp, Cannabis sativa
  modified_base (650)..(675): a, c, t, g, unknown or other
gagagagagagagagaatagagttttagagttagagcaattttgaggctaagtgacttaggtttctcggatagggttaaggcctttacataggaggcctaaaccctagattacagtttaaatccctagatatttgcataagttgttagataattaaaaaatactaaagtgccctttaatttagacattacttagccattctgttgggcttttagggcccaattcgtagcccatggcttgtgtccacgtgtagagttgtaaaaaaatcctgccaggtcaaccctggccggccattgacctacaggggaggtctagttgttaggttatgtttagtattatttttaggttaatttttagtgtgttttaaatttagttctactcttgtttggagcaattttacgctttttatcttttatttttgtagatttaaaatagaagaagattagaaaatatcaaaggaataatatggaaaaaaagataacaagatctcacaaaaagatgaactataaaatagaaaaaattgtgcaaaaaaatagagctgaaacttcaagcctaaattcaactattatcttatcagattttggagaaagtcaaaatataaaagttctagatctcttttatcttttcggaacatcttgaatcgtcccattnnnnnnnnnnnnnnnnnnnnnnnnnncaaaatactatcagtcgacgtagcagaaaactcactgcctcttctaatcctaaacagaataggtttttatcatttttttgtatataaaagaagtggacttcaatagttttcaagaagcaattcagaaggaaataaaaggcagaaaaaggagtacgaatttcagagacggagttcaatactagaggcattcttcagaggattttcagcattctttttttctcttttctcaagttattatgtgtgattttgctttaatatccatgagtagttaaacacttaattagggtctagatggatattatttgacattattttatgattttaatatgattttattttccctc

SEQ ID NO: 68992 - DNA, 617 bp, Cannabis sativa
aagtgaggtcaacaaatcccacaccgcctggggatggtcaagtatgatgcttttgagactgtgtaggtatgggactatacaattaaagagggcttaaattgattgattggtactacctatatcaataaggtacattttgttttttctgtagcccatcacgaaagtactccacggttaagcgcgcttgacctggggtaattttaagatgggtgacatcttgggatgttttcctaggaagtgtgcgagtgaggacaaatcacgctgtaaacactcgtgtaggtttgtagggttagttgtcattttaggaagtagccagagtaacgtacccgtgtataagagacatcatttcgtgggtgtaaaggtccaatggaggcttaaagcggggatgttacatggtgtttctcccccatgcttatgtaaaaactgcgtctttacaagagttttgtccaaatgactaatgtgtgcaacaactcgaccagaacttgcaagttctatgctgtcagtacatgaatgctcgatatgcgaccgatatagtcgtaatcgttccatgaattaataagaatctcgagaggttcgtgcatcgataggaacgccgagaggttcatgcatttatttga

SEQ ID NO: 68993 - DNA, 691 bp, Cannabis sativa
  modified_base (647)..(649): a, c, t, g, unknown or other
agagagagagagagagtttcagaggtgcataccaattggggactgacggcggcagcagacggcagtgggcggaggcgcgactgggtttcgaaatgggtctgctagggttttgaattggggggacgatgccttaatgaaattagagtttgtaaaatttgagttttataaatgcttaacttttttgcttcgatccacaaccgaagcaaatatattaacctcaatttttaactgaagcaaaagaaattggcttcaagtttgcactgacgcaaaatacaaaagataattttttaaattgtcacattttacctcggttttactttttgtgtcggggtacgagccaacgctaattgttattttttagcttcagtcaaacaatgaagcataaaatctcccctcactttttgcctcgatcaaccaatttggtgagacgcgttgaccgacgcaaaaattactttgtctagtagtgtcagatggaactatttgcaaagaggcccgccaaggaagcgaggaatgtgatcttaaagttgaaccaacttcataccaaggtccagtccctaaccactgaaaatgaagctttacgtgacagtgctgatgaaaagactcggtttgaccgagtcaaatgtgtttatatatatataaaataatannnaaataatatatatatgtatataaaaaaaaataataatttaaa

SEQ ID NO: 68994 - DNA, 562 bp, Cannabis sativa
taaatcctggtaaaatattcccaacaatatctccatccaagccttgtaaataccgaacctgacctcgtataaatgctaggagtacgattgttagatcttgaggacaaagattgagactcgtgatcatttacctcgggtcgtaattgcacgcgactgcgagagttgtgccagtcattttcctcttatggccttctctcatttcgactagatcgctggtttaagctaggatcaataggccctttgccgcatgcagcatcacgaatgagttaattcaagtcaagcccatctaggttgttttcagctaaatgttccctctaattaaaaggaacattagtacggtcattacgacgcctgttatcattagttacctaattatccgtgtgacagtatgttgagactcatggtggacgtcgtgcacgagtttgatcttctcctgtaatttccaccttcagtgcttgcatttgctcttgcatgggcatgtattgtgcggttgttaaatggataataccatcgggagcctaggcgggtgttattggtgaaaaatggcccacagtggctgctg

SEQ ID NO: 68995 - DNA, 1193 bp, Cannabis sativa
  modified_base (989)..(989): a, c, t, g, unknown or other
tgtgattgggattcataatgttctgatagagttgagcatttcttgtttcagtttcttgtcaggccccttactgagatagagctacccatactgaggtgtgaaagccatctttttagtaagctagaacgttgtaattgagagtaatgatgaggatgcactaccatagaaaagggctaccttcagtatggtgtgatggcatccagttacgggatcaaattgaaaaagacaaaaaataaaaatcttgccaaggatgatgatcctattttcgctgcccacacttatgtcttacaagtgaattcaactgtgtaagtctcttcttctttaataaaaattatcttgattcacattatttgtaacatgtttattttttctcaacatctgttaagtgtggttggtttttgagattctcattagttattcttttttgaaagcatatcatgaatatttgtcacatgttatgaaatttaattagttgctgctctagaacacctttctcattattgtacatactttatttatgtttatttttttggattttcaaaaataaaaaagagagaggcatttgtgacttgtcttgtgggctaagaaattttatgctttgtttgttaagtatcaacatttgatctaaaattgatttatttagataagtttccctttaaagtttgatatcatattcattgtattttgtcattgatcttgaaggattttcttaaatttggtctatttttgaaaagtatcttggttattcttgtttccttttattttttttatgaaaaataattttggaaatagagtgggggcggtttatttgtgatcgtgggctggtggtttttcaaattttaatttggtttccttttttgctctactctcacatgattatttaaacaaactttctttgtcatttaatttcaccacctacccaattcctcttctttgtttcttcatttcacattcttactttcaaattcccatggctaagacaaagaacntagggcatccaagcaagatggtggattccgaacctgccccctcaagtactgctcttgtggctccaaaattgcctcctgctgctgcaactgcatcaaacctaggagattcattgcttcctcagcatgaatctcagactgtgaagcccaagccgaaacagattcccaaacaagtggctaggaaatctgtgcgaccccacaaattct

SEQ ID NO: 68996 - DNA, 1273 bp, Cannabis sativa
cctcccccctccacgcggctcaccgccactccttcctgctggtccgtactatccgagctctgtacagggatcacgtcgaagaactcttcctccactacatagttcactaaccagctgcttttccgtttgtttctcgagaaaatcgagtttggattcagtttggggaaattggaggagctggggagaagcttaggatgagagtttgttggctttggtttgggtttggtcaaggaaaggaaactctggggagctatggtgtggaacgaagccatggctgcttaccagcctgagttctgacgaagctgggaaaatctgagttggagattttatatggctgacacacacttatgattggatgagtggtaatataatgcgattttttcaaaaatatacctaaaatctaaaataatttcaaaaataccttaataaatctcatttacaataatacattgccacatcattaaattataccttcattccaaactattaaccccaaaaattgatacttgtaatttttaaagttagttgaccaaggtatgaaagatcacatggtgaaagtcactcggctagactgaacatttttaccgagtttgactcgaacctgaccaaccccccggacccgatctgaccaacccgaaaatttaaagaaacttgttcaattcagtgggtcgggttcaacccgatacacctttcaagcgggttttaggttcaatttttcaagtgacccggtttcaggtcagagctacactcgcctgtgaactcgatttttttttttactcttacataaactttaataataataaaagtttacactctacatatatttaacctcaaatataatattatatgctatttctaaaaaaacgttacataatacaatatatatatatattttatttgttaaaaatttatatgtatatatactattaaatttaataattttgttatatatttatatataattaagtaagtgtttaggtttagttatatgtttatatataattaagtacatttatagataattaggtgagtgtaaaaaaaaagttcgaccaagttgatcagctcaacctacccaacccgaacccggccaacccgccaactcgtaaacccaaaacctgccaactcgcaacacgtgaacgggttgagtctaggtacaattttttcaacccaaaacctgacaacccgaaacctggtcaacccgtccgatgttcagtcctacactcggtccaagagtgactcaatgttacttttcctcgagagtggctaatgtccc

SEQ ID NO: 68997 - DNA, 595 bp, Cannabis sativa
tcccaaaaccaattggctatgggaggagtagcccattcttcttatatattctattatctttccacacattggcaatgtgggactctctaacacatcacgctaataaattacacacaatactgaaaagaaatattacaattatgtttactatattagttgccggttgagggttcttccaggtcagcagtgtaggagttttggtaaatctgcacacagctattaaaagtttcagtattgaaattgcaaggaataatctgctacaaattagacagtagcttcaatcagcaacattgcagagcatgagatatgttgcatcaatagagagtttagaagaattctatctcgcttctctaacagcatgtatagcagatgaatgggaaacaaattttcacaggccaataatgatattgatatactatcctaaaaaggttgaaaataatattgcattattctaatatggggaaatttttaattcaagtaaacagtttaggcaagaattaagggcgaacgagagaagcatgacaaggaagtacagcttcattcttattatagctaacacctccaacagtatattgttaaaggaatattcaaacaa

SEQ ID NO: 68998 - DNA, 2300 bp, Cannabis sativa
  modified_base (256)..(257): a, c, t, g, unknown or other
taacggtacaggtaaaaaactaaaatagtaaacaccattattgcaataaaaataaaaagactaattagtaatttttaatttttctcccgaactttgacatgtactaaatcgtatctcctaaacttttttggtcgttaaaaattcccctgaattattgagattgttaaatttaaggtcttttgtctaatttcatttaattttactgtttcagtgattgtttatgtaataaactatgctccccatactttgatatctnncaaatcatacccctcaaactttgatatgtactaaatcatgctctttgaatttttatccatgttagaatttttttactaaaattatacaaaagtccttaaatttaacaatctcaatagttcggagaaaatttttaatggccaaaaaagttcagggaatacgatttagtatatgtcaaaattcgagggaaaaaattactaattaaccaaacaaaaacgacacaaagccaatatcaccaatttgggatagtaaacaccattattacaataaaaactaaaccacattactcacacaataaaaaactacaaacttctagtaaaaaagaactatatacaaggcacgccaccaaaatatgtatctttattttagtcgtttcatacatataaatgatccttgaaacaaaagcatattctgtagtttaaaagtgtttattgttattttatatagctatagtgagagaaagaaatagaattagtctaagtttgaccatacttatttcattaattttctattttttaattgaaagggtgaaaatattttcaatagagcatgtattataaaaatatttttactttttaattttttaatttagaattaaaatttaaaaaaaatttaaaaaaaaaaaacactttccaaaactttttaaatattttttttcataattaatattttagactccgacccaacttaaattttagaatccgtactctagccccgacccaccacggtcccgaccccagattcggacttagacctgacttaaataagattataaagtaaaatttataaaatacaaatttgttttctatttttaaagttaaaaaaatatttttgtttttaaaaaataaaattttaaaaatgcaaaatttacttttatttttgtgattaaaaaaataaaaattttatgaaatgtcctttaattttttcttccaaatatttctttcataaaaaaaaatagctagtttttgaaggaattaaagtgccaataacttttaaagggcggtgtctttaaaaaagcagcaagtaacccaatgttgtacttttggcacttgttgtataatcttaattggttatttttaattttaaactatatacaaatataaatattcatctagattataaaggttcaaccattacttggtcatattcaaactttgctattgcttaatttatataatttttgcttattaaatggaatatgaatttgggagtttttttccttttttggtcaacttgataaatgaatattattattgttattttttgctgaaataaattaatagaattgttagtattttgtattgctggaatattatgggaacatatgccttattcatatacatctaaggtcaaggaaaaaaaaagacctttagttgataagattattgttattttctttttttaaggagataattattttttaagaaaacaaaaaatcagtgttttttttttttctgatataaagggaggagggattccaattgtgacattttcgtgtaaaattattaagctaggtctataatcacactaaaactcaatttttaaggacttaaataagaatttattaaccactgaaaacactttaaaaatgaaaaattatctccacaaaatctgcatatgaaaaaatgcataaacaacttgacataacataacatataccttagccatttccatcaatacaaactccttagcaaacaaatattacatagtttttttttttcttgttttcttttcttttttcttagagaccaaattaattaattatcgtattgaattagtaatgatttaagtacttttgcattaatatataaaagaaaaaggataaggccttttatgctagctagcactcaaattccactctaatttttatttctctaccaatatttttaagcctcactgacaaatattttttgctctatttctcgagtgcatgcatgcacttcttaaaatcttggcttataatagacaatttaatttctaatgttttactaatttattccctaatatatattacttgaagtggatcttgaagagaaagaaaaaga

SEQ ID NO: 68999 - DNA, 571 bp, Cannabis sativa
aaaacgtaattatgaggtagtgtataggctgcactacaaaggatgaacccacctccatggaaatagatgacgacaggtagtcgtagattattatccagtgcattccggggtatgtaaactctgaaccaggtggattttgattggtcaaggatgatgtctttggaaagaactataggtgcaccacttgatacatgagtggggtgatgatcaggtgcagcgggtgattccggaaatttgtacagtcgagtgattgttccgtcgtcattctgtgcaatcttcagaatttggtaggggtcgattgttctagggtcagacattgcaagctttaagaaatgtttgaaatcctacaatcaaaattttgagagcttataaattaaagaataattgctaattggctgagaaatatggggagaagaatcattgttacatgtgcaataataatgacaaaagcagaaaccatgtgcaaatataatatgaaagcgaaaacaaaacaaaacatatgcgccactatcatttttttatttatttttttattttttaaggatgcatgcaccatcaacatttcgagaaa

SEQ ID NO: 69000 - DNA, 1176 bp, Cannabis sativa
  modified_base (34)..(35): a, c, t, g, unknown or other
  modified_base (1111)..(1117): a, c, t, g, unknown or other
acattaaacaatcatgaaataaattatgtgaacnntgcaacataaaatgcagtttctgatctttattaattagtaaatctcattattttaaaatgggttttatttagggcacaaaacccaacactactggttcaggaatttatcgtatagaagttttagagtttgagttccctacagaatcagccattccatataaacccaacccttcaaaacccacctccaaattagagctaaacgatgctagggttagggaacacatagtgagaaccgaacaggatgatatttctagtctcgaaagagctcccggtggttcattcatctgaccatatactagagctacttcagcaaggagtgttgttgtgacagtgccgagagcgtgaagtgacgtcaacaaagtaacgcccaaattggggctgttagtcagaacgtaagaaaaaagccgaggtctatcagaagtcaaatcaaagaggccactagcttaagcttattccccttcactaatgcctccaactgaatagaaccccgttgaagctttagctcttctcgtcagaacacgcgcctgcccgaacagcataatcgcgcttctttgttggcacattgaccggaccacagtgtgttactgaaactacttatgcttttgcccggtcaacacctagctctgggtctgtagactctggaacttaaacagcaacccgtgtctctgtcccgccggtgattatgccaatcatagtcgctacatgcacttcttacaagaaatattcgaaggcagacactgattcttgtgagaagcagccttgccggaaccacccagtgtgtcttttattcctgtggcaaaacctttgtttttacccaacgtcacaaattcttttgaaccaggtgacttggattttgaaattatgcctctcaagccgcgtacgtctaaaactcctcaggatctcagtgtcaccttcaaggctgagatgatagaatcgaaggtgcgatctatctcaggctacacgggcgagatgctaaaaacctgtggaattgaacttgggcaatcatgccaagttagatcagaatgagagggtgagttcatttgcttccccctggtgttggaatatattttaccagnnnnnnnatttactaacaattatgtttttaacatcctagtatgaatttctaaaacgatgaaaataa

SEQ ID NO: 69001 - DNA, 894 bp, Cannabis sativa
  modified_base (751)..(752): a, c, t, g, unknown or other
gttggaagtttgaggagtgaggattatggaagtgaagctacttcaatggagattatatatataggcatggatgaagtctatacagaattttggatacgcggttattttatgaaatcatagccgttagattttacgatacgttaaatgaacggttgagatgtagtatgaggtccacaacagctactatggcgctttaagtagtatatccgcatggatggccgtagtggtccacactacatgtgttaaaaaattaaaaaatatgaagaaaaacaaactattaattatttaaggataataaagagaaaagtatagttattaaaaagataaagagtggagcccggccccacttgagtcttgagtcttgactatgatttgttttgaagtttaaacttttctttttttgttattcttttccaaaatacaaaagatttttttttttcttttcatattatagtaaaaagagcagacaagacacgtacagaaatagttgtaatttttatttaatttaatcttgtaacaaaaacaaaaacaaaaaaatcagagaaatattaaataattaaaataatatgttacttgcgtaacaagatttttgcttttagtagtggataatataagataaatattattttatatttctattttgtaaaagttattaattagattttttattttgttaaataataaaatgtattctatattttttaaaatggtactaataggattttgaattaatttttttatcaaaataaannttaataataattcgatctaaaagtgttatgacaagactatttatatttactgtcgtgttaaaaattatcttcaagttggttatattaaaaaaaaaaaattgtcaaaaattaagttcagggttctatttttactattttgaaa

SEQ ID NO: 69002 - DNA, 601 bp, Cannabis sativa
gacaacaagaatagtactaggcaagtggtatcttttagcaattctcaaataagtactatattttagtctcaagtacttttttattgcgactaaaaattcataaaagtcacatatttaatcacaaaaaaattgtgattaaaaatttagtaattttttttattttctcaagaatatttgtgttcattccccaaaagtttacaatagaggggtgtttcagtacaccttgtaagtattttgacatctatattagctttctagtttttttttttattattattatgtatgttgtatttatataggattgtcattattttttttaaaaaaaattaaaataatttacaataacaaaaataatattcaatatattttgttgcacacctaactattttatcttatatgtgtggtaagaaattgttttaaccttattttaagcactataaattattcagaattttttgaaaatttaccgttaatcctaaataattacaacttacactatcataaaaaaaaaattgactaaaagattcttggatgcggatatagatagagaatgtataaaatacctctcttggtgatgaatgtcttagatgaaatatttgga

SEQ ID NO: 69003 - DNA, 835 bp, Cannabis sativa
ggaatggaatcaaatttaaaatacataaaaaaaaaaaaaattgataaaaaaaattataaatttttgttttcatcttgcattggaatggttttttcttctatttaaaaatggaatagtcactccactagaatgacactccaatactttaaaatgcaaccaaaaaaatgaatggaattaaaattgtttcctttccattctattcattatcattacctccaaccaaacgccaccttagtgaaatttaagttgaaagactaatgttacaaaagatattaatgatatctggaacactagatcatatgttaactagacggtgattcatgacagcctcaagatattgataagatgtgttttactacactgttacgccataggatgttatgttcgcaaacaagttttggtaatccagagctgggtaagcagatattattaaacaatgcaaaattaaataaaacctgtgaatgtagctgtgcttgtgaatggactcaatggcaagaaccgtctccccaacataaaaccttgcttcatcttcattcaaagtatctttacgcattaataatgtcatcatgtcacccccagaaaggtattccattataagatataaaaattcatcatcttgaaaggagcagtagagcttgacaatgtatgcactatcaacctcggcgagaagatttctttcagctttgacatgttccacctttcatatgcaataggaaggaaaaagaaaatagtaagaagtaagaactgtatgtattaccttataaacaaaggttgatagaaaactgcaataattgaaggatattccaaaacataaatttaccaaagacaagtgagt

SEQ ID NO: 69004 - DNA, 522 bp, Cannabis sativa
tttttcgttttttatcatccaaaaatatatttgttttttttttaatttagtcaacgtgtacagtgattaagaaaaagtttttcatcaattctatagaaaatttcttaaatacttggcttaattaaaaaaaaagcattgcgacttctgtgatacaaattaaaaaaaaaaacgcattggtttatcaagcgtaagattcctcttcagccgatttgtcaaaggtgtggtgaggaagtggagaactctggagcatgctttagtcttttgcccttcattgcgacctttgtggtctaagctgcggatttggaataggctcaatcgtggtagtactggatctttggcggagttgttggtgtttctttttgaggtacttgatttgaatactcttactttgttggctatggtgtggtggtggttatgatttgataggaactcggtgttgtttgggaagaagcaatctaggttggatgtgattgatgatttagctcggggtgctttggaggaatttcagggggtgggtgtggg

SEQ ID NO: 69005 - DNA, 1924 bp, Cannabis sativa
taatatttctattattaaattaaatattttagataaaaaaattccaaaaaataaaataacacgtgcctcgcacgtagttcccgcctagtatatatatatatttatatatatatatatgaaacacttttcaatagatattacctatttgtggttgttaaataaatttaattataaattttaaaatattaaatcattaaattttgatgcaataataaataataaaagtaaaatttaaatgtttatgcttaatttagctacttaactaaaaaaatatcaaaaaatatatctttttataatatatcaaaaatatatttatataaaaaaaaattaagtaaattcacttttttattttttttaatttttgcaattttttttaattatttttttaactgataaaacaaacctcagtctaattatatataatgtaaaaacaattttttttaatttaataaaaaaattaaaaataaaaactcaaattttcataatattaattagtgatgagttatatatttttatatttatatatttatcacttcaactttttaaattttagttgtttttatatgtataataaggtttgacttggataaagaaatagtattattggtgggacggttgggttgtgttgcagggacaacacacagagaagttaatgtgtaataattaaggtagtgttctgttagacactttgtctctaattaagtgtgtgtggatctcaaactctcatctacctcatcatcatcatgtgctaacaaatttgtttacataaatttagcacaagtgatcgagaaaacaatattagacttttgggagtcttctttaaggttttctttatataattcgaatattaattgttcatgattatcatcattcgatgcatgttggaatgtgattcaatgataatttagaggtgttttgatgattaaatggaattagacaaccatactactaagcaagaatagactataattaaccatgttatatatccttgttaaatataattcgaaagaatagttgaaacttgatatcaaattattaattaattaaattaagttagctacaaagatcaatataattacacaagagaagaatggaataatacaaactcaaaatgaaatattgcaagaaacaatataataccatagaaagaataagtctaaaaatcccttattttaaatagtttatttcattatctttttagtactctattctttaaaataactcactataaaaataaaataaatacttccgaatgacttataaaatggccaacaacaatgtatgttgttgtaacggcatttttcaaatagagagcaaagagtaaatagataactccaataacaattctagtagtttactatcttttagcggtaatgggctacatctacttagagttttattaacgtacgattgagtcttagaatcataagaacatcgcttcaataagttttctaagttcaatataataaagtttttataaagaatgactttagagcattgaatcttaaagacagagtatttcaatttagaaatcaaaataatgagaagtcggcctcctatttataggttaacgttccctaatggatttagggcattacaatttcaaatgtaaagtaataaaataatcatttaaataaagatttaaatgaaattaatattacttgaagatacttataatgatttctaaaaatgcttccaatcaaatcggtagtacacactttggactattaatcttgtaattggatgaagatagtcgatctttaatgaagtataaaagctcttcaatgatgaagcatctagaaggtttagagagtttctggtgattgtaaatgtcattgaaaggtgggacttatcttattgaaattgatgaagatagacctgggccaggggtaaaagctttgtgcgcaaagtacttgtacctagg

SEQ ID NO: 69006 - DNA, 1150 bp, Cannabis sativa
tggttcttgtggcggtcgagcatagagagagagaatgggaaacttctatgttttcttgaattttgacttttcttttcttaatttcttccaactaagaaaatcctaagtaatccattattttcagctgagaaaataagtggccagatgccactcatagaagatgccacctataacaaaaatataaaatacccaaattgtcctttaacctccttagttaagaaattgtaagcctaggggtaaaatggtcaaaagccataatcccgctcaactcgaaattctatttatctcaaatatttatcccaccaagaaataggttttagacttacccatgtgactctaacggccatccattgcatttttccgtcatcgccgagcaaaaatcataaaaattgcataattcatatatagcacaaatagtactgctagagcttaataaaatctccaaaattgagaaattataactctagtgcccatttctaaaaatggggcccacaaataacaaattcatgcataattataacaatatcaataattaacgctaattacctttactaatctatattctaaaatgtagttatcacaacaaggaatgggaaaccaaggcatattgcttttattctctgatttaatcccacgaatgtagggattatcttcggtcttgaaagcaacgagatttatctctaaaatttccaactcacatattctgctcggtgcatatgggttcacgagattgtactttggtcaaatgtcttttgattactcaactcggacatcctgttgtaacaaacatttatattatcaaccttcgagggatggatggtgtccttcctttcgcccacataggaaaatacagaacacgtgtcatccagctttacgtcacagtgcaaaaaatagaataacacaatttggtcctcaaaaatagttgattctcaatatttttctaaagatagagatgatgcttgcaagaattcctgaaaaactccattttttgttgcctaggtttgcaaattgtcaacctgggcgtagggccagccccaagatcggaagagcgtcgtgtagggaaagagtgtagatctcggtggtcgccgtatcattaaaaaaaaacaaaattttcagtgcaaaaacaactgcggccaattctaaatcatga

SEQ ID NO: 69007 - DNA, 853 bp, Cannabis sativa
ttatcataaggaaacaaatcttataaaacagtacataaaatataaatacaaattaaattttaatttcataacacaataaatctatttttttctttagtggttagagacataaaataaaataaattgtaatataacttctaaatttaatatttacttttattgttttattcaaaaagtatgtagagaaaaaacacttacatatattgtaattactataactttaagatgatgaagttgtaactttatagataatataatcaatcaatatatataaaggaaaattttaaagagttgatgtagcatgcttaagattcttattatctttaaaatctattttttttttactaattttgtaaccctctatatgtagaccaaaaattatatatatatatatcataataatactatacttaacactaattttcacaataatgatctattcattcatatatatatatcttcttcaattctcttctcaatgctatttattatcaatcataatagttaagaaaaataatttttttttatttctttctttactaaaaaaatacaaagattgacctatgacattctaaaaataaaataacttttattttttttattttatttttttattgttttgcagaagctaaatttcattatgaaagatctttcacttcaagaaacacaaatattcattagtttgatgagtataatcatcattcttgctacaattactttttaggtgagtcttaatatttttcttaattttgttgattttacaaatgttcaatagaatttttttatttttatttattttttaaaatttgtgcttattgatttgttaagtttgtgttgtgtatgacaattgcta

SEQ ID NO: 69008 - DNA, 992 bp, Cannabis sativa
tgctcgatgcctacaggtacctactatattattgagtgaaactttgatctcctccattctcacgaaatgtaggaatagatgataggtatgattctatgttctcattgtctatttactctgctgtaggcttggggagtcctagaacaaagaattggaaacctatctgcagctcgtatattatttagatcctctctaaatataaattctcagagtttcatcacatggatgacatgggcagcatttgaagaggaagatcaagaaaattcagttcgagccgaggaaattcgcaacctctatttccagcaagtgagcaaccacaattaagtattctaatgtttatgccaaagaccaagcaatccatacttgacattttaaagaagaaattaaagttgttagactaaagaccaatgtagcacaccctaagaatccttgagaagaatggctgtgattacatggatgatgaacaaaatgacagtggtttcaattggatatgctttttagaccctagcaaggtggactttctgttggaaacaaaaaataatttctatagcaaaaatatccaagaagaagattatgaaagctttgatcccattgagcctcaaacccagaaagttgaaacctttgtaagtctgaatatattattatctttctttacaatctgtaaaagcataaacaatataaggacagacattagtaattcaagtaatgtatatttacaagtttattaaagtcgagagacacattcttcaatcttattattattattatctcttcaatgaaataaggaaagcataataaggggatgtgacagaaaaagcatgcttaactgttaaacattcattattttgagctgaccagaagcattatcaactaataaatgaaaattaaattaaagtaaataatagagtgaatattgactaaagtgggtttgttgcaggggagacaattttggtatggtgaatactgttgtggtcgggataagaagaaagcag

SEQ ID NO: 69009 - DNA, 635 bp, Cannabis sativa
gcgggttatattttcgtcgggtttttcggtttgcatttttcgtcgggttatctcggtttagtttgggcgggttgggcggtttataaaaatttatgtacaaacctatttaaattgaattctatttttagtgaaaaaagcttaaactattgggttttggattatataatcagagtattttataaaaatagcctttataaaaatatttattagcaaaataattttataaaaaaatttattaacaaaataactttttatagttgtagaaacaaccataaattatattgtgtgactataaagtataaacgactattataatcgtaaaatgatcatagatttacactttgtaactgtcatagttatatcgagtaaattaaatgaggttattttataaattttagagtaaatagtggtataagtacttaaacttttgagtttataagcggcataaacccattatttataagactgtaatttttgtcaaatttcatcagtaccgactctgttattgtcttaaatagaacaaaaataaaactcaaattttagattatttagtcaggatggaaatatgcattattagtcacttttaaatcttcttttaataaatttaaaaggtagcatgtattgacgaaaataga

SEQ ID NO: 69010 - DNA, 1989 bp, Cannabis sativa
tgaaaacgattcatttctagtttacaagcacctaatagaagctacaaaaaatatgattattttcataaccaataagtttgcaatacaagggggaaaatatatgctaagctacacacttgccttactgaaagtactacacaaatataatggaaagcctcataaaaacttaagcataatgaaggtagctcgtaacacagtgagtatccgaaattcgactcaaaagttggcatatctaatatctatgaagcaatctaaaaacaaatccactgccatattaaatgttccagacaaaaaggaaagctaagaaagaaaacacaccaagtcaggcttgaacattgcctcgcaagcaccataaagagactcagatgcagtaccagcaaccacaaaatcttttgccagctccctgcataaaattgagcacataagtaacatcagtattacactttgttttcaaacaagcccacgagtgggaacttcatacaaacatacaaagtgctcaaactgaccaatatacccattccgcgagattcaagatttacttaaaaataaaaagataaaagttcctctgtagaaagagcaagatcaaaaaggacatgaaccaaaatgactccacaattcactaatagagacatggacaaaaaaatggaatcccttcagcaagcttaaaggtcctctcaaccagagttattttgaactaatcaaaaagagaaagatacctaccttccccaatgggtactaatgtgagataaacatgataaacagtataagtgaaatcccaatttatgacatttaatatcacttaagcatgccaaagaacaccatagagttttcctctaccgagcataacttcaaaataacagcaacaagaacaagattagcttttttttagctggttttgtagcaagattaacttacttagctccaattgaatccatagtgcagatgaaaggcttatcatcgtcgctcaatccagcaataacaggttgacagaaatatggcccaaacctaaattagagagaggaaacaaataaataaaatccttaatttttcactcattttcacctgtgtgagattcttcaaaaataataaaaatcaaaccttttctcgtaaagaatagctgagacgaggctggcaaaagtctcaggcttcatatccttctcctcacgaagtcgatacagtttgtgcctaaacactagcctctgataccttcccccattaaaagaaaaactcagtaatagcactaaaaccctttatagaaaaagaaaatatacatatgtacatcaaaagattgaaacaagagaacggggcggggagttcttacagagtctgggcatcggtagcaaggccggaaagaccgaggtaaagcctttcgtggactttgtaaatcttctcgaaatcagtggcgattgtttggagctgaactccgagtctccgatcgctggcgatggcgaagcagttcttgcccaccatggcaaccagggcacttccattgtactcgaagatctgttcttccacaaaattataatcagagatagataaatacatatacacatcgtatacacatacaaatcaaattttagccctaaaatcacagaatgagagaagtgcatagcggaacttaccgacatgagagaaaattagggtttggttgtagttgaaattggtcagagtgaggtggtgtttgcagtgtcgatcgctttttcagagtaaatcggtggcttggggctcaatccaagctttttgagactcttttctttagtttcttctctattttccttcttctttgctcttcgctaataatgggcttgggccgttaagtttattgggctgggctctcattagtgctaactatgatcggagattttcaattgaggaaattatactctacgctattctctttttatattgtccgcttttatttttaccatcttttttaaagtctattatttttacttttttttaaacattgtactaattttacccctgtca

SEQ ID NO: 69011 - DNA, 1063 bp, Cannabis sativa
ccctttaagataatccttttgatttttatattattattataaactatttagtaaatgtgtatattattataatgtgaaaggaatatttcaacaactccaattagtacaaatttaagtaatatttgttgtcatttacgtctgaactaccaaacatgcacggttagccaacattttgtatttgaatattattgcaataacacccatcatcttaaagctttagtctattgtagatcgatcttgaattttatgtttgttttttttcccgaactgattatttgaaaaatggtaaaatcgattataaacttgtacaaaattatattacatttgtgttaaagctatgttatgccatctttaatgatactttaaaaacttatatataatatagtttttcttattacaaaatgctccaatcctgcggtaaaacgtatcctattcaaaataggaatttacaatgtttcactaataagcattgtagactatcgcatttttctactatttaataattaaataatttatttatcaagtaaatattttaagtatattaataaaatgatattataataaacattgtagttttgaatgtaaatttttgtattgtgattggaattaaaaaaaaattagtgctaaaataataccctttagtattgatttaacactaaacttagattttgacattggagttgcctttagaattgtttgtgtaaggataaatgcccaattatagtgcaaatgttatgaaatatgatatatagatgtcaaaatcactaaattaattatcattattaataatgtttgattgtatttttttttattacatcaatttagtttctcaatcttttagtcctataaatatgagttcaccccatttaaatagaaaactgagaaaatctcatttactctctcattcagttcttctttttttctctttctctcttcttctatttttattatctattctatattattttataacacgttattagcatactacaaaaaaactgctacttttagtgataactttttagtcacaatataattgttttgcgactaaatgtgactttta

SEQ ID NO: 69012 - DNA, 2150 bp, Cannabis sativa
  modified_base (218)..(224): a, c, t, g, unknown or other
tatagatttgacgtataacaatataaaatctaatactcatccaaactaaatgaaaatactaattagttcgattggatgttggatgtattgcatttttatccatcccatccaccatctgatctgatccaattggatatttaaaaataacatccaatccgatccgattacaattggatattcaatgtttagcagtcggttgtaattagatcggtcggttnnnnnnngattggatcgatttatgcacactctcatggtaaagagttttttttttttttttttaaatccaatggcctaccagcaagaggttttagtaaagtagctaatcttctaatagatcatggagattgggacactcagaagttgaactgcatttttgacaaagaaattatctgtgctatcttaaaagggggctctctttctggacagggaaatgataaatgggtttggacaaaggaaagtaatgggcgattttcttgcaaatcgtcctatcttatccaagcattgtaaatgactcctctttgtgacattgcccctccctctagaataggctctggaacagtaaagtcctggagcgacattatgtcctttggtggagcatcctgtcaaatgccctcccaattagttgtcgacaccatttggcgggtccgaaatgataaagtacacaacaataaactagatagtgtgaaacattgtattgatttcattcattactcttatgcagattataaagcttctctgatcccttctcctactccgatatttttggaggaatggcatccttctcctcaagattggctcaagctgaattctgacgttaaattggggccgaaaagcatgtgtagtgcggttatagctaggaaccattttggtgaactggtgtgggttagccaacatattatattttgtagatgctctttgtggagatgcagctgcttgttgcttagctctggaaatggctcaggcaaaatgttgcaagtttatcattgtggagagcgactctagagtagtgatcaatactcttaatggcaaggagtttagatgggaactggtgaactctcctctttttataaaaaggatacctttttattttgttggttgtttattttttaatactctcagaacttgtaactttgtagctcataatgtggcaaagtgggcttttacccataattagtttggttgtttgtttgtttcttccattccggcagacttattttgtaatgatcatgaggtctagtttttctatatcaatgaacgttttctttttttaaaaaaaaaaaaaaaaaattaggtgatgtggtttgttgatattcaaaataaaaatataaaatattaaaaaaattaaagatttaaatattattgattttattataatttatttattttgaatattttttttttgtaatatataataaataagtaaatagcttttaaacaaaaatagctttttttttaaaaaaaaaaagttgagctggctttagctttaaactgtagcttcttcataaatttttcaacaagttatttttttgactgtttacaaaacacttatttatcacaattttgtcaaaaagcaatttttagctatttcaaaagctataccaaatgggcgcttatttgtttgattccaaaagtggataatccttctaaatctagtgagtttaggcatgttagtctttgtaatgtgttctacaaaattattacaaaagctttgactaatagacactcacggagggagaatatgtaaattggggggggaggcaaaatgtagaacaattaatttttggggggacaaattgataaacttgtatataattttttttttcataattaatatatatgaaaatttataaaaacaaaacatttagggaaggctacagccccacgtactccccaagtggcttcgtcactgctaatagatgaaatgaagtgttaggtgatgttatctttgatgaacatagtacttttctttcgaatcgccttattgcaggaaatacacttattggtttttagtgtatgaatgctcttgaacgtcagcctagaataagcacatggagtcttgctattaaacacgacataaccaaggtctatgttagagtaaagttgtaacgccctaatctataggaacgccacgtgtgtgaatttataaaact

SEQ ID NO: 69013 - DNA, 831 bp, Cannabis sativa
agcctcagcctaattttcgactcaaaccaatacgagtgtaggcacacccactcattctgagaggaatctgccctctcatgctgtttgggaagcctaacctcaacccccgtcgggaaaccacacgacaaaaccagggagtcaagttcatgctgggtgagaactgacggacaacttgacttaacatccaaataagaactacccagcgcatgttttttcttttttgacttcttcaacaggggaatcgctagagtaaccccctcagacggggctgcttgaccactaacacacgcctcgcccccagagcgagagcggggaataacagagacactacccagatactcaacctctgagtcatcggggacttcaacattctcagcctccataggaggagtatcagagactaacaacgactcaacaaatccaggagcgatactcgaagagagagagtcagaaactgaaggagagacacttggacaatccgcatttgacattataccacagccaaacgacaatcgaaacccgaagcctacccacgagaaaagaggctaaccctgaaaaagaaactgccttttcaatctaatcataacagggaaaaggcaagaccgccaccctgagaacgccgtagaagggggagtgccaaagctaaataggcggaggagagaaagggggcctagaaatagggatcgtatcccaaatgccggaaagccctaagcatctcaatgataaggaaagtaagagaataagggggaagaaaggcaaagatctcaaaagaaaaagaggagggaagatagtgggaaagtgaaaattcaaaaatatacaaaataattaaaa

SEQ ID NO: 69014 - DNA, 961 bp, Cannabis sativa
aacccatgcattagtaaaatctgttactagtaatttaggagtttaaatttgacaaatgcttgtctatgatttttaagttctcctgtaagagataattcttaagtaatgaaaaaaaaaaaatcaatttgctaaattcaaaaatggaaatctgatgcaaactaacattctattgttaacatttaacattgacattacataaggttttctctctattctctttagagtttttctctaaaagttcttagtgctgcttattttttttcctaaccaggattattttcggccttacatcgtgactctggtcgagttttattgattctcacactactttaattttgttggaattgttgctattcttctacttaagtgttcttttcttctctatcttttctttagaggtatgtgtcgaagatatgagttgttcattgattcttgattggatctacactagtgttaatttttttagtgtgttattattatttgttaagtttatttctatttttaataatagtgttgctacactatgtacattgctatttttatggtgtagtatggctttattcattcatgatagagaattttagtcttatttttttttttggatattgggagaatctcaattagctcaaaatatgtttgtgttaatagcatgacttgtcaatgttcagatatgggagattctcaaatttttattgatctcatggtttatgatgcgattatttattacaattgttattgttatgattggtcgtttggttattttcttttattatatattaaataataggatttaggcatgtcaaaaagatccatttagttagatcgggcgggaccttcgatctaatagatcatttctgatccaaaatattcagatacttattggatctcagatcaaattcgctctgccctagctaattttttttctagatagaatatgatccgatctgaattcaatatatta

SEQ ID NO: 69015 - DNA, 871 bp, Cannabis sativa
  modified_base (48)..(75): a, c, t, g, unknown or other
tgtttatttcataatcgttttagatgttcatatttagggtgttaatcnnnnnnnnnnnnnnnnnnnnnnnnnnnntggtaaaataatttctaacagttatagtctaccttagtatacatgagttgtttattttttattcaatattatacgagtagtttaaatgagccatatacaactttagaagcaaacttaaacatactatgaataattcactttatgaactattttgtacattttttgattacttatacgaatagttaagccttctattcatattttaggttaagtattattttttcaaggcatctatgtgccttgtttataatacatgcctgaacaatgtgagctgttaaatattcaaatttgcatgtagctttatgttgttttatgagttaatttcatatacaactgcttcttcagtttttcttgattttatattgtccatagacaatttttatcaattatccttacttggaaaattattaaaatgggtgagtttgcaatatatcatgtacttctagattaattccagttgatatgcacatatatacatgtccctcaagtaattttaaagaagactttgtaattacatgaacaaaatttaactttattaacaacagaaatttacattttttcagagagaaatacaacatggacattaaaaatttactggtaatagggtcgcaaatgttcactgttccagtggttctttaatagtgagccattaagttgagccaatttataaacctcagttcctactactgtctcgataacataaggaccttcccagttgtgattaaacactccaatagatgcatctcgtgtgttttgcaaatactcgccataacaccaaatctccgacattgaagag

SEQ ID NO: 69016 - DNA, 1709 bp, Cannabis sativa
ctttctgttttgtccttttcgatatgaatgtgtagctaccaagttttaatgggttatgtaagattttcaatcagtttattaagactatttctttgtatattggttttaacaacataattggttgtataataatcaaattattacactatgtgattggttacacttacaaaaactttggttttaattatgatgcaattagtgaaaagcaaaaaaaaagtggtatttattgtctttctttctgttgtgtttttagcaaaagttttttgttatctaagaagactattgaataaacattcagggtagtggattgaaatgctgatgtttcatcaagtaccatgctttaattgattttttatgacatgggtaaatggaaacaagagcttgatttgatagaaccattgagaaaattgtgatataggaggaaaagaaatagggagttcatttattcttattgggattttgataggaaaagttttgagttttatgaaatgaaaataaataggaattttgttctaagcatattaaaagaacaacaagaagaagaaaagtggtttttattgtctttctgatgtgtttttagcaaaagatttttgttatctgagaagactattggataaacattcagggtagtggattgtaagcattttaagaagaagaaggaggaataatgcaaatagccgttaacactttcttcttcggttctaagcctaaggtaaagttcattataatcttttttgatttctactttgttttatgtcataaaacatcatacttgaaattttacagataacaagttccactcatcgaacggtaaatgccccaaatctcaattgcagaaaggcatgcacctcctcctcctcctcaagttatcatgaagtaagacttggaaattttgcaggaaaattatacccaaggcaagacttttttcttttcctttctaaatctctattcaaagagcactaacaatgtttgtatggttttccttaacacttcccttttatgttacaggacaagtcacaaatgttttccttccatttctgctgtgttatcaggttgaggtttatttatttccctttatcccaattaggtattacattttaagcaaaactaatgttcttctgttctgttctgtcaatacttaaaataggcgccaaagatgttgaggtttcttcttcttcttctcattccgagttgaatgatatatcagttactactgcttctgatgataccgagcctggagaattaaaggtgtgataacaatttgtttgagaaaatgaagatgtttttaacttgcccatatggttgattatatatgtttaatcaccacaaaaatatgtttaagcagataagcatagaagtttctggtaccaaaactcaagagattttcgatcaagttttcgacaagatggttgctcaagctcagccaatcccaggctttaggagagttaaaggaggtgagattctgatttatcttttctactcatacatgatggtgatgtttattatgttttttagttcctttcctttcccatttcgaaagagtctgacactttgtttcttactcttttggcaattgtaattgtatggatttccagggaagacacctaatgtaagtcttctttcttcaaaatcaaatcatctgctatggctatatccttgtttaacttagctttagttgtgttttttaccaataatatcagctccttaaa

SEQ ID NO: 69017 - DNA, 717 bp, Cannabis sativa
agagagagatttaaaacattagttttattaaaacattttttaatatatgtgtgatattattatactaatttatttgatttttaaaaaataatataatatattaaaaatataatatttaaatgaaataaataaaaaatagagaagctgatgtagtgcaagataaaataaaaaaagtgaaattttagttaaatattttaaagaatatagtagacaagctgatgagagtgctctcattgagccatatatagctaaaagaatagttatgaactattttagctcaccatttacctcacttgttggaggtgtaattttatctaattctttacacttttagctaatgagctatattttacatttttctattgggaatgcttttagtaactaccaaatcataacacgatatttctataggagtcttatattgacctcctttcttgtttgagtaaagggttcgactctcactcgacctctcaattgtgagagattatgttttgcccttgaagactgacttatgtgtggtggactatctttaggataggaaccctcatgaggtatatgaccgatgacccaagtaaagtaggataaagtaaaagactcctatagatagcacgtgatctccgaaattgacataagctgaagagattgggacgagatctgcattagggttgagcataaaatctagaaaactaaaaaaaccgttcaaaccgacataccgaa

SEQ ID NO: 69018 - DNA, 842 bp, Cannabis sativa
ttagttaagatatttaaagaagaatatagtaaataaccaaatgtgacagtgctcaccattaatattaacataattattgattagatataagttgaaggtaagaagagaatcataatcacacaagatcatacttccaaattgcataaaaacaataaccattgcaatatagaacattgatcttattaaaatattaattaggcaattggatatgaagcagacatggcaataccacattttccttgtgcaggaccagaatttctctgaattctcatgtaacctttctcaccccattgttctccccatgaatttttaatcacccaatatttggtcccatcttcagcttgaccatacccaacgatcaacacaacatggtccaatgttgtcccacagcttccagtgaagatcccacttgagtatagacgaaactctttcccctcagaattcacgaaagccgtgaccggttgtttggccaccgcctgaagcaatgcattctcgttattctctggcacatacttgtagtcactaattcgagctgcgatttgggatgccctttttcgatcgcaacttccgtcttttgctttatatgggtagttagattcagttgttatgcctccgttgcttatcaagtagtcaaaagcatcctccgggttaccaccgccgcagccacgagagtttggattttgtgtggcgcaatccaatagttgttgtactgagagtatatacgccttccctgttcgaatctttgttaggctctcaacagcttccgctgatgcgaatgcccaacaagatcctgcaaagtcatcaacatgtttatataaatatatatcataaagatgttataa

SEQ ID NO: 69019 - DNA, 702 bp, Cannabis sativa
acctactataaatagatattgtaacacgctttttagtcatattgtatgatcagattttagtaagaaatagagtgaaaaggagggatgtataaggaaatcaagtgtatttgatcttggttcttcattggtgaggttctttgtaattttttctcatccattctccattgtatccaagacactcttatattgatttcaacatcaataatgatctatgtttatctactcttggtgttaattttctattttgttcattaagttgctaattttatcatcacagtttgtgatcaaactatgcttgtgtttttggttcaattttaattgttgcattgtgttcttgatcaagttcttgagagtgattcattcactacatgatctaatactacgtaaacataaaaaaaataaaaaaaaaaggtttcacacatttttttggagggttacggagtcctcttaattaaacaatttctgccacggtataaagtcatattgcttaaaattatactacaaataactagtagacttttagatcgaccctaaattttagtgggtcataagaaaaaaaattgaatccttatttagaaagaaatgttacattttcaaaattaacaaaaaaaatgtgtatttttataagggattttttttagcccttaggtggggtaggctctaggcacaggcctagccgacctatactagggttgggcctaa

SEQ ID NO: 69020 - DNA, 1463 bp, Cannabis sativa
  modified_base (202)..(211): a, c, t, g, unknown or other
cttaagtgtctcaccgggctgctgctttatattggttagcgaggccgcttcgggtcgtctatccctagcagtctagaaccatttcttgaaatccctagacagctgctcccaagaagttattgaatgatgagtaaacttgttaaaccagatgctcgatgctccaacaagcgaggtggggaacaaaatgcagcgtaaattgttnnnnnnnnnnctcgctcgtattattgtgttaaagttattcaatgcgagaccggattagtggttccgtcatatgacgagacatgctgatttttgaatttcgaaggaaaaaaggtattcattatatctggatgatacggctcaagctcctcgtcagagtcatatccagattgtctccctaattcccccacttgatatctcctgaacttatcctccaactcgtttatccacaattggatgggatcctcttgctttggaccaagctgttggcgaaggttgggttttttctaattcaagtgatctcccagatccagtaaggagtcattgctagcagacctcgtctatctcgcagatcgcgtcctactcatagactttatctttgagtgactcgcggatgtactggttcccatactttctcgatcattagctcattgagtactttctcctcttcaagttgatcgactatgggttcttgaacgcctcgaggtcacacttgcctcttcacgctctgttctgtccccttgagagcggtttgtcgtatttcccccattagggtctgtacgagtcctcgctctatgggtttgggaagaacgctggtgatttctagcaggtgacctccgttctcccagttgagtcctaagatcctcctcattatcatgagggatttctcattcatcagtttccggttgtctcccatctggctattcattttaatttttagggggtatctcattttcctagggttgttcttcccgggcattatcctgtctcctggttcatgagctgcgaggtctatctcgtggtgttctcactccaggttcaggttgattttgagcattcgtcccttgtgccaccctagccgaggctgcgtcatgctctaattcaacgtttcaacactgtgcctcttccgaacagcgtctcagggggcggttttctgtttcataagtaccttctaccatagactgggcacctccacgattgagttcttcatccctcatcccagggtactgaccactcccacactgagttctcctcaagcgtgttgtccgcgtcctaggaccaacgtcgggttgggttctccgggaacgtgtggtccgtgcactggggccaccctcaggttgagtcctcctagaactggtggtccatctggaccgtgggttggtagaccacctggagcctatgggctctttcccaggatgatgattagttttctcatgtggggtgttaacattttctagattttcagccatgaaggaggtggtttt

SEQ ID NO: 69021 - DNA, 8397 bp, Cannabis sativa
  modified_base (6715)..(6717): a, c, t, g, unknown or other
aatatataactggatcgaatctaaatagggttaaaaacattgaatatggtctaataaacacccctaattatagtaattaaatatagaatctcagttgtgactcatgtttagcttaagaatgccaaatagcaataaaatagccacgtggttaatagcaatagaataggccattaaattaatcactagtaaagtcaaagtaaacaactgaggactccagatcacaaacacctagtaaactataatagccaaacctatatttatcaaatttaaatcataagaaagaaaaagaaaaaaaaaaagcacatgaatagccaaaaaaaaaaaaagactaatacctaacaatgagtttagatttagtgtataacataactcttatgcgtatgacttgtattatgctgcaatatcttatcaatgaagctatattaatcggtgagatttgtaatcactaactcactagaagcaaccctctcttcttaaatacgggtcagcaacatctaatctcttctgattgaattgagtcgattcaatctaattcaattactaaaatttagatatccaattataattgaattgaattagatgctaaaagttaaactctaattgaatttgattgataattggatatcaattttaaaatcatccaatcaaattatatttatatatattaaaaaattatttatataataaaaaaaatacaatatatgttattgaattcttttgtgtgtttgtaacacttgcttgttttgtgtattcattttcatgatgtttgttttattttattacttaacaatattatttttttaattattttaaacttttaattacataacacttataacgatagtatgtttatgtaatgttaaacttaaataaatagtaaaatttagttttacgtatttttctttatattttgaagttaatattaaaatttaagtattagatatttaattaaaaaactaatccaatccaattaataattagattggattggattttgaggtctaattgaattggataaattgataattttctaaattcaattactaattaaattagatcaaataaggaaaaaaaattagatgggatgcccaatcttactctcaagttcaactcataaagaagccaaacaaaagaaatttctcattagtaacattggtagagtagtttcatgttacatttcttctactactcatctaaattggggccaaaacggcaaccagggaacctcagcacagacattcgtgaacatagcttattatttgtgtatttctgtatttctatttcgctttgggctttgatcaccaacgacattggtttcagagtcgtgggaatcaaagataatgttgtcttgtcattattttaatcaagcaataaataaataatgccaaacgaaatcaatcccgtggatgttattaatgtctaaaacacaggactgtccattacatgtgcaatgcaagtatgatttaagaattcagcagtattatttaagatgaaaataaggttagttaaaattctgtgaacaattacaattgaaagcgacttcacatagcaaatagaaaacaaagtcagaaaatttgaagtataaagggtgaaaagtagattctcatcacgggcttacaaagtcagatgaacactaaatagtatattcgacacaggatataaactaaacaatacttatctaaaattgttttgattcaaaatgccaaacaaaaacagcaccaatcctgctatattcttaatttaaaataaacatacaattttctttaaataaaaataaataaaataaataaaaacgaaaagaaagagtaatggagcggatcaaggataaaggactcttagagcaggtaaacgagcagaggacaaacaagacaatactcgaaaccactcgcactaaaggaaaacagagttctctaactttagtagacgctttcaacttgcgtcgattctctctcaccttcagagcagtgatcacaagactttcctcacctgaatgttgtgagtagattgaaaccgccagatgggttgtctgccactttgaacaagtgccacctcttctccttccttaaccattccttggtcctgagcaatccagaaaatcaagatatgagcgatacacggcataaattactagaagattcagtggattgtctgtcacattataagttctatatggttatattattccttcaaattcttacccgaagtaaggacaaggctttcccaaatgtctcttcagcatcatccgagaactccaagtgtattggacacacaccctggtacaaagccaatctttgttgtattctcttactgcatggcaatcaaaattaagtagagggtcagtcaaattgtaagatccaatagattaaggagaatgtctcgtcgagagaatttatgcttatggcgtagaaaacttactcatttgtaaaggcaaatatggtgccagtaggtctataatggctcaatagaatagccatgaaaccacttcttgtaaagacaacaattgaggtgccgagagtgttagacatcatagttgcatggtaagcaaacatctcactcatatggttctgcagaataaaacaggtccagttagttatcagactcaacaatcaaatggaactcagaaataaattgaataggggagaaaggaagacttagacgaaagcattaaaggttaaagcatattatgactgaccttgaaagcttgaccaagattagctggcattgtaccacctggtatggttgcttcagtcctcaatgcaactgtgtgcataacttttgcagctttcaacgggaacctacatagaagtgagattacgatgcatgaggtataattatttttaccttaaagaatcaaaacaaaaaccaaagaaaaaaaaaaagatgcctgcaagctttgagcaactccaagatgacatgcatctgtgcaattgttgcttgctaacaatcttcaccaatcaaatattggcagtgtcaagcaaaatgtaaacattatagtaaaagtaggaacatactttccatgagcagtttccccggaaagcatgactgcatcagcaccctctcgaacagcaatagcaatgtctgacacctctgccctggttggtgttgggtgaacaatcatgctttcaagcatatttgttgcgacaatgacagctttccccatgctacggcagatcctgattatctcttcctaaaacaggagagaaggaaaaatcttaagaacgatcaaagcaactcataaagacgttaccaccacacatgttcactaatcagaactgatttcttttttacttctattaaaaactaggaaaatacctgtaaaagaggaacctcctcaataggaagctctgcacccagatctcctctagcaaccattgcctaaaaaaagagcagtacgtgatgccatttagtgcaaagtcttacaagtaacccgaatgttgagattacaatcactattctagacagactgattattagcaagcagataagagaaaattattgatcatattacttataaaaaattcaaaagctcaccccatcggatgcggtgatgatagaatgcaaatttgggatagagtctgcactttcaatttttacaataacatgtatatctgcattgcagcctgtgatataaaaaagaaaagagtaaaataaaaatctagtgtctgatcaacaagcattctacataaatatttagagcacacaatatacatgtaaccaaaggattctagcaaaagaaaataaaaaaagtaaccagactatttacttttcagataactcttcaattcatgaacaacttcttcagatttcacaaaggagacagcataaaaatcaacttggttgtcaactccaaatttgatatcttcccagtccttttctgcaatagacaagcttaaacacttagctcattttacaagcatgaagacatgatctccttgatttaaatataaagtaattaataaagataattatcagtaaaagaacaataatgaagaaaacatgaaaatatagaatcaaaggacattgaaaataatttaggatccaacctgtgatggaaggcaatgttgcactcttccctctaacattcaaatgtcttctagacttaagttctcctccatcaataacctcacattttactgaatcttttgttttggacctcaccaaaaatgacatcataccacctataacacaggagccaaagtcaatgatgaaacttaatgagatcatagcacgaaaaggtatggtgatatctctcaagagcgtaaaagatcaaatgataccagagtcaagacaagaatgtttcaggtgaagagcgtaaattgaaagtacacaatgttcactccaatattattatgaagcacagtacagagataataagagcttagaataccaaaaataaataaaataaaataaaaggcaaggtacaggacttaccatcaactaaaagcatgtcgcccactgctatatcgttaacaaaatcatcataattcacactaacacaatctgctgttccaactcctctctgaattgtgaaagtaaattcttgcccaggttctaagttaataggctgtggcaagtccccactcctaacctctggaccctgttattaatgacaagaaaaataaataaataaataaaccaacaaattgtactaatgtgagggtccacataacaattcttgattggtggagagtttttaaaaactaaatctaaataaaaccttgagtttttatgttttctatgttttcaaatcattgaatctaaaaattctcaaactgctctcttactttttcgtttggagattcccaaccagattcaattatttaaaaccccaaaacattaaataatactgtacaaccaatcacattttcaaagattaatttttacatacaaaattcaaaattttgattcaaaatcactcttttaaaaaaacccaatttttcaatcacaaaccaatcaacccctaaaaatacatggacaagaaatttatacaggcatgacagacatgcatattaaactatttctaatatgcattcaccaaaagcatcacacaatttgacccgtaaaatctaaagaaccaatacaaggaatacaagtgaaaattaaactagtactctgcaatttttttaataaaatccgagataaacaaaattcaccataaataatgtgatgtggtgcaataaaaagtaaagaaaatcttgcctttgtatcaagcatgattgcaatgacgttgtccttgttttgctcattatattccttaaccaaatcaataactttcttatgagaagcatggtctccatgagacatattcattcgagcaacgttcattcctgactcagccaacttccaaatcatctctttcgtattcgttgaaggtccaattgtacaaacaatcttagtcttgcgtgaaactgttggcttagaccacaaagccactgatgtatcaccaagctgttgtaactcatgcaattttccaattccctcctctacctaatacacattacaaaaacaaacaaaaaaaaaagacaaaaacctcatattttcccaaattttctcagcaaccaaacagaaccaaaaaaaaaaaaaatcaaaattcaaaaaaccttagacacgtccacaggagaaacgggaacaacttgagcttgtgcagatctcttggcactgatctggaatctcctgccataaacgacatcaccagacctcttcttctgaagattgaagaacaatttagatgcgaaactggaaggctttagcttgtcaaacagatcttgtcccgatccagtgctagggcatgcaaaggcgctctgaatcgaccgcgtggccaccacctgagccataatcgagagagagagagagagagagagagagagagtaatgtaggtgagaagagtaatgaaggaaatgagagagtgagtagttatagaaatgggaggcgttgcaggttatgtaagttttggtattcttttcttttgtttgaggttgaacaaatcgccctactcactcactcttctctacacttcttttttgggcggaggttttaaggagggctttgctttggttgtatcgaataaccaaagtactaacttacccctcttctctcctctaagtaacaattaatcattagttaattaagaaagcattactcctctctaccacatttttttttttttcatactactattggtctaattaaattattattagtgtaattaaaattaaaaataatttttaaagagtatcgctaatcaatcataaagagctactttaaaaaaaaatagatattattagtgtccaataacaatctctttaattaaataaataaaacttcacctgttttgtcaaagtagttgggacaaaatttgatttaccatacttttaattttgatcacgaaatatgaggttttttttttttttggaaagatcttgatttcaatgagaacaagaatgtaatcctttatcaataaaataaagagacatgtaactttaagtatcttttttacgtgttaatatcgttattggtgcaattaagtatgaaatcctatatagtttaatataataaattttatgaagtatcgttaaccaattgtaaagcgatctagaagatgctaagcattactaatgtttaagagaaatgctaaagggcaccagtggtgcttagcaccctcctatgtgtcaatatcgctattggtcaaactaagtatcgagtcccatataattnnntataatagcttttagggagtatcactaaccaatcgtaacacgacatatcgagaatgtgtaagacaccactagtgcctaataataatgctcaatgtttaataacaatgcgttaaaataaattagtaaatcattcttgaaaaaagtgagaacaagtgacaataagttctgatatagtacaatgtcccaagtcccaactatcattagtagttataactattaacaagtgtcgtactatcataaataataagtagagaagacaaattaagaaagttatttataaatctccaacaagaaaaaattttggaaggataagatgtgaaactaggagtttttgtagttagtggtgtaagttatagttttttttaaaaccaaaccgtttatatagtttttgtaattttttaaattgcaatcgcacctcaaaaatacggtgtggtacgatataatttaagcagtttacattatcactattatcaaacatttttatgaaaattttaaaatcaaactaataaaactttaacaatacaaaacaaaaaatcttatgaaagttttaacattataaactgcagaatatcatcaagtcattatattaaattgtctctaaaaataaaataatatacacttattatatggcggacccaggattgaattttaaggtagacttagttatacatttaatataatctaaaacaataaataactaactaaatttaagtgaaataatggtttagcagcatcctcttatactagtggtcataagtttgatcctagtttgaacattatacttcatttatttttaataaataaaatgtagatacacatagaaaataaggggcaagaaactttaaaacatggtctccaccctcctatgtaaatttaaagtatcttaatcaattgttctatttaactactatgtatatatgaaaataacaattgtatattaatatctttttaaatgggctttagccctccctcaatacccctaagtccgcctatgattatatatatatttgtttttatatgaaaaaaaaagaaataaaaatcatattttaaaaattgataactttgtaatatatagtgtggtgcgatttgaactgcaattgttaaattaaaacttgcacactgtaccgcaccacaaaaaattttaaactgcattttttatgtagtgtggtgcgataaaggtgatttgtgcaatatgaacaatttgatgaacacccctatgtagaactgttagacatcccaaacaaagaggccaacgcaacctccatgaaaccatctctcttgcacccaagcacaagaagccccacacccaaagcaagaagtcacatgcatgagatagtgttagaatttagtgaggtgtaattagggtacatgagttctatcacaaataaaaagaataacatctttatcttatatagatattatattttatatatggtatattattttcacaatataacataatgttgttggagtagaagaggaggcaagggaatagaaacacaacctacaaacataaagaccctcttgatcaaagccttacagagcctacagagtagagacaagcaaacaaagcctcagctcagccgccaagaaggattaaaaccaaaaaaagttgtacgatgtaaacgcaattacatatttgagagaggacaatttcttgttttattattgagtaaaata

SEQ ID NO: 69022 - DNA, 1589 bp, Cannabis sativa
gagaaccagttctatgttctcgttgtacctgccaagcttataggctcccttacttgttatctatgtaacttggtagaggccttcccatttaagtctaaacactccagctgcaggatctttggtttttagcaacactcttcatagcactaggtctcctttgaagaatttccttttcttgacttgtttgttgaagtgccttgtaacctttcgttggtaggcctacagctttaggttggcttggtctcttctttcttctactttgttaagggatcccaccaccaaggtgatgcttacctcttggtcataggttatcctcttgtgagacggtggcaccaactctacgggcaacattgtttcatagccataagctaaagcaaatggagtttttccggtggccatcttctcggtggtcctatgcgactaaagtacctctgggagtaattttggccaatttccttttgcctcttcaagatgctttttcaaagtttccttgagggtcttgttgatagcttctacctgtccattcttttgaggatgatcagcagcagagaagcttttgatgatgtcgtgtcttgcaaaaattagtgaacatgtcattgtcaaattgcttcccattatttgacacaatcttctgttgtagtccaaatcaacatatgttgttcttacaaacaaaattgaggactttcttagaagttattgtcaccaggggtttagcttctacccacttagtaaagttgtcaacagcactacagcatactgcaccccttcttttccctttacaagttgatcaatcaggtctattccccttatggcaaagggctaaggagaccgcatcatcatgagctcattaggtggagctctcaagatctttaagaatctttggcacttgtcacattttttgatatagtccaccgaatccttgatcatggttggccaaaagtacccctatcgggggtatctttttggataggctttgccccggcatgatatttgcagaagccttcatgcacttctatcaacaaatactcaatttttgtcttagtgacacaccttatgagcaacattaagaagccttgtctgtacattacttcgtctacgattagatacatagcagcttttcttctcatcttttttgcctcgcttttattttcgggcaaggctctagtttggaggtaagctgtaataggtgtcatctaggttagattatcattcaatatatcgacttcttcagggatgctaatgctatatattttcaagaactgtattggcaccaagttttccttgtcaccaatggtgttgcttgccagaagggcaagtgcttctgttgtcacattctcttctctagggatttgccttattttatagcctttgagccaacttagaaagtattggatctttctcaaataggctatcgttctttcaccttgaattatgtattcacccagggcttgatttacgactagctgagagtcgttgtatatgtctaggtggtcagcctgtacttcatgtgccagcttaaggctatcgatcagggcttcatattcagccttgttgttagaggctttgaagataaacttgattgtctcgtg

SEQ ID NO: 69023 - DNA, 1319 bp, Cannabis sativa
tgtacataccctatagctgtaagaacgagtcccggcaccttcagaatcagaacgaatactaatgtaatctatatcttgtcccctgtacgtttgctgccataactcccttataattttatttatttcctccattttcaatgtgtggaagcgcatgagtgccctgaaaatatagattaaagcattcatactcataaaaaaatcaataaaaacaagataaatgttcaagaattttacttgtcgagcgcattgtagtatcggtccagatccttgtttgccatctcacttgtctgtgatataagttccgttaataatacaactgtattaactgatcaaagaacagtaaaaatactaaagagttgttcttctaccttaagctgtattaactgatcaaagtaccgcttgtcaatgtccttgtactgcgaatgttttagatcgactttattctttgaaatattgctatcgtaaacagacatcgttcctcggcacctatttaactaccaccacaagacagaataataaacaaagggcttcatccatgccggtagaaggcaaatatatcataacaggttaaccgtttcagcacaattatcgagcgttatcagcaaaactaagaaatatattgaaagcttgcgttcaagaaatattatattctgcaggcaataaagtgtttgatggtttctaatagtttcgaagactcgtaattgattaagctgactttaccagtgaagaatatttaaacatacctctgaaagaagcctctctctttcccgcgagagctttacaagctcgctttcaaatgtggatatgccaccgacccttagtacgttcgcttctagtgattcaatctcacgggtaagttcatctacttcagcctttgtcttccggtaattcaagttatcctcaatattacgtcgtaatttatctctactcctgattacatctctatttctttccaactcagacaatatgtgttgtttcttagcctcacatttttgaagttctagttccgagaacgatagcttttcttgcagttccttcagcttctctcctttcttcaaatcgtgaaatctggttgaccaaaatcaatgattagaaaatcaatggcacgggaaaaaccagacatatcagattcacaaaacttactcttttattttaaaagcaactttctgtatcgaatcaacctcctgcgcataactcatcttttgcttagattgttcctcgtattcaagattgagtttagctttcagttcattgtactcgttgagtaatttatctttctcccttgatagaggaccaattgtttctttcaaatactggaa

SEQ ID NO: 69024 - DNA, 1043 bp, Cannabis sativa
  modified_base (27)..(30): a, c, t, g, unknown or other
  modified_base (930)..(934): a, c, t, g, unknown or other
actaatcagattgtaaagagttttatnnnnggcataaaacccaacaataacaagagggaagaaacaacttaagagttagagtcgtaaatacgggagtaatatcccgaattgttcaagtaaattttaaggataaaatttctataaggaggggaaggttgtaatatcctagaaacctaattataaattattaggatttaatatatattattggttaattaagtcgtaatgagtaggattatgatcctactaacttttttttttttgaatatgatcctactaacttaatttagcataaattataaattttgctataagtggataaataattgtaatttattaattacggagatttatttgaaataagtgaatataatatgagttatatgtgaaataattttttttcaagtttagcatccctagagacccgattggaggccaaaattgtcacaacaattttagttagaaatattaatgaaattattgaaataagttgattttagaaatatcacagtattttggggtactcagagttgaccaaataccctaaaattaaagatttcatagtagctaaaaaatgataagataattattaataataaaatttttattaatattattatataattattattatcacagttatattattattattattattattattaaaacttatagtcagataagtttatttatatatatatgttttaagtttataaacaaaatagtacgaacaaaccctccgtcctccgtcgaatgaaacccacatcgccttctatccattttctttgattttccacccgtaatctagcgatctaagctctggtagtagcgggatagcaaatccttaaagacggaaagtttaaaatatggtttaattttgttctaagttaaaaataattagttttatatagtggctttgtgatttannnnngttatggagattttgacttcgtagaattgttctttggtagctatgggactagttttggtggttacttgttgaatttgaggtgattttgagttagaaatcgagtttggaa

SEQ ID NO: 69025 - DNA, 978 bp, Cannabis sativa
aactgcatcacaaacatcaatgaaatattatacatatatatttttttaggctactactacgttaatcaacaaagtggctaccacattagagcattagcataagcagcagtaacattaatttaattctctattaataaaactaactataatataatgaaaatactagagggacatagacaacaacacctctctaataacaaacctcaagttaatgaactgagagattttgttctcaacaactttatttagtaattcaaacaaagtgtctcagatacataatcttaacacatagtaaaaccaaaattttaaaaattaaaggaaaatcctcacagaccatattcaaacttcaactcaaacctcaacaaatacatcaaatgcaaacttcaactaaactttttatatataaacaccttctacattgcactatatagaagttgtctatttgtataaatttatataaatatatattactagtttgacttatatttctcagcttcattagcacatatgaggacccagttattgttttgtgtgcttttattacagtatgatacattttctcctttcaaatcttggcatcaaaacaaaataaagacaccatatgaatcaaggttgttttatctattgtatgaggagatcaaaatgtagggttatgaatataaagccattgacatcataataaacaccaaatcaaaaactccccaataaatcagaaacacaattagggacaaagcaaaactctcaaatcaacctttgataataacacacacaaataacattcaatttttcaattctcataagatattcaaacttaaagactgatagcaaaagactgcgttgagtggggaattgagagatcgaggtggcgcgagtcaactggattcgctgagttatagcatcacaccagttgccataatgctgttgagggtcttgtgaggaaagaaggcagggtaactactctaccgttttctcccaatg

SEQ ID NO: 69026 - DNA, 979 bp, Cannabis sativa
  modified_base (26)..(29): a, c, t, g, unknown or other
tacatattattagtttattacacatnnnnaatctatatattatattattataaataatataacaattataatgtcaatatggctagttttattttgtacggtgaatgttggctatttttttacggttaatgtagctagttttggttttataaggccaatatgactagttttggttttgtaagaccagtatggttagttttaattttgtaaggtcagtaaaccctagttttagttttttgagtgattttagaatgacatgttactgatattttttttaaataaaaaattagagaattaaagataaaaaaaactagagttatttaagtgattttaaaatgtcacatcaccgtctcatatcacttttatatatatatatatatataaatatatagatatgatgtataataaaaaaataaagtaaaatttattttgaaccctttattttgttaaatgataaaatgaaccctgcatttttaaaatggtataaataaaaccttaaactgattttttgtcaaaataaaacttaataataatctaacctagaggtgttatgataaaattggttaaatttttctgcatctattcgtgttaagaattatcttcaagttggttatattaaaaaaaaattgtcgaaaattgagctcagaatcttatttgtatcatttgaaaaagtataagatctattttatcatttaacaaacagaaggtccattttgttatttctataaaatacaaaatctaaaataatatttatccaacaaaataatttactttgaccacaagtattaatcaataaattatgttaagctaactaacagccattatttaatatataattaaactaaataacagccataaatagcttaatctgaccacaagtatttattaataaattattccagtagaattaaaaaatatataattataaattaagcatcatccttaatcttcatcatcttgtagtaccatagtaataaaa

SEQ ID NO: 69027 - DNA, 535 bp, Cannabis sativa
aaaaaaaaaaaaaaaacacctttaccctttagagaattgaatttgtgttttgtttactgttgtctgatcatatggtgatagtatattatgttttaccttgataaacaaataaaccttctttattaattgcatgtggttcaatagacaacatgtgacaatgccacaatcactatctttctctctaaaaaaaaaataaaataaaatctccccatcaaattaacataacgacaattaaagtggagatggtacaacagatcctccagatttttcccacatccattttcatctttatcgttttactaatagataagaaagaatcaactagatatagtcggtcttcatcataaacaacatgtcgtttattataaattttactgtagcgataagagcgagagattgaaaataacacgtgtcttaataataatttcacagctttcgtttttactatctagaatgaccaaattcaaatatcatacgtgtcattattgcatagctccttcgatccacgttggacacgtagaccccatgaccatga

SEQ ID NO: 69028 - DNA, 804 bp, Cannabis sativa
tacatcttggtggtgccgggatgtagggaatatggagtggtatgagcttcttcgagaatttcatttctaagttctgcactacaaggaacagaaaccctagtcttgaataacaggatcccactatctgacgctgtaaagtctttagtttgaccagatgaaacttcttctctgatctttactaactctggatcagttagctgagcaactttaatacgttctaacagatcagactgcaatgtcaagttatgaagtttgcctacaacaaactcgatacttgatttgattatgtctttagccaactgaggtgagatctgaaccatactagcaacctgtccgggaccttttctgctcagggcatcaaccactacattggccttcccaggatggtaaaggatctcacaatcgtaatctttaaccaactctagccaatgtctatgcctcatattcaaatctttctaagtaaagaaatatttgaggcctttatggccagtataaatttcacacttctctctgtagagataatgtcgccatatcttcaaaacaaacactactgcggcaagttctaggtcatgagttgggtacagatgttcgtaatccttcaactgacgagaggcataggctctaacccgatcagcctgcatcagtacgcaccccagaccctgtctggatgcatcacaataaactacgaatttctccttgtcagaatgtagggctaacactgaagctgtgattaatctctgttttagctcccgaaaacttgcttcacacttatctgtccatacaaaacgctgattctttttagta

SEQ ID NO: 69029 - DNA, 1007 bp, Cannabis sativa
cccgaagtcaatagggtgtttcatcttgttactcaagaagagcatcaaagaggaactggaactaactcgaacaatgccaattctgccatggcatttgcgtttcaaggtgataaaaagggcaaccagaaggatgacaatcaatccatgaaatctcatcctcctaggagaaatcgactattttgcacccactgcaatatattggggacatactgtcgaaaaatgctacaaaatccacagatatcctcctggattcaacaagcagaacaagaacaaggaagtcgctgcaaatcaaattcaatctggggaagagagcaactcgactaccagtgacaatcatgcgattctccctcaattgtccacgactcaataccagcagctgcttaacttgcttgcttcacagcagaatggtatgaacgttaatgaccgtagtacttccacgaaaaatacaagtatgatactatcacataattctagctctcctctacataattcttggattgtggacacaggagctactaggcatatttgttcaaatatgaaactttttcaatatatgtgtaagataccctcaattaaactcatactccctaaccatgattgtttgattgtgaatcaaagtggatctgtcaaattagaaaatgaaatggtcttaactgatgtactatatgctcccacattcaagtgcaatatcatatccgtaagctatctcattaacaaatctgccatttctgttctttttacctctgatggattcactatgcaggaaaaagtcagcaagaggatgattggaagcgacagtaatgtcaaagatctctacattcttgacaatacaccaaactccagtcaaattctgtctgttgctgctgagaattggcactagcgtcttggacatttatctcacaaacgattgaatctcctcaaagaggttttgaactataaagtttctgatttacacaaagaaataccatgttatgttggtcctgttgttaaatagagaaaacttcctt

SEQ ID NO: 69030 - DNA, 750 bp, Cannabis sativa
  modified_base (117)..(118): a, c, t, g, unknown or other
cattatgttatataaccggttctactttagttataaccagtttgagttatttcgtgttatttgtttttattcattatactattgttatagatctggttctaatttaattataattannttgagttattttgttttatttatttttattcattatgttatagaaccgtttatatttcaattataatcagtttgagttattttgtgttatttattttcattaattatattatagaaccggttctatttttatttatatttgagatatctacttcttgtgactttttccggcaacgatgactttttcggcaactgtgacttttccggtgacttttctggggacactaactttcctgtgatttttctggcaccggtgacttttctaatgacttttctgacgtcgttgactttttcgacgacttttccggtgccgacgacttttttcggcaaaatttattattgtttacaaatatgggatttccatcttttttacaaaaatatggcataaaaaaagcccatataaatgtaaaaaaacaaaaaaatcataaccccttagcattatttatttatgccataaaaaagtacacttttataattttcccatatgtagtgtaattaatccttttgaaattgtaaagagaaaaaggaaattgatatttctctcaattgttcttgctcatgtgttgagaactcaataagaacaaaggttatacactttatcctaatagcccacactattccttgtgtggtgga

SEQ ID NO: 69031 - DNA, 853 bp, Cannabis sativa
ttgatgaaggctcaaagtggaacaaagcgatgtttgctaagtatatatgggctataaatcatcaacctgagactttatgggttagatggattaaccatgtttacttaaagggccaagggttttggcaataccaacttaagggtgacacaagtgggtattatgttgcatccgagacttattcacctagtaggaggtaaaggatgctggctggacggagaaattcagtattagtttgatgtataagtgtttttgtaccaaggaaagattcaagtttcaaaggtttgtctgaaacaggattgcagtgccaaagcaccatttcatttgctggcatggttgtgaattataggctgcttactcatgatcaccttcagcgagttatgcagcttgagaatgggttgtgcctgatctatagtgaggctgatgagaatattggtcacttgtttttcacttatatatactctcagcaggtgttacttcgggttaacaatttgtagctggccggtttggctttgtttggttgtgagctgtttggtaattaataaagtttttctttcttgataaaaaaaaataataatattgctaattaatgaaacagagcaaaaattatgaaaataaatacacacaaaataattaaatattacaaattcaataaaaaaatattattagtttttttttaatattttttattatatataaataattttttttactatatattaaatgtaattggactggatcggtttttaattagattttgagattgacattcaataatcgatccaatccaattagaatctaaactttgacatcagttcagtttaatagaattggattggatggtatcaacccctaa

SEQ ID NO: 69032 - DNA, 1000 bp, Cannabis sativa
  modified_base (328)..(330): a, c, t, g, unknown or other
cattaatgattcggcgcatttaatcggtgtgtcagaaaagtactcaagcatttttaaccgccctgatgagcatttatcccaaccgttggatctgtagaatacaaatcgattatgattcccaccgtatgatgacgcctgatcccagctgccttgcacccgttctggcctataaaagccagcctttttccttcactgggttactttcaccactttgccatttcacctcaagaacactttcgagagaaaattctagagacaatagatttgttactactatttctccgtcgccgtcaatccgcattctaccgtcgatcaacaccaacccccnnntctcaaccttcatgtaagttttctgggcactttatgtttttgttgttcattttcatgctagggtttggttaagtgcttgatttttgggaaatggctttggcaaagactgtcgtgtggtgtacctaccctctcttatttatgttttgttaatctcttttttttttctgcaatcgacccctctatcgaaagattacttaacatatgggacagttttcgttcccacattctgcgtctttcactttccctatgctttcgctgcttttgagatatttgcacccgatgtttgcttagaaaaatcctttgaatttccatctttggcaaacattcggagggggcctctttccagtggttaggggacccccattccctcttttaacactagggtttggttcgggggctaactgctggatttttccttttacggaaccaaatgtctacttctgcatctggaaccaaatcttcccacaagggggcagttactctggctaccctggaggaagtgatgaagggtcctgtcgtccacaagaactatacttgccgatccaatggttgggaggcggatgagcttcgctcaaccttgacctgtgcccaccagttggaaaagatcgtgactgtggctgacatcaagccgtccgcttttggggtttttcaccgcttgcctcgagacgaa

SEQ ID NO: 69033 - DNA, 673 bp, Cannabis sativa
ccctggctgaccaatagactttccttggccagccacacatgttggtatagctctttgatggctcgtttcactctttttgctttctgcttgacgattttgcccccaagtccctatttgaacatttggtcggatagggactttttagctccaatcttatttgtagtagtctttgtcaagcagccttgtctagccaagtgtttgctttttgcatggcatgcttttgaacctttgatcttgtctctacgtacgcttcatcttctcctcttggatatctcttctttgcacatgtcattaataagttttgaagctttctaagcttttagaaacttttttgttctcatgtttgattgtaatctgtttggtatatattttgatccacatgacagttttagaatgtacaatgtgtgatttcgtgatggaaaagattcaattttggcctttgttgtgattcttgactctttaagtcataaagaacacgaggcacacatttgagtttacaaaaaacacacatttggattcagaactacccttggccggtcttacaggtcgtgcttgagacctggtcagtcctaagacttaatcatgggagttttccagatctagggtttcaccctataaagctatccagttcacgcctgggtttgctgatcctggccggttcttggctgagtca

SEQ ID NO: 69034 - DNA, 540 bp, Cannabis sativa
gtatggccgatttttgagatgatgaagttctaggaaccaaaatctaactggtttctgaaaatcatgtcatgccgctgtttcgtcggttttgagttccaggtaaaattattttccttgcagttggcttgtgctaaacatccatgttctccacatttaagtgttaaaatatatgaaacaaattgatgttgttcatgtaaggtctgaaatttttagtaagtttgtttttagagttcattcagagcacaaaaatacatggttgtaagttaatggcattgtcccaacacttgcatgataagatcggacgactgtgccaccagcctagaacgatgaatgactctaccaccagcccgggatgaagtagaactctgcaactcttattacctaagctttaatttgatttggagttatatgtacacctaaaatataaaatgaaattacctaagttttcatctgctaatctgctaatctggagatatccagcactctagtgactatttgtaatgctttagaagtctaactttttattacatttatgaacct

SEQ ID NO: 69035 - DNA, 612 bp, Cannabis sativa
tgcgggtccaggtctaggtctgggtctgggttcaggttcgagtcttggtttaggttcgggtcttgagtatgggtccagatcacgtgtcctgagtttcggtccgggtcacgtgtcctaataagtttgggtccaggttcgggtcctaagtcctagtctgagtctcaggttcgggttcgagcctcaggtctaggttcgggtcttggctcctaggtccaagttcaggtccaggtctggatccgtgtccgggtccaggtccaggtctgggtctcagggctgggtccaggtccaggtctgggtctcggggttgggtccgagttcgagtccgggtacggggtccaagttcgggttcgagtctaggtgtggatctaggtctaggtcttgggtcccgagtctcgagtctgggtcctaggtctgggtttgggttttggtctcgtggctaggtcctaggtctaagtcctggttccaatctcgatcttggtcatggtctcaagtctgggtctgagtctcgagtcttggtcccagtttgagttcgcgtccgggctcgggtcccaggtctaggttccacgtttaggtctaagtttaggtccgggtctaagtttgggtctaggtttg

SEQ ID NO: 69036 - DNA, 2686 bp, Cannabis sativa
accatatttaatttttaaaattaactttcaaaatattcagataattaattgtggcagaaaccttgatagaaggtttcacctatataaatgtaggatctcggtcccccagctcagtactcattatgtgaaacatagtaaatccacctaaagagagtagagagagcgttgaagcccgaagttcaaagaatcaataactaaaggtatttcgatcctataattatattgtgtttatttatgtttatttaactctacatttcatatacatcatatgtaaaacatattcgtataaaatttctaacagtttcatattttagcttaggtagctcttgttctttttggcacaaatgagtgctttgtagtagttatccaccgggagtaagagtaatattcaagttttgtacacatccaaactcttgagattggcaattgattgataaattgtatatcaaaatcattgtgtaaaagatatgaaataataccactataatgtataaaaacctttacatttcaccaacactttcaatccattctctgtgatcaatctttgtctctaatatcaaaagtcttgtccttttctttggtcacatgtatcttcattaggaaaatttaaaatttccctattcagaacattaattttaattgaaacccaagatttaaaaataaaaacccaatagggcccatacaagtggcatgatacccaagattcatgagcccatgactggtctaattctacaaacacacttctaaggcaaccaaaattgaagcataggacaagtggccatatagttatcagatccttgtaggagactcctaaaataaagggcttgagtttacttaatagacaaaggggtatctcaaaatgggataaaagacaaaaaaattaataaccctcacaaagttcaagtacatagatagtaaaaataaccctacaatttggcttgagtcataaggaattcaatatgaagtaagggcatgtttggaagtgtgagaagcacagctgattggtggaatggctccttgtgttataagattaaaatgggaaagatttgaaaaagacaccacaccaagagaaaaaatgtaataaacatgattggccaccaaagactaaaaaatttgtaaaaaaaaaatgcccctactaaaatagtgaccttataacttcaccctttgtgtaagcaaaataaaacacctcaatacaaacaaaagccattatttttttaattcttcttctcattcttcttgtattattattattattattaataatattagtatcttcttcttcttctattttccatagcacattcacctacatgagagccacatccatttgtccaaatggggtggctccaatccctcttctctccattgaggaagctctggtttcgtctccactctgctccaaagaaaagtaataataattattttttatagtatatgcaatgttattataaatgctagtttcaaacttatttccatcttctttcttcaatgttgttcttcattcattctaaaaccaattttacagataaataatttgtctacattttcttcttcttcctttttctaacattacattccttgtcatataataaacttttgatgatttaggaagagggatttatattctatacgaagatgtgaagtcgtgcccctatgaagatgttcatgttttatggtcgatactagtggaatcacatgctctgccgacaaaagcttgaagccttcaaatgcagagattctctggccatccatcatgtacatacatttatttatatatctcttattatatataaatatatacataaacatattatataatatataaaaaggtttttgtgattattttttcaatgactacttctctttgagttctcttgtgattgttggtgaggtttgttttttaatcttacactttcacatgatcaaatgttgagatgaaacttcagttaccaaaagcaaagaagaaaggcattatacatttggttttaattatattaaaaatatagcttcttatttgttgttctgtctatttttagctgttgtgctggctttttatgccatttgacttagtgaatgagacttgtgtgtgggtctcattctttttagcaaattaaccgatctcatctttgtatatatgttcctacttttttaagaaacggaaaaactcaatttaaatccatcaaaacagacaaatatgaactcttatcattttgtaagtatatattttagtgatttaatttgatgagtgttgactaaatggggatttaagaatttttttattttactaatatttggtaaatgtgattaataatctacacttgaagagttgaagatgtgtaaccatatagtgagagtgagagagatggagaaaaatgttgaaatagacatgtgaatggtagagaatggataggacaacctacatgactatcatgccttgaatatattttatttaaatttggctctataataataaattagtaatgatgacgtggcctgttgtgagtattttagagtttggttgtccaaaagaaatggaggtgtgattaaacaaattagaatttcatgggtaacaatcatgtccacattaattaggcaaatacaaatgagtggaacttaattaacatactccaaccaatatatatacattctatataaaatttgttaatgtaagtattttttaattttt

SEQ ID NO: 69037 - DNA, 1274 bp, Cannabis sativa
agctttaaaagacggtttataactgttgggaattttccaacagttataaactgttagaaaaaatgattttaaatgactatttataattgttggtaaagatattatctagattaaaaaaaatacatttaatctaatttattatatatgaataattatctaattacaataataatataaataaattttaaaaaaataattatagaaataaaaataataaaaattcgcagacaatttcttgattcacaaacaacaaattcaactcaaacaaatacactaaataataaataaattatacccaaaagaattacactcaaatgaatattcatagattttattagtttcaaaatgaaatccaagagaaacccagaacactaagaacaatgacttgcccaaattcccctgtttttggcgggcacctcacttccgaacatgtttgatgccatcatgctcaacgtgttgctggacagccctatcaacaaatctagaaacgacatcgtctcgttcaccaaatgggcatcattacttgagggtagaccagtagttgtactggaataggggcgtcgcactcatccacgcctcgagacagttcttcgtcgcaatcgtactggaacaagagcacaacacctcgaggaatttctccgctgcagtcgtccggttgatgtttgaggtagaggattcgaggttcaaattggggggcacaacacctcaagttttcctcttgagattcttagatgagaccccgactgccgcttgatttatttgtaccggagtcgaatcggggggcagtggagacaccaaatgattgtggaggcggctttggatgatggcgatggtggtctgtggaggcagattgggtgaagaggaaagagaggaagaagaggggcggaaggaagaagaagatgaaataggatttgggttagggtttcttatttttcttttatacccaaagttaaatttatttaccaaaatatttaaattaaatctgattattttattttctcaaaaaaaaaaaaaaaactgattattttattaattatacctaatttaattttacccccaattaaatttttttagaaaaattccttaaaatatatatatactttttagaaaaaatttatttacaccccaaaaacaaaacttataaagacatctcattttaacaatttttattttatataaaatatatatcttttttatacgtttttttttttacttttttcttccaatttatattcttaaaaaatatacttaacaaaaaaaaaaaaattatattt

SEQ ID NO: 69038 - DNA, 630 bp, Cannabis sativa
cgaactgtcgcggtgttcccgagcccacgacagttccaagctaggattttcatggcgaccttggagacttttccgggcaagtctccatagccccaaaatgaaaatcatgtccatttaacaccgccgagtcctttgggctttcttcaatttcagttatcgtacaggtagaaccttgtctcccaggtttatcaacaacgacaaaatgattatctagatttacctggagttcgaagtcccttccatcccagtgagtagccgaattgaacttgccactcaatctcgaatcggccttttttcctctcttgaatgatgtcgaagtggcggccaagggagaatgcgatttcgggggtctcccccttcttttgcgactgcccagatcaccatggcttgactgaacctttccttttccccgccctttcttggtttgagacttcgaatcttcattgagaccaggtgaaaaactcccttcgtttaggactacttctaagtttaacgcctgggttgtatttgcagtataagagccaatgtcatctgtttggatttgcccagtagaccccttctcagtggagatgttcactttaggcggagtgggaagtgggttgggctgagacaaaggtccaattactatgc

SEQ ID NO: 69039 - DNA, 1128 bp, Cannabis sativa
caaacaaacacattttcactactctttctcaccatacttttagtttaaaagcataaaaaataactctataccatagagttatcaactttgtttccatacctgtcaaatatgaatggaaaccattcttgtgtggtcattgtaaggtatgggtcatgagaccaatgattgcaggaagaaagaaagtaaaaagtagaaatggttcgtgaagactgataaaaggaaaacagaggtcgaccttgacaagaataagaagaaaattgatgaagttggcttccaacaagttaccaaggggtacaaaacaacaatgactatttctcaagatagaatgataactgacaatacctttcaagccttgacatagataattgaaggaagtagcacactgctttctgcagtagtggaaaaaataagaggggagggagtgtcccctcttcctaatggataatattttatcttggaacgtccgaggaatctacaaatatgagaagcaaaatgcagtcgagcttatgactgcaaaacaaaagattggtttggttggtctccttgagactagagttaaggaccataatattggtgccttatttgttaagatattttctggtgggtgttttactagtaacatagcatggcataaaggtggtcgtattatggttgcttggaatccattgatgttcgttactgatattttgtattattccagccaaatgattcatatgaaagtagtaacaagcgataacaggaagcaattttatgtgacttttgtatatggttttaacaatgaagaagaaagaaagattctctagaaggatttgtgtatgctgaatggaaaggatccttggattgtgtttagggatttgaatgatatcctttcaaaggaagaacgaataggtgctagagtaaagtttaattcctcaacagattttcccaatcgttttgcagcctgtcaattggaggatataaaatatggtggaaatttcttcacattgtctaataaacaacaaggagaagacagaatatactcaaaaattgacagaatacttgcaatcaagcctggtttgatgtgtttctagatgttgaagtcttgttcttgaatgaaggaacttttgatcacttcctggtttgctaacg

SEQ ID NO: 69040 - DNA, 706 bp, Cannabis sativa
gttaaaagagagggaccagccattgcacatttgatgttcgccgatgacattatactgtttggcaaagcatcagtgaaggaggcgaaaagcttccttaagtgttttgaagactattgcgcctggtctggacaagtagttaattaccaaaaatccactgtccacttcacccaaggtgtccatagcaagaaggcagaggagatcatgagtattctggggatgaaaaggatgaatagagattctttgtatctcagattgcctttatttagatcagtgaagagagctaaggatttaaacttccttgtggacaaagttatgcaacgagtaaaaagctggaaaacaaggttattatccaaggcgggaagagcgtgtctcatacaatcggtaggcttttccatcgctacgtatgtagctgcctctgatataattcctaagaaaatagcaagaagagttgacaaagaactgcgggacttctggtggggagattcggagaataaaaagacttggcatactattgattggagttcactatgtcaatcaaaactacagggtggtctcgggtttagaagaattgaaactattaatacaacttttatccttaaatggggatggaaggctcttacggataaggatagcttgtgggggaccattattcaaactaaatatctcaatggaagatgtttcctagatgctgaaatgaaggaggggg

SEQ ID NO: 69041 - DNA, 826 bp, Cannabis sativa
tctagtttatgaatttctactaagctatggcttaattaagagactttattaagtttaattaataaatatatgggttaattgcggcaaaacccccaaaattttcattttacttgcacttaaactccagtactcaatttttggcggtaaaacctccaatactcgtgttttgttagcaatttaatatttccattttaggtgctaagtgccaagtgtaattgtccacgtgtttatctacatggacacaatatacacatggcacaacttaattggtctatgtaaaaaattatttaaaaaaattaaaacataattaatttaaaaattttaaaaattgtaaattataaaaaaaaaaaaaaaacagtttgtttaatcttttctcttcttgctttttctttttctttttcttcttcttcttataaaataccctaaaattaaccaccctaattcttcctctctcctaataacaaagatcaaaactcttcaccacacaattaaccactgcaccaccactcataccatcattatcaccactggaccaccactcacaccaccattatcaccaacacagtcgaccacaaccattatcacatctaccaaactaaaaaaatgtaccgatctaaatttaaaaaaatatttaactacagtgtttatttcttttgcatcttcagaaattgtggtgatgggaaagacacaagtccggcgacgatgatgatgacggcatgggagctcagtttatctctttttcacacattccccctctctttctttcttcttcgcagatctgtagatcgatagtgggcagtgacaaataacacagatcgagggttgg

SEQ ID NO: 69042 - DNA, 2593 bp, Cannabis sativa
taaaagtcataaaatcacaaaacggaggttaaaagggagaaccgtttcagagatttgatggataatttcttcaggctcttggcctgctcgttgaatgtctcgtaaaacccgtttcacaaggtcaaagtgaactccaccagtgacagatacacgaagatctaggaaccggcgcaatttttcacttaaggcatatatgccctctattatcacaatacgggagctagggacttcaactgtcctgatagaagcataaaagttataaatatataagaaaatgtaaggatagtcagaagagcttgtgaactgcccacaatgtttgcataaaaaaggacatgatcaccatattcatatgatttgcattacgaaatacaaaatctataggctcccttgacatttattttgacccaataaggttgcacttcatgctctttctaatttcctccttaataatacaagtttgcacatcttactgaaaaagttccagtgacacattacctgtaacctgtacgagagctagtcttgaaatcatatattggaacctgcacaggtttccctgctcgtaagccatgtatattttcaagcaatgtgtcataatcggtgaggcgtggatctatttgaaaacattaagataattagaactctgccctcaacattgcaataaaaaatgaataactgatatgatgatagataacaacatcacaaaaaaaaaagtgacattttaaattatcgcaaggaagagaacaaatatgggcagaagatgcaagcacagtcagcatcagaagtagagaaaacatattaacgatgaaaactgaaacatttttttttattattagtattatttgatagaatgaaaacttaaactagactcatgctgagaatagcagaaaatggtgcaacctttaacatggaacttaacatattaactagaactgacaatttagcttggactcctaatatatacatatgcaaaacattgacttgatcaaaaaaagaaaaagcatcgtagtttttatatcatactctcctctctgtagtagtgttggctaatcattgttgtaactccatatataatttaatgctaggcgattgcacgagaacaaaggactcacagaaccagtaaaggagctttaacatcatctagacataatcatcaccatattggtgttcagaaagctaaatgatggaaggaagatttaaaaggctggcataccaagaaaatttaagagttagttggaggatcttcctagtttatatttccttgcagaaaaaaagaagaaattttaccatcaaagttgccatcaattatgcgactagcatcattgtagttgtccattgtaatgacagcaatgctgggcataaagtgcagaaccttctctgtaaaaacagtcttgccagctccagaggggcctgctactccaactaatgttatcccctcattcttttgagctaacaactgacatgcacgaatcactataaagaaacctttctcaaaggatagtgtatcttgaataggcacaatctcataacggtcagtatccttctttttcacaagctggacctgatctcgcaggagaccagaacgtcgccgaggtgaatcagcaccataagtgtcttgagccatctgaagctagttttctagtttcccccttatatctgatgagatgtaaacattcaggtattgtttaggttgaaaaagataagccaaatgacatttctgaatcggtagatatatgtaagtaaatggttatgttgaagtacataatcaaacatcagtatgaagcaattttttacttttatatttatgtaagaagaaatgcatccagtagggaaatgtaaactaacaacaactgttacaaaaagcaaccattgcaagattccttgttgacacttgacattttacagtaactaactaacacatcaaatcaactctcagaatttaccgtattaaggtgtgagctataatggttgtaacttgtaagcaacagcaagtattgtcagcccaacctctcttcactagtaatccatagtttttcctaaggaaggattggttactgctcaagtaaactcacagaagaacaaagctagaataagcaccccctagtaaatatgctgtatttagtggagattcacagctaaagagtattttgaatcaagctcaaactgaaagtatccatccaacaagtttgtgaagaggcaagaatcagcattttcaaacaccacagcaaatcagtccttacaagcatatgcaatcaccattttcaatttaggaatccaattactaattatatgatgaacagaagtttagaacttggaatcaaataattcaaattattcagacaaattaatagtaaaaaagaaatccagatacccaaaacccgagcattgccaatatcaataaggcctaagagcttttaccgaaattctattatatttgtctaacttcctaatgaagacaattctactaatcatccttggctttttctttgcaagagcagcttgatgatgtacatgccatttcttcctaaagaatgggaaaagagcactatatctattatctctgcgtatgacaaagtgaaaaagaaaaaacaaaatg

SEQ ID NO: 69043 - DNA, 908 bp, Cannabis sativa
ttagcattagggcgttacaattcccatccgcaatcataatgcccccttcctccacacaaatatttcgcacctctaaaagacttttccagcatctcgaatcagtcccttttttttcaacagtccaaatcgaacagatatgacaatacttatctttaagcattttaacccagtcctttccttcatcttttagcatcatccaaaagagttttgcaataagagctcgattcatatctgcaaagcgcctgaaacccaggcctccacacttcttaggctggcaaagatcaggccagcttttaagcgcacaataccgcttcttttcaacattcccattccaccaaaatcttgcaaccaagcgatccaactcatcacaaagagccttagggattaaaggagtagacatgaagtaatttggaatattttgtagaaccgaatgtaccaaaactgttctgcccacttgcgataggtgccttgccttccaaccttcgagtctatttaaaattttctccttgaggaagagataatcatctctccttctagccgagaaaaggaagtggtttccaagatgtttctcccttcgatccaggcaattaaacccaattttactcttaatctcatcacggcatcgttgagacaagttcggagagaagataactccacttttggttgtgctaactctttggccagaccacaattcatacttctgaatgcacctcataagaatttcgacattagaagtggaagcctggcagaaaaaaatagaatcgtctgcatatagaagatgggaaatagagtcagcccttctggcaatgcgaatcccatgcacctccctgtttctttcagcacgcgagactagctttgagagtacctcgctgtataagatgaatagatatggtgacagagggtcacct

SEQ ID NO: 69044 - DNA, 570 bp, Cannabis sativa
ttttacttttatttaactttaaatgataaaaataataaaattatgaatattttagttgtggagtaacaatgagtaaacatatcatgtatagagctcgataaggagtttgaatattttaaaagtattattaatttaatgtagacttttttagattttttgtaaacaatcaatgctaacaggtatattgaactccagatacttgtcctaattgtttatattttttttgttgaatattaaattaagttcaacttccaaagatgatatgctctaatttatctcatttctccagaaatataataaatttaataaaattatgaaaatttttgtaaatatactctctactttattcaattacaatcctcattacactgttaaaaacatcataatactattaccattacatttacaattcttattccattacattaaagcaaacatcacctgaaacattttactttaggaagataaatagtgtcacatcatctttaaccaacataatttaactttaagagatatttaactttaaatcttcatttgccttgttaacatcttatataacttaaaaaaaaa

SEQ ID NO: 69045 - DNA, 596 bp, Cannabis sativa
tcttttttttttcaactttctcacattttatttcttaataaataaaaaatatgtaaatatataatatttaaataatataaagttacgtttcaaaaaaatatatataaagagaatttttttcttatatttttgtgttgttgaataatatataaaaaaaattgatgtgaggtggcatgtaaaagtttaacgtaaaatggagaaattacaattttagtaaggtattttatcgaataaattaaaattgagacaacttataaagatgatacatgtatacaaggatggctaagggtggggcaccagggtcatgcctaagacctccacaaaaagtttaaatttattttatagaaaaactacattttgtatttaattattatttattaaaaactataattattttctaccaagaatatttaaattattttgttaagatacatttaagaattttattaagataaaagactcaattaaagaatttcatatccaacaacaatgatggtttgagaataaatttgtattggttttgtttagaataggtggatatgtagttaatagtttgatgatgttgataagttggatgattggtgggataaggaaga

SEQ ID NO: 69046 - DNA, 527 bp, Cannabis sativa
  modified_base (436)..(438): a, c, t, g, unknown or other
aataacgaggccgagtatgaagctttagtcgctggcctaaaattagccgaagatatgagagccgaacatattgaaatctacattgattcatagctggcggtaaatcatgtatctagagaatacgaggcttagcaaaatacatgacatgctcgcacaattcgaaagctacggtctcagacaaattccaagggaagaaaacacgactgcagacgcgttagctcgattggaaagcatcaatgtaaatgataaagtaaacttggttcctatcgagttcctctaagaacctagcattaatggcacgaaagagatcaaaatgattgatacttccccaaactagatgacaccaatagcagcctacctcaacactggggaactctaagataattgaaatgaagctcgaaagatgagcaggaaggttgcacggtatatcatagtnnngggaattatgtacagaagaggattatctatgccattgctcatatgtgttactcaacaagaagctgtacgacttctgtctgaggtgcacg

SEQ ID NO: 69047 - DNA, 1142 bp, Cannabis sativa
gtcgcgggtctaaggtctcagtgcgggtttaggaccatgtcaggtcaaggtcacggttcgggtgctagtctaggttcgtgtcccaagtctcaagttccagtcgtagtcaagctctcggccaaggttctggtatgagtttgggttatggtttgggttcggttttgttctcaggtatgggtcctagtcacagttccagttctaattccgggttttggtttggttctaggtccgggtctgggtccaggttgcggttggggtccgagtcttagtctgagtcgtggtatgggttttttgaatcccgatctgggtccaggttcgggtcctgggtctgggtcccaggttcgggtctaggtcctaggttcaggtctggatctgcggctaggacagtgtccaggtcccgtgtttcgatcccggtctggatctgggtctgggtcggtattcgggtccaagtctaggttcgtgtccatgtcatggtctggatcaaaattttggttaggggatttgtttgggtctgggatcaagtctcgagttcgggttcgggaccgggtctaggtataggtctgggtctgggtccgagcccgagttttggtgctgggttctggtctagtttcaggtcccggtctaggtctaggtcttatccacgaccccagtcctattagggtcttggccacgttctagtacaagtttcggtttcgtgtcctaggtcagggtctgggtctaggtcctagtcctgcttcaggtccttctctgagtcctagatcaagacaccgactatgggtcttgtccaagccccaatttccagatcccgagataagatctggatcccaatcacgggtcccaatctcgtttcagttcatgttccaagtcccggtctaggtctcggtctagttccgggactgagacttgggtgcaattctgggtccctagtcttgttccatgttcgggtctgagttcaagtctgggttcgtgtctcgagtcctagtttaggtttatattcaattttgggacccaatccgtgggtgggtctgtgtctgagttcggatactagtccggttacaattttgggtctaggtccaggtcctggtcctggtcctggtcctgctcgtgagtcccgatccgcttctggtttcgattctagtttc

SEQ ID NO: 69048 - DNA, 948 bp, Cannabis sativa
tattctccttgttgtgaaggaatggcatattgtgctcgataaggagcctccctctgtgtgtgccccctgttcaagtggtctctccaattaggttgtcgcctttggttcagatggtcccgaaggtctgagctccttgcgtcacgtgggggtgtccaggatgttcctcataatatggaggtggtgcattgtcttgaacgctcataggccgactccttgagtcagaatggtaactctcccccatgaagctcaccgttctttgttgttatggcccccgaggtgcaggtcgttgctaggcatatgattgtattacgggagtaagagatcttgataagtagctattgtctctgggtgagtgaggttgtgcacgttgtggtctagtctcccttggtgctggtctcggacaaacatagttatcacgggagacagtgcatggtctttcccatccatgtcccctaggttgaggtacctgtcgagcatggttgtctcagtagtcctctcgtccattttgagggggtcgaggaaagtcttgacttggaaggcgactgggaggttcttccttctgtcatgacctctctcttggggctggttgatgtggtgctggtacattagtaagctcaggatgccttattggtgatggggcgaacctaattggtgaaggagggttccaaacatggtctcttcccctctcgtcaacactaatatccctaggcgttggaggtggttgagatggtgggatcccatttttgtgtgttgtgcccctctccccgcagaagcctcctcatgggggatctgtagcattgccttgtggggtagtagatccttgtgcatccctcctagtttgttgttgtgtaggagggggtacattattcctcctattctcaagaccagaggttgtaactcgttgtccttgttgtgatggaggacgctctgttggaaattattttacca

SEQ ID NO: 69049 - DNA, 680 bp, Cannabis sativa
gagggccaagttgattctagagagccagtctgaggatgactttaactatgctgacctaaggccattagaatttgataaccgagtgtatagttttctaaaataatcaataagcatccctattcacttgaaatcaatcaaaaatgactcaacattatatctaaatattctcatctatcacaaacaaacaatactaaggctatgatactaattgttgaaaagaaattttacaatatcctattattttccacataaattgtcatttaacttaaataataattttctataacatacatgcatttgaatctctatagaattatattgagttagagtaaacttatagagtaaaaatatatcttatttttatattatataggcggggttattctattaaccaaaaaataaaaaaaaataaaaaagataaaaaaaattaaattgacttaaatattttttttatatattgcaaaaagaaatattttttgatatatctttttaatttagtagctaaataaacatgaaaattcaaatttttattttattattaaaaaatctaaaagtttaatatttttaaaattaataaaaaaagagttatatatattattatattaaatgtggctatataatatatagtgtttatttttttaaataaatataatttcggaccctatgtttcgcaaaagtta

SEQ ID NO: 69050 - DNA, 1670 bp, Cannabis sativa
agaaaccatataagctatctaaaccatataggtactctggtcctatatcaaaattcagttctattttactatagcataattgacactcacttctcatatcttgcattaaaatcatagatagttaattggtgatcaggcaatttaaagtaattaagtacgagtgaaataaaatacatagaaactgaggaaaaataaatcatattaaaaccataaaacaatcttaacaatctctatcgagaccctaattaaatgtttggctactcatgttcattgtagcaaaatcaagcatattaacaaaagaaaagagaagaaaatagagaagaaaagaatgttgaaaaccctctgaagaatgcctccagtattgaagtcggtctctgaatttcgtactcatttttctaccttttatttccttctgagttgcttactgaaatcaactgaagttcactccttatatagccattgagggactaaaaagatagaaaaatcgcacatgctaaaaatcgtattcaacttttaattaggccatcacaataagcccacgttgagaaatctttttttctgcttcagactatgggcgggccgcgacatgctctttcttgggccgcaacccgtgtgcaatcttcacacgagggggcctcttttcacgatgtgggtcgcggcatgcccattcttgggccgcggcctctgtgcaatttccccatgttttcaaggtgtgcaatctttttttctaggcaggatcccaattttgcacagtgatcttttatgcaatcttttatttatttttttttcatcttattccgttgatattttttaaatcttcttctattttaaatctgcaaaaataaaagataacatgggtaaaatttctccaaacacgagtaaaactaaataaaaagacactataatatatctaaaaataatactaaaaataacctaacacttggagaagaatcaaacaccacgtataattaattttttaattttaattaaaacatatatttaatatttatatgttatatgataataaactaaaatttagaaatgtttgattgataactagttacatgatttatttaggcatgtaataattgtgttaatgtgaataattttatgttttacaattaagtaatatgcaattataatattactaaaattaagtaatttattgtttaaattatttaatttcgattaattttccattaaatatattctgcaatttatatttaatttattatcatataatatatgtgctaatttatatttattcattctaaaaatttattattggtgcatttaattacaattttatatgagttaaatgctagttttattccataataatgctagatatattaagtatatattcaaacattaagataggttgaatattttatttagcacattaaatttcataaagtttcataaaaaattataaaatatacataagacattcataaaattttaatatagataaaacataagaaatttggtagtttaacaaaagaaagtatatgaaactgagacaaatactcatatctataacgatttttaattatctttggacgaccacattaggagcactaatctcaatgattgtctattatgttaataacgaaattatttttagttagagctttatacctaacatctaagtgaaaatataattttaa

SEQ ID NO: 69051 - DNA, 771 bp, Cannabis sativa
  modified_base (42)..(44): a, c, t, g, unknown or other
tccgagcatacatcagtagattcatgacggaggcgaccaaannntcacgggtaactgaagatggaaagttgtccgcgatactgggggcattgaagtcataggtgaactttggaaggacataaggaagaacggcccgatagactcaatgagtgactttcttgaccgtgttgaaggcttcatcaagctcgaagaagctattcaacgagcgaaaggtgaccaaaagcctggcaagtcaaaggctccttccactggaacgtccgcccaactcccccattacccaaataattcaagctcaaatggtaaacgttccagcaacaacaacatgcaaaggaatgggaagaagggaaggttcgccagcaaatccgagcaagctccccaggagaatcaagcaaagtacactagatttaccatcttgactgaagacatagaaagtgtttacatgtctactcagtcccttgccccatataagaagcccaggcccatgaagaaagatgtcagtaagaaagacatgacaaagttttgtccgttccacggagactacggccacgacactaacaaatgcaacaacctgaagcgggaaattgaattcctgataaggaaaaacaacccacacctgtagaagtatgtcaagaccgatcagaatcagaggaatgaatataaccaagagttactacccctaccggtagatggacatctgcaagtcatcgttggaggcccgcatattgctggagattcgggcaaagctcgggagaggtatgcacgaacagcaca

SEQ ID NO: 69052 - DNA, 1839 bp, Cannabis sativa
  modified_base (1807)..(1807): a, c, t, g, unknown or other
tctttatttaatatattgtccttgtaatattttgtttagagttgtaattgtcttagtcttttattcatcttattttattcttccattgtaatctctttattatttctaacaatattgtgaatgaaaaatgtgctataggagagtatatatgtatgtattttctgctgtattgaatatgtattgtgtgtgtatatatattgtgaatgagaaatgtgatatataggagagtttttcatatattgtatatgtatatattgagtattttaaactaatagttttgttaaatattttgaatgagaatgagataagagagtattaaaataaaagtttcaaaattattttctaaaaaaaatagaatagaaacaatagtttagaaattaactctattttgtatcaatttttttctattttcaattttattcatgtgtttttattttttagtagctaatagatagttaattacaactacgtagcaagttaataattttcattctattcatgtatttttattagtaataaattaactagttaactagttactcgtaaattataaaactagtaagtagctaaataaaaaaaattataattttgtagtatttctttgtgttgtaggttgtgaggtcaatttgccaggatctgacttatttggtgttgatcggtttctagctagctcgatgtatacattcattaaattttattataaattaataatgaatgcttagtagagtttgaatatcttaaatattcatccgtagtgaagtagattctgtaatatattgtattgcgccggatcgatgggtggaataatatgcatgttatatgagtttgaatatcttaaatatccatccgtagtgaagtaatttctgtgaatgcattactgcagtcgaatgggtagtaaatttttatattgctaaatgttatggtgattattttatattggtttgaattgtgttttgttgttattaataggtttgaatttttcagaaacgttcaattatagccgttatgctgccgaaatttctgtagaattaagataatatttgattttaatttctcttaaacttggttgttaggattttatcggaagtgactttatcggaagacaagtacataatttttggtataaggtatgctttctttaacttacttttataagaattttttttatatatatttagataatccttaaatacttagaataattttagaataatattgatgtaatacatatgatagatattgttgagtgctaatgatagatatagttgagtgctattaagagttgatcttgtgaccaaaaggataaattgataagtctttagcaatataccaaaacacaatatttgtataaatttgctactataaattttatttaaatattagaagagatataaaaggaaattagtagtgcaatttttcattgtggtagaattaacaaatacattataaacattgattctaatacttaaaataagaattctagtttatttcaagtaaaatagcaaaataaaacaaaaaaaattaggtgggggtgcataacatgaatttagtatacaaaacaacaattttttgaaaaattggttggccaaatcggcactttggattgcgtagattgcaaaaaaatacccaagttaacaaaaaaaaatcgcctcaaacagacaaccggatcaaaaattattaatgttcaaagttttcaaaaaatttcatgcaaagtttagccctttccttacaaaaatacaatatagtacaaaaataagactagtatactaaaaaaaattataaaaatgatactaatatactacaaaantacaaacacataatataaaatataaaatatta

SEQ ID NO: 69053 - DNA, 667 bp, Cannabis sativa
gggctgattgggagatgaagtactctctgtgtggaatttttgagcaagcatggccataattttctgacattgattgagggaaagaccagctagaggatcttgattagctccaggtgctccttcattgttgtcattgtgtgtctcagtcatgttggctgctggtttcccttgtgtagttctactctgagaattgtcaccatttttgctaggaaatctgtcatgtaacctatgtcccggtggatggccatgaattttataacatctagacatggtatgtccattaattccacaatgattacaaaataacttggatctttgagattgaactcctcctcttgccatggcagctgggacacaacagatgcagagatgggaagagaagaagagaagaacagagaaagagctcaagagtttcttggctctgataccactttagcaatagaaaggggagaatgaaatcttattgattgaatctcatcaattacaattaaattaagctcaccagagcttatatacagctgaagcaaaaaaggaattaaaaaaccagtacaaaaccagagaacacaccctttacaataacaacaattaacaacctctaactaactaacaaactcaactaactctaatgaaccaacaattaacaaacagacttcataacttccctact

SEQ ID NO: 69054 - DNA, 939 bp, Cannabis sativa
tgagtatgctttcccatactcaacccaaatcactcatacctcacctcacacttatgcatcctcatctggtactactgcatctatccctactgtccagagtctcccctgtttacatcctgcagagtctactagttctacttcagactctgcttccacatccacccatcatacaactcctcctccaccttcccactccatctcccctcatgagtcacccccacctgagtctccatcattgtcctccacctctgcttccgcacatcactccaatcctgagactcacttaccatccaacacctctgtggcacctcctgttacagtgaacaatcacaacatggttactcgatccaaagctggggtctataaacccaaagtctacatagcaacaagagaaccccccactgttcaagaagctttaaaagaccccaactggttctctgctatgcaacaagaaaacacagccttgaaaaacaatggacatatgttctggtgccactccctccaggcaagaaagctatgggttgtaaatgggtttataaggaaaaagaaaatgcagatggcagcatcaacaagtttaaggccagacttgttgctaaggggttccttcaaacatatggttttgattaccatgagactttcagtcctgtagttaaacacactactgttagagtgattctcaccatagcattatcaaagaattggggactacatcagctagatattaataatgcgtttttgaatggtgagttaaaagaggaagtgtatatggtacagccaccaggctttgaagatccttcacaccctgaatttgtttgcaagttgaacaaggccatttatggtctcaagcaagctccccgagcttggtatgatacactcagttcaaccttgtacaatcttgggtttcataatgccaaatcagatcactctctctttattcga

SEQ ID NO: 69055 - DNA, 926 bp, Cannabis sativa
tgacccaatcacaagcttaagaaaatagagtgtggataaattttataaaactaaaataggagattatttaattattaattgatattttactgtttattaattttttttttctgctaactatttatttagatgctttataagtaatcagcttatattgggaaaaccaaataaatatttaaatatgttgaatagctaaaacactttttaaataaaattagaaaaaattgactgaaacaaaatcacttaactggtttttgttgtaaatagctctctgtttccctcactcaagactcaacatttatatgtaaatctctttatatctataacataaattacatgtgaatatgaatctgtacattagtttactatatatgtcaagatcaaattcttattactattcttttttttctctccttatcaccattaagattaagtaacagttctttgttttataatttattaaatcagatttatcataataataaatattttggacttgtactcatatttacttgattgaaaaacaaaaagaagctatttgactttataacttaaattatttttatatagatatttattttcaaaagttcctctgatgtaggcttacttgaatgattttagatgctctttaatttgaaccgtaccaacttgcttcttttaaactcaattttttgggcagaaaaaataatatctaactaaattaattatttttttttttataagtggcgtctcaaaatagtaaccaaacaacaagataaaaactattgaaaaaatagttaataacactagaactacgcatagcctaaaagcaaaacaaataaaaaactaagtgtaaacataaaaaagctatcagtaaattatgagaagccaaaaagaaaatgagtagaaaaaataatttttttaaaaaaataaataccaatataaaa

SEQ ID NO: 69056 - DNA, 1099 bp, Cannabis sativa
ttatcaagaacctccacaccatggtagccaacttctagtggggtgacacaaaagacaataagaaacttcattggagctcatgggataagctttgtaagccgaaggaggatggagggctaggctttcggagtctaaccgaatttaaccaagcacttttggccaaacaagggtggcgtctcattcataatccccactccttgttggtcggggtcttgaaaaatagctattttcccacttcatctttcatggaagctaagtgtccaccgggggcttcttgggtttagaaaggaatcatttggggccgcaagattctaagtgaaggggcacggtggcgtgttgggaatggaaggaacattaaagtttgggaagacaaatggttacctcggccttccggagcgattctcactcacaagcctagaatacaaccaatcactaagcttcagacgttcataacagcggaggggacttggaaactggaggaagtcgatcgtcattttcatagggaagacatcccatggatctgaggtattccgatagacttatataccgaggacatattgacttggccttacacctctaatgggaattacatggttaaaagtgggtatagagttgggagggaaatgaatcttcatcccacaagatgctctaatatgggagaagtcaataaatggtggaaaatgctttggagtttggagctgcctccgaggatgaaactatttgggtggcgggtctgccacaattggcttccaacaaaaacaaacatgtgtcatcgaggtatgaatatcatccctgtttgtgatctttgtggaagtcatgctgaaacccttcctcatgcattgtggaattgtgataaagtaaaaacggtgtggaaacttcttccttggtacaaacactgtgggaagttaggagatgggtcaatgtttgatcttttgacagctttaaaggagaagctcacaaggagtgaggttgaagactctcttaagagcatgtgggctatatgggagaatcgcaataggaaatggaataagctccctgttatgaatggggctcaggtgttagattgggtgttcacagcttatccgaattcaaatagcaa

SEQ ID NO: 69057 - DNA, 623 bp, Cannabis sativa
gttaatccctcggacgttccaaaaaattattctatccatttccaagaggaggatctccccctcctcttatattactcattgtagcaattttgttggacccaataatgatctcactagctgctatatcttctttaccagtcgtggtttctgtttcagtgttgacagcagtaaaattctcagccacaacctgatatgagttggttgtatgtgtctttacaacctcctctgtacttttagccttgactcccttgccaacctgttgaaatccttcactatccactttctctttatttccaacctcagcaccagccatattgttgctggttttaacaacccactgtgtctgtttcccttctttcttttgtaatctatagtagagtgtcccaagcctttacaatggttgcattgtagagacttctactcatattttatggcagcatacacattaaatccatgcttatcctcaaaagaaactagttcaagaaattcttgctaaatcgaaacttctatgagcactctcggatatctcaatttatttctctctttggtcatagcatccacctgtagtggagtacccaattggcctactattttgaatagagattttgttggaaattatttta

SEQ ID NO: 69058 - DNA, 778 bp, Cannabis sativa
ccaatctctcaaagtaatgttgatcaaagtcttgctgctgctgtgaatcagtttcttaccacccaagatgcaggggctgattcttcctcctctggtgccatccctggggctgatggggctgtttcctctggctttgttggaaacaaccctgttcctccccctgaaccctctacttttgagagacaatccattgccccaactttcaaccctggttttaattgccctgctcctgtggatgccttctgtgaggctaaccaaactgctttccctacggcagccatggccgtgcacactactactgaacatgatcctgttcttgtccaagacattgaaaggatcactgagaaggccaagggtaaagcggttgctggtgccaaacgatctgctttcctccctcactctgttatggttggagattctcttagaaacatcctcaaaagagctcgtgctggacctgtgatcaatgaagcttccaatgatgcggactctccctttcatcaggcgggtgttgctgagcaaccccgcccaaaaaaatgagtcttatgagttggaatgcccgtggattagggagttcccgggcattccgtaatctctcccttgttgtaaagaatcataggcctagtttactttttgttatggagtctaaacttttagctggtcactgtgacagttttagaactagactctcttttgataatgcttttgaagttcctcggtgtggtcttagtggtggacttttgttattttggactaatgatgttaatgtaaatattttaaa

SEQ ID NO: 69059 - DNA, 927 bp, Cannabis sativa
gggaatcatggagacaatacaacagaggatcaagacttggttgcttgcttgactaatgtgcaatgtcaaatattgatggcattgttatctcagagaaatcatgaaccaacaactagtgcacctgctgaacctcctatggtgtctcacttttctggtaagaattctctcacacctcactctaaatggatctttgacactggtgttactcaccatgtgtgcaatgatatttcattgcacaaaattacatagtgtgatcgagctatacctactattaaactgcctaatggaaattttgctaaggttatttgtattgatactgtcaacatctatccaactctttcactctctaatgttctttatataccaaaattccattacaatttactttttgtaactgctttgactaaccttggaaattattcttttcattttcatcctaaccattgtgaaatgcaggacaatttgaagaaacaaatgattgggatgggtgaaagaataggcacattgtattacttggtttctggtgtaaaaagtgatattccttttgctttttttgttgtttcagattcgaaaataaatcatgacatagtctggcattatagacttggtgactcctcttgtatcaaaaatcactcattgaataaagctttacattttcattcaagatcttctattgatttccactgttcagtgtgtcattatgccaagcagaaaaagttgccttttactaccaatcacaacatgtctgctgcacattttgatcttattcatgttgatatataagggcctttcaatacacttactataaatggctataaatattttataaccattattgatgactatagtaggtacacttggacacatttcatcaaagctaaatctgaggtacaaactgtcttacccaatttctttaaactaattagt

SEQ ID NO: 69060 - DNA, 845 bp, Cannabis sativa
atgtttacattatgcatgcagttcaaacaactgaacttaggaattggaacgagtttaagcagacgacccatattcaagtacttggataaagaaactggtaaaacaattgctttgaagagaatcatcctcaggcacgaactacttcaagctctccctctcactggatcatcaaattcacgtcaagaacaacccattgatgttgggattcctgctaacacaattcgacaaatctccctttacaggattctcgatcatccaaatattgctaggtatatttatcttcctttctttctttctttctttctttttttctttctttcttaatttcacttaattattaataatttttaatttggggaaaaaaaatcagtttggagtatctaggaaatgaccctggagatcattttgttcgtcttggatttgagtatgttggtgtggatctcagaaaattccaaaaggataatgccataagagcccgtcacccaaagttgataaaggttccattttatgttcttgaagtgtttgtgttaatgattttaagcttttcggattgaaaaagaataagaacctaataatctgaattgggtaactttttttgtagagcctaatgcaccaacttcttagtggtattgcttattaccactctgttaacgcttcccatggaaatatcaatcccacgaatgtgctcataagcaactacggagacgataacaatgatgatgaacaagtcaatttgctgatcacaaatcttgatttggtaattgaaaatgttttgatgattattatggtttttgattattttaaatgtagattagatagatgacaaaagtgttgatttgctacat

SEQ ID NO: 69061 - DNA, 598 bp, Cannabis sativa
ttaatttttatcttttttttttaataatttttattctttttttccagaattaataaatactataattgctttttaaaaaataaaatattataatttttaaaattaatttttctttaaaaaaatgggcaaaattttgtattggtcaaagtttaggatgtaaaaatactaaattttaacggtaaaataaacggaatctaacagaatgggcataattctgtaacagttatattttagggagaattttttacaaaccttatattttagggggtaaaatcagatagtgccgaaagttcaagagacaaaaatgctaattatacttttcaaaatggagagtggatttagattgctcttagcctatagtatcaattttcattcctagattccaacaattacaaactaaatttcataactatagcaaaatcaaataggtaagaaagagggtttcatggaaaagtttgaaaaagcactatattactcatggattctatgcattttaacatggaaaataagaagtaaatagtgtaagggtgaggataacttaaggaataatgatcttcaagcttgaatcctctccaacaatacttgatttcttattgaa

SEQ ID NO: 69062 - DNA, 924 bp, Cannabis sativa
aattttttttttgaaaaagaaaaataaacaaattattttaaaattaagtaattaatttatttttattttttatttttaattttttcactcatatgttatacaaagcagtaagcactttgtgtgcttgaactacctgaacactgacatagggccgtcttaaatattttgaaggctctgttctaattttaaaaattgaaaccctacaaaaaaaatacaatttataaataatagttttaaatattattatatacagtatatatttaacaaaacatcaaaaaactccaattaatttataaaaaatattattgattgcaatataataaaaaaaaatgaaaggaaaaaaataataaatagaaacaatgaatttttattttttttgcttaaaagcaataatagaattgaaaatggattttgggaattgacttagaaatgatcaatgataagttattagggataagttgaaaaatataagttgaaaaatactttttttttttgcatccattaatcaaaaatacccttttattatattttcttaaaatatacctatttttttaagtgggttgcccaatataccatcactctctatttaagtctatcatataatttacattaaccttaggggtctaatggaaatatcatctataaaagtgagtatatcttaaagaaaatgaaaatggaggtaaaaatcaaaacaagtaaaataaagtgggtatacaatgtaattttctcttaggcctttaaaagttgggttcattaaaaaaaattgaaaggcatttaaaaatatatatattaggccatttattttttttagacactttattttttggggccctttacaatagcccatcttgcaccccataagggccgcctattcactaacaaggtgagagacatgaggaactaccgccatgccttccactaaga

SEQ ID NO: 69063 - DNA, 637 bp, Cannabis sativa
ttctcaaaactcaaccaagactcataacagccaaagcacttatattatctggggttcgaatcctctgggcaccaacctaatgtattttctctagtaacaccaacacttgtttagccccttgagaatttttagtcctaagagtttcagtaacacttaagcttcttcaatggtgtattaccaatggaaaatctctttgccataatttggataactcataattggactgaaaattcaaaacctgacttgataataattcaacccattttaaatttgtatccatgagttgcaattaccacatttataacaaatttatgtacaaaactcttcactaccataattttaatcgataaggaaacaaaattacaagtataggatcaaaaaaataaaagaagggacaaactctggtgagaaggatggggtgaacggtcaattgcttggagctctctagcaggtaagcatgggagcaaagcagcttctagagccatgagacaagtaagcatgtcttcctttggagctggagtggattgcaatggcggatctggttgattctgctgatcgactgcttgtcgctcagccattttgatttcgacaaattaccaaaagagttggaccggagcttctgagttctgagttaagt

SEQ ID NO: 69064 - DNA, 619 bp, Cannabis sativa
acggtcggtttcttaaatattttgatcacccctagctcattttattataatcagaaaggattactagcttaccaggctagctcaactttttgtagaccttgcaacaagccttagaaactgaacttcacttgagtactgcccatcatccacaaacagatggacagtataagaggaccatacagactttgaaaaacatgttttgctcttgtgttttggattttagaggtagttggggagaacagttgtgactagtagaattcacatacaataatagctaccaagccagtataagcatgctccttatgaggcctagatgggagaccatgcagatcgccattgtgctagacagaaccaaatgagcatgtcattattggaccccagattataactaataccactgaaaagattaagggaacccaagaaagacttaaggttgttcagagtcgtcagaaaagttatgtcgatctccatcaacaggaagttgagtttgatgttggtgattatgtcttgttgaagttacttcaatgcttggcataacgagatttggagtgaagggtaagctagtcccgaggtatgttggaccttttgaggttatcgagagaattggggaggtcgctta

SEQ ID NO: 69065 - DNA, 782 bp, Cannabis sativa
gttcatgtcaatcaaagttatgaaattataacagaatcttatgtgtatgtttttcttattaataagaaagaaaaggtaaaaaagtttctagcttgaaaccatttctttataaagagatgaaatgaaagtaactatcattgtctttggtgataatgacaataacagccactaagaaagtataaggatttattagattgatgcccttgttaaagaaagaaagaatgatgcaattatgtatggagtggctttttggagtttgaaaaagagaaatgctaaagggcgcttgtagtggctactagtgtaattcattattaggtcccgtttattttactttgataatgattattgaaaattgaactatttagaggacgcaatctcataagggtgctagacactatacccatggtgtctagcactcttataaggtgtcgtatcgctattggtgcaattcaatatcgggtcttacttattttactttgataataattatggaaaactactaaacattagaggacgccacctcataagggtgttagacaccacagtacctcatagaaatgctcaaaaagagaaatactaaaagatacccatgatgcctagcacccttatgagatgtcatatatctggtgtaattcaatattgggtcccacttatttcactttgataatgattatagaatattgctaatcatttagaagatgacacctcataaaggtgctagacactatagtgcctcataaaaatgagaaatgccaaatggcactcatggtgcctagcaccct

SEQ ID NO: 69066 - DNA, 1346 bp, Cannabis sativa
tatatataatatttatgaaaaacatctaaggtagaatcacaaaaaacgtctgtacatacatatattttttttcattatgtgtcactcttatatttaatactaatatttaattaattcattttatatatcaatagatttaattaattcttttatgtatcaataaatttaattaattttttttttatgtaagaataggtgtcaaaagcatattggttactaataaatattttggttgacatttctattttgtaatcatagtaaaaattagaaatattttcttctctatatcccatattttctttgttcatcaaaatatgtactatagattaagattcatagcacaacaaccttgtaaatgtgacaattgaaaaaacaaaagctatctggcaaaattcaactaaagaaaaactataaataaaatttttaataataaataaaaaaaataaagataaattacaatgcacaattatattaatagatatactttacagcttgcagcaaaattatctatcttctcgctgaaactggtgtctgacaagaagaatttattataaaattacgttccttttaattccaatcattaatataatctaatgaaagagaaaaacttttaacttcatcaatggaagttaccgaacaaaatctatcaccaagtctttttatttttttttttatgaaaattctgacaccaaaatctcccaaaaaaaagatatttacaatacttctccttattaggataacttttttctttttttgcagttattattattttgttttttgttttaaatattttttagagttattaagagtgttgaattagtaactttagttattgatatcataaaattattcaaaaatatatatatatatatataaaagaaattaattaattattggtgtgaaataatagagtgatacataatgaaaaaatgtctgtatgtacagacattttttgtgactctacctaagtattatccaataattattattgtattttaggtatattattttttctctaacaaaattgacattatttacataaattagtataaatatgtaaactccccatatattaattgatttatatcatgaatgtaatattatattattaaattaccaataatataacattagaaatgttaaaggcactagtggtacttattactacttagagcatctccaaggagcacactaaatttggtgttacactatcatcaaatttagtgttaaaaagtattaccactccaaccgcaacaccaaaaattatattaaaaaaatattccttattattatattatttttttaataaaattaaaaaaattaatatcatattaattaactaaaat

SEQ ID NO: 69067 - DNA, 841 bp, Cannabis sativa
catttaattggtctggtttgattttgagatttttttaaataggatactaagttccagaaaaataaatatccaactaaaccaatttgtgaacaaatccaattatcaattaaaaattaaattttttagtctcttcaattcaattatgagatatatattgttgcttcaatatatccgtaatattagatataattttattttccttcttagcaaaatttgtcttatgtgagggatctcacacttcaaatcaaaagtgagggactacataaatccccaacctttattattaataataatatactaaatttgattaaacttcaatttgaattactagatttaccttttcatggttaatatcttttaaaaagtaatttcataatatttgacacaagatatttaccacaaaatttccttaacatttgtaattgttatacgtatgattctaataaaaaaaaagtaacgacaaaagtatcttattttacgattttgttgcagtcgtacctttttttgggctaattaagctcattaagtaccaactcagaaacacgtggcgacatatttttttagcttatttaatacgtggcccaataatatgttgccacgtgtttctgagttgacacttaatcaccaaaaaagtgtacgaatacaacaaaatcacaagatcagatactttacaaaatcacaagatcagatactttttactgccatttttttaattatggttatacaatgaggttttgacacaaatactattagacacaatcaggtatctttattaacgggttgagatgaaaaatgaccctaaatttggtaactaagttagtaaatgtccactttttaaaaa

SEQ ID NO: 69068 - DNA, 972 bp, Cannabis sativa
  modified_base (944)..(946): a, c, t, g, unknown or other
acgtgtcacccactcaaatgcaaaagcatctcaaatgaagtctacatgcaacttcgaaagtcccgtacacacttggagggaaaatgttatcctaaattttgcactctgacatggcatcacacgatggtgacacgtggaataaactttacatatctgttcgtacgagatatgccgaacaaagcatcgcatatagttgcacgggcgaagtcttattggccgggcagtgagcaatctgaacaacacgccaacacttagcacttttaacacacatcgtgaatcacaaaagaaatccccatgattttgggatcatatcacagagatatggtaagctgtccaaatcccttgatcagtgtattctgcatttaatatgcaatcttgccaattatatctattgtaattagaagggaaactcttctttcaaagctcatagccctataaatagtgatctactctcactggacaagggggtcaagaaactgatctaagaattcatattcagagatattattgtaagagctctaagaaaaggaatcattatattttttgttcttaagtcaatacaaactaaggggagtaggctattaccgaattgctctgggtcgaacctctataaaacttttgtgtctttatttatttcattatattacatatatactatactacttgtcacttgcaatcaagactcactgtcgttggccaaaagcgaggtcaatagtgtgtaacaaataatttccatgaaatgctagaatctgagaagatggtttacttataacatttgcattttccttacaatttttaggatggagaaaaaaaaggtgagagtgattgtaatgtagaatcagcactatatgcacataacagttgtattaaaagggaataaatatcatactattattccataatagatttttcctcaaacttactagtgttgggttttatgcccnnnataaaactctttacaatctgattagt

SEQ ID NO: 69069 - DNA, 1356 bp, Cannabis sativa
atttttgtaaaaattaatccaaatttcaatatttttgtaagttttccttttggttttgagcatatacgggttagataagcccacttaattcaaaggtaaaaaaaaaattattttaaaaattatactttgtttttactaattttgaaaaatatcacatttttttttctaaataagagttcaaaaatatttttttcctataactcacttaaatttcaggactaaccctaaatttaccaagaattctatcatttcatagttgaagattctaagaaaactagttttgtttggtacaaacatgattaaaaaatatattattaactataggcatgaatgagttaaaatgttaactaataagtaatatatatattaattacaagtggatagttccaaaagtatatccacgtttagattttttttaaaaataaatgttgaataagagcatggcatggcatggcatctgttataggtgtattttttctcttaaaactttctaagaagccaaaaaagagttgcctccaacgacaaaagtggccagccttaaggggccaaagagaatcctaccaattcatcattatacaaattataatcattattttcttaatttaattagtcttgccttaacattttaatgatgaccaattagaatattacagaggctgcaaaaattattttttatacataaaaaaaaacactaagtaagttttgtcaacgtatataccactcacgtagtactttggtttctatttctttctttctagtacttattattatttttttcccttcgtaaattttttaaataaatatatgactttttccattacactaattaatatattatatgggtgtggtaccaaatatttatataatgaaatcaacaaactgaaataataattaaaaaatttttaaaaaaaatggttttctcaatcaatcattaatctccccttcaaaacaacatattgcattattttaatgtctgaaattagctgtgagaatcttttgcttggactataaggagagcttaataagcacccctttttcttttcttaacttaattttattaccaatcaaaattgatatgataaaactctcttctcatattttgggctttgtttgaaaaaagaagaaaatatgggaagacaaccttgttgtgacaaaattggcctaaaaagaggtccatggacaattgaagaagatcacaaactcatgaactttattctcaataatggtattcattgttggagaatggtacctaagcttgcaggtatatatatacaaacatcttatattaaaattttctctttttataaatttatattaaattttgtgttatgttataggtttgttaagatgtgggaa

SEQ ID NO: 69070 - DNA, 505 bp, Cannabis sativa
ttcatggtatcagagccattgacgaaagtctagtatggatcctaccttcgttgaaaacccaccgcgcccctctggccaaaaccaagggcagcaaactcaaaattctcacctccagaacaactggaatccctttcagaactctcttaattcatctctcactgtcaaattggatagatccaattttcttgcctggaaatcgcaggttatccccactgttattggtcatggattggatgatattcttcttgccggaactgctccaccggaaaagttgctcaacggccaagataatccgatgtttcttgcttggaaacgaaaagatcagcttctcctcagctggcttagatcatcaatgtccgaatccattcttggatctgtagctcatcacgttacatcttcctctgcctggcgtgccttagaacagaggtttgcctctcagtcgaaagctcgactcctgcagatcaagtctcagctctctacgatccagaaaggtaatctctccatt

SEQ ID NO: 69071 - DNA, 761 bp, Cannabis sativa
ttgagggaccaaaaagatagagaaaatgcacatgctacaagtcgtattcagctttgaattaggccatcaccataagcccacatgaagaaatctttttcttatgcttcagactaggggcgggccacgacatgcctttccttgggtcgcagtccctatgccatcttcacacgattatgcatgctgctcatgatatgggccgcgacataggaatgagcatgtcgcggccggtgtataatttccccacatggtcaacgcgtataatcttttttcctaggcaggatcccaatttttcacagtgatattttatgtgatcttttatcttttttttcatctttttcctctgatatttttctaatcttcttctgttttaaatctacaaaaataaaagataacaagcgtaaaattgctccaaacacgagtaaaattaatactaaaaataacgtaacagtgacaacattgaaggagtggccaactccaaataactaaggagccacaagagaggcaagcatattgagagaaagtaccatctactaaggagtacagtagagagaggtgatgtgacggtcttgaagattgcttcgaaacataacatggcaaattcattcacaaagacactatcagtgaaatttttataggtcatattgctaatatgagactaagggagatgcctaatttacttttaaggcaagtgggagattgttagggtttacgtcttgaaaagcctgtaaagagatttctaattatttaaataaagagtaaac

SEQ ID NO: 69072 - DNA, 843 bp, Cannabis sativa
ctcttccgatcttataatattttattttatttctctttcacattattatttttgacactcttacttctaaaaatactccaatgtataagactctttgaaaatactataattataatatcactcattattatttaatatatatcctaatttttagctacaattttttattaaaaaaaaaaaatagcatcaatgctacaacatagcattcatgcaaatttttagaatgatatctttttctctccaataatatagtatctcaatattttatcacataatatatccacctcactaaacatccactaaaattttatcattagagatactctaatcaccggctcgaaagaagaaggcaacacccgtcgtttattatccaacactagcgcacgtggcccctttttcgacccagtcaattaggcaagagaaaaagcctcactgcccaagctcaattaggcatcattttttgtctactctcttattctttttgttatactaattttttttgaacaatttataaagttgaattttgaagtcttttcataatcaaaatattttttaatattcgataattactcttttaaatagatgttatctatatttttctaattaaaaaaaattattgttttattgtaccttcatttctccacactttttaaataagtattctactatgcatttatttgttttactttcaaaaaaccttctccctacaattctttttgtgtttctatacattttagttttgacaactgttggaaattatagttctaaccaacacacttaaagaagcaaaattaatgttatatgcaaattggtatttttctaaaatttattattttatgtatc

SEQ ID NO: 69073 - DNA, 1006 bp, Cannabis sativa
aattataagaatttttaacgttttgtgattttgggatagtttatttgtgcttatgtattatatttttaggcttgtcttatcgtagcatgtttaagctcatttttttcgtgacgtgttatattaatttgtagcatcatgccgtgtcatattgaaatttatattttttaatgacaggtcgtgttgataccttctggactcattacatgtcacaccccatatttactgtacagctctagcgtggaactgtggatgatctttgaaaaatagaaaaaaaaaaacatattgtagatgaggatctcacttgaagacatttctgaaggttattttctaaatatttttattaaagaaaaaatactttttttatatataatataatctatgaaaccagttgttaaaaaggaaaaaaaaaacaaaaaaaaatctatgataagagaaaatgttaagatataaataaaaaataaaaataaaaaaccaaaagttttgaaccccacgaggtgctgtatcacattattacaatcaatgacaagcttctcaaatcaaataaaaatttagttgtagaaattttgctttttccttagatatattgagaagaattattaatactaaacaatttaactataaaaattaattttaaaatatttaactataaatatatatattgcgactccaaaaataaaagtaaattttttttttcaaattttatttttgaaaaacaaaaatatgttctataatcacttttttttttcacttttaaaaataaaaaataaaagtgtcttctataaatttcatgtttatttactttattgattttatttaagtcaggtccggatttgaggctaagatagggtttgggtctgggttaaggctaggattagggttgggtccaggtttagagtcggggtgaaggtttgggtttggggccaggtctaggtccggggttggggtctggggtccgggtacgaggatggggtccgatttcgagttcgagtcctggtccagggtcggg

SEQ ID NO: 69074 - DNA, 1405 bp, Cannabis sativa
  modified_base (48)..(52): a, c, t, g, unknown or other
acaaatccctaatggattgtcatctattagacaaacataatagtgttnnnnntcgatagataaatatttgtaaatggaacatctatctgttcattaatagatgacaccttagactgtaattacaatatgaaacaatgaagaagtttataaaaataagaataactttgactctcgctaattgggaaatcgttggattcttatttttcatcgaaattatcctttatttttcttcttagctcattcatttcgaattagcttaaataatatatcataggatgaatggtttataaatcatttgcatataatgtcaatctattttctcattggaaattaaatgacgcacatgattatattcccgacattctatcccgacatgatataaatcctcaatcttagaaatttcctacttgtatacgtttactttaggcaaatcatacttagagttagattagtagtggtggtcaaaggtagaataaaactcattgtatatttggtataaattaaagtctttgactttacattttagactccaaatagaaattttgtatcccgaatacaacgcagttcaactttcacaagtgattaatatccattttctatcactactagaaaattgggatttaatgacacacattgagtaactctaaaactatatagtgacacttcagcgcgtgtcactaatgagggtgactgaaaagacagtttttagtgacacttcacacgtgtcactgaacccttttacattcattttctgcgcgtcaccataggcagcataaagtgtcactatatctttttttttttgttttttattaatatttttagagatatagtgacacacaaaaagtgccactgtattaaatatttttctacaaaaaataatatttaattattttaattcaaattttatatattataaataataatttatattattatatgcaaatataaatataacaataataattttaattaagtaaccaacatttcgtattaatcattttgccaaaatcaccagagtttacaatgatacaaatacaaaaaaatgtacacaaataatctgtttactcaaatacaactgaggccaccattgatcatgcaaacaagaacaatttttcatgacaaaaaaactaaaacttgagtatctctacaaataatttatggctgtaacaagtttcttggcatgtaaaaacttaaaaaatatacaaaaaaaaataaagaaaaaatagatctggttgttggtgtagctcggatctccatgaatggccactcttctagtgatccacggtagagcgagacggagattggaggaagaagagcacaacttgggtctcatctagtgatccacggaggcgagaggaagctgaccagagcccatctcgcacgattgagcaccattgatcctcgc

SEQ ID NO: 69075 - DNA, 1847 bp, Cannabis sativa
aacaatgttctatgttaaattcaacacaatttttaacaccacataaatcttttaacatttcacatagaatgtgatatcactctaaatttgacaatacctatccaaccaaaataattaaatttatattcagactcaaaacgctacacttattaaattcaatatttcaacctagcaattagaattctctcctctaaatccatatttcatatgcattcgcaattagctatataaaatttattaaatatcgaattgagacttatattttaaaattctagatttctattttttttgtttaactttgaatcctgatataaatatgtacatatattttttattaaaaaaaccacttgtttaaaattatctcaaaaaaataaaaaattatagttttgaatcgtgatattttcattgtgaaaaaaaacacagaagttagttactcttttaaaaaagaaatatctttagaatttaaaagggaaacctttttgaacaaggcctaagcccaaaacccaattgaaactgactattagtgccgtggtaggtagtcacttatcagcagtacaaagtaaatatatagagcttagcttagcaccaccacgtgctcaataaaaaggtcaaaagccacattcagacttttgtagatattgtttggcttttcatattttattcaataattctcaccatgaattccaggctcctaatcactgcggctactctagccgtcttggcagccatcttggccgtcaatcaagatccttctctcattaacatccacgcgcctccgcctatacctgggtcacgcgatgtcctccacgcggctcagatagtcaatgtcaccggagcggtgggccccgagagcatcgctttcgaccccagtggtcggggtccgtacgttggtgtcggcgatggccgaatcctcaggtgggaaggagacggccttggttggtctgaatttgctttcacctctgagaacaggtaagatcattgtatatacttaattttggtgttcttttattgatttcgatatttgtataattgtttttcagaaacagaaaagttttaaaattttcacgaatttatgtgatcagatatatttcttaattgactcacactgattgttgatgagcttaccatagcaggagcttgcttttgtgtaaaaattatctgataataataattataattataatatactgaatttattatgtttcttcagcttcctctgtttttgatcttatataaatattaatttttgtttgatttcattgaagataatgaacatatagaagaactactaaaaaaaatccgttaaagagaaattatattattattatgatttataaaatataattgtgtcagttttttattcgttttattctataatctcttcagaattccagcaaaaaaaaaaatctataatctcttatttaaatatgtattttttaaatcacactaaacattatttatccaattaccaaggcttgatagtttatacgattttattttaatttttacccttttacggcttattaataattaattattattgttggcgaattattaattataaatgtatctttttgtaaattatatgatcttatcatacatctctttaacaagtctaatatatcggtgtataatgtatatgttattttttgttttgctgtcacttccttagtatttttctatatgcgattattttttctttgtaattcttgtaacaaaaagtctctagggtgagaaaaatattttttatatatatgttttctcattatttgagtagatgattaattttgtaaaatataaaatttaaaaggtgttttaaaaaaatatgagagcttattattattatt

SEQ ID NO: 69076 - DNA, 739 bp, Cannabis sativa
caaaaaatatgagtgaaaaaatgggtttttatagctagaattacttctaatttattacagaaatgttaaatagcaaggcacttgtggtgtagtgtctataagagccctcacaattgaattggtaaattgagcattgttattgggcactagtggtgcctagcacgtctagacatgtcactttgcgatttgctaataatactccctaaaaattattatattaaactatatgagatctgatacttaattggatcaatagcgataattacacataagaggatactaggcaccactgataccttttagcatttctcgtggtaaaatagctattagttacaaaaaaaaaaaaaaaatagcttagaggtaaaaaaaatagtgaaaaatgatactccattaaatgatttatgtattagagcatctttaataaagtgtccaaatagtggtatattactatattttaacacatttaagaaaaattattgctccaacgctgttctaaaaaaagtgtactaactttgacacgtgctaaaaaattgtaccaattaatttagtacaagatataatattatgccaaatttatcttacaatatatgctattttttatttactataatactaataattattatgatttattaacttttattaaaatttatcttctttatttaccatattaccattatataaataataaaatgataaaaataataatttatgtatattctcaataaaatgttaaatg

SEQ ID NO: 69077 - DNA, 1800 bp, Cannabis sativa
ttattattattattagaataaataaatattattttgagcttgtgtttttataaaatttattaattggattatttattttgttaaatgataaataaatcttgctgtttttactaaaatagtatagataggaccctgagtttaatttttgataatttttttttaatataactaacttgaaattacgaacagatacaaaaaatataaacagttttatcataatacttttagagcggattattattaaattttattttgataaaaagattaatttaagatcctatttttactattctgaaaaatacaaatctattttatcatttaacaaaataaaaaatttaatcattaaaacataaaattatgatatttatcattattattattattattattattattattaacacaaactaaaactaattaaaagtaacaaaagacaacaacggttgttaaatatatatagcaacgcacgaggtatgccataagattcctgaacttgaatgtaagatttaattaattttattatataaataaaaattgggaaaataaaggctattcatcatctcttataattattgaacaacgtgagcttagtctgtctttacactaaagccaaggtggaaattcaatttattatttaatccttcgatatagctctttgttttttttttcatataaattaaataagattttttcttggggttggggtttttgattgagatcattaatattataatatatataataatgttttatctgtataaacaaataactggtttataaaaatatagttttgattaatgattatcattaatggtgttaagagagtatgattgaagctaatattctctatgaccgtatatggtacttttttcaactttattatcttcttgtacttgatccaccatgcaccactttttaagacatgattattatgatcttattactttattttaaaaccagcttcatcttatatatttgtggttaccatctatttggttatgatctccaggttcagattaataaagtttatgaatatatgtgataaaaaagagccattgattcagttcatgattttgaacaatggattttgtcccctttagctggcatgtttgcactataaagttaaagttatatatatacatacaaactataattaatcctatttgagtggatatatcatatatagatttaatggtacgttgcttttccaattcattgtatcaaaactcactggtccacgttaatgaatatataagtatctacttgtagagtaatatgaagttgtctattgatcatcttgtcttagaatttctttccaagccatgaaaagataattgtaaaataagaaaaagaagtcatttttagtttcttataataatccttcgccagatatatattcaatcattcgatttactttaaatatgtttatcatgattaatatataattgtactcaaagttcatgaaagtctcatttttgatcactttatcactttttctttttttacccttttcagtttttacttgagtcaaattaaggtgatcccggacttcaataaattaataaatatatttatataggccaattatgtaaaatttcactatcttttgaaccattagattgatgaaaagtatgtatttgttggtatcataagtaggttgatatgtctctatatacctaaaaacaaaggtatgagacttgaatgaaagggaaatttgattttctatacttaaaaaattttaatattttattcttaaatcaatacatttcaaattaaaaaatatatgacacttttatctaa

SEQ ID NO: 69078 - DNA, 4687 bp, Cannabis sativa
  modified_base (48)..(49): a, c, t, g, unknown or other
  modified_base (365)..(380): a, c, t, g, unknown or other
aatcgtgaaaatatttaaaattctgtgaaaccatatttttataatttnntttttgttgtttttgtatatttgtgaaattatcccaatattgtagtccatatcgatcccagtctgggttaaagcaagctagggtccatctaaatctagagtctagaaaaaaacttaattacaaaaaggaaacttacaaaaatactagaattttggttcacttttacaaaaatactgtcacacgaaaatcttttcaaaaataccgtatttttataaaacaacagtagaacacaaaacagaacaactaaaaacaatcgtggaataactaaaaaaataaccgtagaacaacagtgaaaacttaacacagtacacagtannnnnnnnnnnnnnnntttttgaaaaaaattccgccccacggtataaatgtaaaaaaattaaaaatttcagtatatggtgtaattatccccttacaaaatgctatacaattagacaaaatattctcacattaattaccacatactaaacctaatttaccagttatatatttccaaaatcagttaattaaataaaaaaattgtatttattaagcaatctgttactttttactattttttttttttttttgaaataaacttgtgcttcaatagataaaacagaaagtacaaagcaaataagtttacaaaaaagataaaagaccattccaaaccaactcattatctaatcctagacctaacttagcaactttatgagccaacttattggactttctatgaacatagactatagttaggttaggactgaacgacaacaagttcttgacacaaattaaaatgtcatccagaaggctactattccaattacaagaaacaagcttatcaacaatagttttacaatcaattttgagaacatccaaaggaagataaatcaattgagcccattgtatggcttgaaggatagcctttgcttccgctacagcaggaggaacgcttccaagaaagggtttggaaaaccgtgatttaacctggtttaattcatccataacaacgacaccaatactatgtttcttgcaattgagatcaatggttgcatttgtgaaaatctgaagggtacccatggaaacagatttcaaagcattatttggtgcagtagcagaatgattaggttggtttcgaatctgctgcacatccaaatacttgaagaaaaagttaacactccaatcaaacacttcattaggaggaagagcatgatgtttatgaaaaatattattcctttgattccaaagagcccacaaaaagcaatataatatattaatataatctttatctaatacattagtaatacttagtaaaaattcattaatatcaaaatatttataattataataatgtgttgtaaatcttgaagatttctaagctttcctcgatctggagcagtctagcagagcgtgcctaatagtttcaggactcagcttgcaaagagtacatatgggagaatcaataacactcttcttaaaaagggaggaagctacagtaatagcattagacaacactctccaaacaaaatatttaacttttgagggtgttttagagttccaaatcttgttccaaaatttttttgaatcagaaaaggaagaggaagagggaatatcttgcttggaaagagctaaatgataggcaaattttacactaaaaatgctagaattttctctttcccaaataatctcatctttattatgaaaaccagtaacagggacttcaagaatatcattgatcaaaggctcttcaaaatgggttctaagtttagccaaatcccaagttcctaaatcatcaatgagataagaaagcagacatgaggtaggagcaccattagcattataagatttaagcttgttattgggaatccagtggtcctcctcagttctaatatgttccccatctccaatcttccaaataagacccgaagccatcagatctctctcccaaataatacttctccaagtaaaagaaggactgtgagcaggaacagcctcaaggatagatgagcggggaaaatacctagccttgaaaaccaaactaagaagggggttggggttcttaaaaattcgccaagcctgcttagctagcatagcttggttaaaatggattagggatcgaaaaccaagcccccccataaacttagattgacacacagatttccaggatttccaacgattttttttaaattcccagtagaaccccaccagaacctagccatcgcagctccaattcctttacacaacttgatgggcaacctgaaacaagccatcacataggcagggatggcctgaatcacagccttaagaagaacctccctaccagccctagaaaaacacttagcagaccaattactaagaacaaaaataaatttatctttaaggaaagcaaaagagtgatacttagatctagaaatacactgggaaagacctaaatatttactaatgaaaggtctatcctctatgttaagagtagtaaagaaaaggtttctaacatcctgcaagatattaggagagaaaaggacaaaagatttagaaaaattaataacccgatccaatgctctagagtaaatgttaaaaatgtcttaaagtgcattacaagaactcctatcagcaaaacaaaatataagactatcatctgcaaaaaagatgtgagagatggagggagctcttctagagatagcaatccctttgagaagaccctcatcttgcctagccctaaaaagagaagacaatcctttcgcacaaaggataaagagataaggggataaatgattcccttgcctaagacccctagaaggtttgagagaacctttaactacaccattgattaaaaaagaaaaactagtggtataaatgcatttcataacaagattaacaaaactaataaggaaattaacgggatgaattcctctattaaggagaccaagatctcacaagaggagaagagagatcgcacacttgctagaaggctaaaaacaaaacactactgtcctaataaaattacttttcattaaaatttgaatggtcataatttgccattaatttgttatataggaaaatttgcggtaaaagtcctcaaaaacttagggttgatgcagattagtctccaacctaaaaaattggcagtaatatagtccccaaggtgacattttctgtaagtccgttgatcccttttctagcggatccgttaaacccaaataaagtgtcacgtgtcaattttttattggtccaaataataattttaattaaaataatttaaaataaaataaaaaagtaaaaaatatattttaaaattataaatttattttattttatattattttattatatatttcctttttatttgttttcttattcatcttcttcaaccagccacaatgtttgaccggagcaccaccacgaccccaaccacatcccgactgtcagcattctcagccgaccccagccaaccctagccacccccactctagccctgtcaattggacaccaaaaactaacccattttgaaataattttttttaaaataaaataaaataataaaattaaaaaaaccctaatttttaccagctgaaactctctctgtgccgaactcatagttttttttttttttgaattttgacaaaggtttgcagatgtcttgtgtgggattagatcgaaggcttcctctagcaaggacaacgatgatggtgaaaacgacctcagaaaaagaatctaaagatcgttgcttctcgccgatcttcaaagtccggtgaggcaaaatggatggcctactccaaaccctcatgcaccattgacctgcaaagacattgaggaagaagagaagaactgtggtggtagacgattgggcataggtctgaccgagaatagcagagagagaaatcgacgtttcaaggggtgctacatctactggtggtgcccgtttgggtgttacgatgccaaagataaccaatttggtctgaagatctgatgatctcaaagaatgtagagggaagaagaggcggaggaagatggcgtctgtggggttgagggttgggggttggtggtggtggcagtgggaagaagaagaagaagacgaagaataaaaaagaaaaagaaaaaagaaattatttttaaataatttttttattttttttatttttaaaaattaaaataataatttaggccaataatattttgacatgtggcaatttttaaaaagtaaacaactcagttaaaattaggactaacagccaaatgaaaaacattaccgctatttttcaaggttggggacttatctgtatcaaactgaactttttgaggactttttccgcaaatttcccttttatatgtaataggttaatgcattctttagttaatagattctatttttctactaacagtactgttatagttttctaagagttgaataataattttatttttatttatatgaacagagcatgttagtatgattttattccggcaattgcaaatcaccattaacgccgacaaattgacctgagaaaaaaatcaacccaaagcaatcaataaaaaagctgcagaaaaacggatttgaaacgttaaaataaatccccccatataccccattttttcagttgaatctcattctctcgccaaatgtctctctctgggttagtatcttgactttctctctctctctctctc

SEQ ID NO: 69079 - DNA, 1090 bp, Cannabis sativa
aaaaaaaacgtatatttttactagttataaatatattttatatttataattaatctatattttttaccaatatatatctttattatttgataaattacatgtttattaaaaaatgagtcaattattagccatcaaaatagttacaaaaatttaattatggtaatttgattcattaatacatctaatataattaaattaacaatttgtatgattttatataaatatgttttcaaatgtgtacatttttataattgatttttttttgcacactttttataactaattaaaatgatgtatacatttatataaaatgcctttgtatactaatttgagtttattttagtgatttgtatacttacattttgaataatcttcctctgcttgtgtgagctttccgtactcttatacaaatttattttcaatttggttgagctgtattcttacaaaaaaaatataatcttacttcgattttcgcttagtcataattctttacaaatcaaacaaaaccccatttccaattcaaacaacgtgttgtttcccctcacctcacagttacattccttgctcttattttcagcatattacagcgacatatgtgccggttctatcgcctgccggctcgagattgagaagaaagagagcggtggtgctcctgccgctgccgtttacataatgactttaggtgttttagcaccctatcgaggaataggaatcggttcaaaactcctaaaccatgttcttgatctcagctcaaaccaaaacatttctaaagtttatttacatgtgcagacaaataacgaagacgccataaatttctacaagaaattcgggttcgaaatcactgaaactattcacaactactataccaacatcacaccaccagattgctatgttcttaccaaacatatcggtacccaaactcaacccaagaactaattttaagtctctttttttgttgcttgggcaatctttctcagatggtgtcattttttttatacaaacattttgaggctaaggcattattattattattattggtattaattaagaagttcatttttgactttgactttttattgatcaaattaga

SEQ ID NO: 69080 - DNA, 1083 bp, Cannabis sativa
ttttggcaaaattttggagttttgggcccatcctccacctcccacaacactgaaaaactacacagatttcaagtttcatataaatattaaggttaatagccgcgtaagtaactaaattttgagtttttaaacaacataaatctaataatttttttaacggtagaaatatttaatgttcataaaattataatttctctttggtttcgttaatactgagatctaatattgtcttaaacatgacatattctagcttattgggtttgaatagaaacatgtagtatcaattatatctaaatcttcttttaataaatttaaaacggagattgtactgacaaaactggaggaaaattataattttacaaacatttggttcttatgccgttaaaaaaaattattaggtttatgctgcttacaaattcaagactttaggtatttagaccatctccaatggcttattttttacacttaatccctttattttttttttggtggcaaaactcccttatgtttatttttctttgcaaatttgaggtaccagctggatatcaccgttaaataccgattgtattattactgtattgacttcgaagttttaatttcacttatctacacaggtgtacacagtagttatccaattgacattattcgtttgtgatttcacctcttgttcaacacatttcctctctttcttatctccatcgttaaaactttcttctcccagccctaattctctagatgaacatgacccagttgggtcccagagccccctgggagacgtacagaatttaaaataattcactctcaatgtcgcgatagtgatagagctatgtctacttcgagtccttatttctcatgagaattacaaagagatttgactaagaaaatagcttaaatttctagagagagaaagtagagagatgctctgaccttgtggggacttagttgaatgtaaaaaatgaactagtgaagctctccttttatagggaatgaatacctattaaacaaaaaaatatgaaaaaatcactttgggttgatcttggccattattgagaatctaatggctaaaattgactcttgatgaaa

SEQ ID NO: 69081 - DNA, 6012 bp, Cannabis sativa
cactgagggggcaggggtcatcatagcagatggggacatagacatttggacaaaaccttggattccatggaaatcaatccaagacatcagagagggctttcactacaataggatacatgctttcaacaaagtttcagacctgttcattgatggaaccaggacttggaatgtgcccctaatacaatcctgcttcgatagagatctagctgaggcaatcatcaacatcaagcctattcaagacgggagtgatctcctcttctggaatccggccaaagaaggaaaattttctgtcaaaagtgcccattagttataccaacatcaaaggtttagcaatccaaacagtgtgtggaaagaattatggaagaaaaagattcacccaagattaaccatgatgatatggaaaatactgggggattgtcttccaacttctggaaagatgtatttcctaaacaatcctgatagacattgcctcttatgcaatagtgagactgaagatgccttccaccttatagccaaatgtaatgtcaccagaggattatggttcaaaagtaaatggggattaagacttgactcaatgggctggaacaatgtcatggactttggaaaatggtggactaatctctctgaccatgaattgttgattttctcggcctgtttgtatgataccatatggttttggcgcaacaacatctttcacaatcactgctcctgggacactcatctaatttataatgactgtctcaaatgttttgtggaattctcctcgagtgatgtggtgatcgaagcaaacgaggaagacagacatcttttggaaaagaaggattggactacagctatgcccaaaaacactactacattcacagttgatgcttccgtagctgaaggctgggttgggattgctgctattaactctatggggactctgctgtggattactgcctagccagcagcgctctagaaggtgaacttgctgctatttccttagcgctctcttttgcttctgaggcggggtttaagagaatcaaaattgaatctgactgtagtgtggctgtcaatggtctcaatcttggttctctccctatgtcttggggctctttcccggtctttaaggaatgtttatttaaatgtaagaactttgattttgttatctttgttttaattagccgtgatgctaatggctctgcggattctctcgcccgttgggctcgtaatgagaagatccacgcccagagtgttttaagggaagtgaccccctgttgtggtcactaggctttttgctggtttaaataaaatcttagactaattatcaaaaaaaaaaaaaaaagtacaaaattgactatattaaataaaattgtttaaataaatttggagagtaactaagtatggtttgctaaaatttgatccttgtttcgaaaattctttttttaccaaacatgtttaatgaaatattattacctttttaattaaaaaaaaaaaaaaaaaaaaaaccgtttaaataagtattactcacatctttacttttagctagcaaactacacattaggtgggacaattgcatagataattctcatcacattgttgtctttggatcttcttttgtgagagaaaaaataaaataaaataaaaaataaaagcttccttaatctaaaatcaaatgactttatatttgcctcatgattataactagtgtggtagtagtagtaagaaattgacacaaaaaactgaggcctaaaatagtggaaattactttcattagcagggtatgaacaagacaatcatcattaaaggggtaatgatttattttcataaaagttggtgagtaacacaacactggaaaaaacaaaaggtaatggatggtggacctcacaataattcttctactagtttcctactgattttcatttccttcttttgcagctttaccctgttaaataaggcataaaaaagtgtatgaagaagacaagtagctcttttatatttttatatgctttgatctaactttgttaagtttggtaaaaattacgaccaaaatcttcacacaaatctttagaatgtcaactttggaggtttgcttgtcattatcataatgagatacgtttctgaagcagtcttaacactcactcactctctccttattaagctcaaaaaggtttcaaaaccatagccaatcatcaccaccattcaccaaccaaacatcttccattttattatttcatgtgctttcttccatatcagtaaggtgagtagtactcttgaattaaaaactaatactccttcatgctccaagaagttccctctttctttctcatttcatagacttttgcttaaagaagtaactttttcttatgaagataataaattagcaagaaaggtgtaattgttaccaaaatcccataaagataaagctgtcttttttttttcttttgtattgtgatctttttgacatgtccagttcgcttgcattcaagagaagaaatggtactgttgttcacccaaatcctcttcttcctcctcctcttgctccaccactttcaattccttctaatagtgttaatggagaagtagtaaagcccacaccaacacaagcaccaaccccatcttccttttctttaagcaaaatcagcccaattcttcttttggtcataatacttttaactgctatcttcttcatttatggtcttgtccacctgcttctaagatttctcatgaaaagaccatcaacttcaccaatcttccaatctaataggtacccagaaaactctagctctcatgttcttcaaagacagctcaggcagctctttcggctacatgattcaggtctagaccaagccattatagatgctttacctgttttctattacaaagaaataatcatgggctcaaaggaaccatttgattgtgctgtttgtttatgtgagttttctgaccaagatgagctgaggttacttcccccatgtggccatgcttttcacatccattgtattgatacatggcttctctcaaactcaacatgtccactttgtagaaggacccttttcagatctgaccttttgttggaaaatccaatactctcaaactttgacgattcttttgatatgtcaaatgtgctcagaagtgaaaatgaggagagtagaggacattcaagcaaccaagaaagtatgaatgggaacaagagagtgttttcagttagacttggaaaatatagaagtgtcaatggagttggagagaccagtagtagctgtaacttggatgctagaagatgttactcaatgggaacatttcagtatgtggttaatgactctaatttgcaagtggtgaagcttgtcaaggagggagttcatcgaggcaagttttcgttgaataatggagattttgagggtaagaaaatcagtagcaggcaaaagggtgatagcttctctgtttcaaagatctggctttggtctaaaaacggcagattcccaagctgttctgatactgatatcagtatgccagcctctctcaatgtaagttttccaatcagtaatgaaactcacacttcacaaatggtttaacataatgagtgtgtatacagtatatgtataacacacaattttgtgttacttattttgttttgtgttcttcttcttgttatgacagattcatagcatttttgtatattagccttagttctgtctatgtttttttgtaagtagatgctggaagaacaaaaatctcaaaactgtgccttccttaattagtagatattatgtattacaaaaaggaaaattattctttattaccattaaagtaaggtcatccatccatagaaatatcttatgaacaaaaattggtttaagttgacatgaaaagcctactcttgaaaagcaaaataaataaataatacaaataataatataagatcgtacattaaccatcaaagatcaacctcaatcatgagaaaatacctaaatacaatattattgaaagtaaaacaaagatccactcatcccatgaatatcaacaactctcgttgaacgaacaggagaagggatcagtgaccaactggacagacgagatcaaaacaagggtaacagtgactctaacaaaccaacccagtggaacatcgcctcaagaaatattaacccgatcaaagaaaaagaacaagttggacggtgggataggagtaggtcccctcatcgactctataagtattctgcaaggaaagagtaacaaaggtatatttgccaatatttacaaaaaagaaaaaggaaagaaaaagggtatacttgtcaataaaattagttttttttttaggggaaaaaatacgtaattaatgaaaacatatttattattaggatattacttcatatattatttttttttaactttttttttttcaaatttacggtttggatttctaaggagatttctatgtgggttgctatacgaattttgattgcgatttaaattgctctgttagttgcaataaaagtttttatgtgaaattccataaaaataccaaaaaaaaaaaacaatttaaaagtgtaaacataaaaaaaataccaaaattcaaaagaaaaaaaagaaacttgcttaccaaaagctactaccttcaatccctaagaattgctgagaaaatgagaaaatgtaagaaaaatcgaggtccttaaactctaggtggaatcgacccctagagagaaacagagaaagacttgagctttttttctaacttttctttacctaattgcaattactattaatttctaatctatctaaattaatatctcagccactaataaaataaaggaaatgttgatttcctaataattcactaatgccaaaagagggcaaaattaccaatttgtccttcccttcactaagaagtaaccttgaaatctaaatgtattttggtcaaacctataaccccaaacactcctaatattcttaatgtctaactaaatcgtcccgctatttctaaaatactaaaccattaaaaggtgactctaccggccaaacgtcgcgttctactattatcgggcataaaatatgaaaaacataatattttacatataacctaattagcacacctagaattcaaatatatctccacatttgcataaataataattaaaagtttgaattctgaattaaactctaattatctacaaatttcatattaaagctaagcaatcattacaattatccctcgttaaattttgtcctcaaaatttaacctgaataactctgaatattaagctctcatattgcactccaactcccaagttgcttcctccatcttatggtttctccaaagtaccttgaccaaagttatggtcttgttttgaaggactttatcctttctttcaaggattttcacttgttgctcttcataagacaaatctagctggagttctaagtttttgtagctcaggacatgagtgggatctgaaacgtatttctgtaacatagaaacatgaaatacgctatgaactgctaatagtgttagagtcaaggttagacggtaagctaccaatccaaccttttcaagaatctcgaaaggtcctgtaaacttagggcataacttgcccttgttcccgaaacgcttaatcctcttcatcggatatactcgtaggaagacatgatctcttacccaaaattcaacattcctgtgttttagatctgcatagctcttttgcctacactaagaggcaagcattctggcctcgatcttctttattgcctcactagtccgttgtactgattctaacctaaatatttcctttctccagtttcatcccagtgaattggagatctgtacttcctaccatacgacatctcatagggaaccattcctatagtattttgatagttattattgtatgaaaactttataagtggtaagtacttactccaggagccttcaaaatccatcacacaggctcgcagcatatcttcaaatattggaatcattctctcagactgaacatctgtctgaggatggaaagttgtactaaatttcagctttgtacccat

SEQ ID NO: 69082 - DNA, 1198 bp, Cannabis sativa
tgtgtatatgcagaaggaagaaaatatgcagagaaagcgaaagaaggcaagacttatgtaggaatacaaaatcaccttaatattggtgagccattggattactcaagctttgaatttgaaacatttgaagcaagttctcccttctctttaccaccctacagttccccctcaccccaaaactctcctcctttcttagcatttccaccactttcaccccaaacaccctcatcaatcccaactcttcctccaccaggtccaaccccacctataaaccctccactccctcctaccccaccagctccactttcggttccagtagtaccacccccctatgggctaagcccaccaaaatcaggcccaagcccaagcccaccacaactcaacactccccctatgacttatccagttgggccagtcccaccaccaccaccgtcttcttcaggacccaataacggaacaccccctgaccacaagaagccacaatctgcagtgtggtgcgttgggaagcccacagttcctgactcgatcatgcaaccggcgttggactatgcgtgcgggacaggagcagattgcaagtcaattcagcccaatgggccttgctacctacccaatactttactggcccacgcttcctacgctttcaacagttacttccagaaggccaagcttgctggtggcacctgtgattttggagggaccgcaatgatcgtcacggacgacccaagtaagccttttttttttatttctaattatatattctcgttttgtgaaatgcttttagtcccaaaaaaaaaaaaacaaaataataataaaaaaataagaaaaacattgcaaatggcacaggaaaatgatagaactacagtgaagaaaatgtgttggtatgatctttaccagaacattttttttagagttattgaagatggttgagaaaattttgttgatgatatagtatttgtggacgagtgtaactttaccccactttctgacacgttggtgattaggcttatgatgggtgctatttggatacatatcaatactataactattaccaagtcaaaataaatattataaaattctcatctataactcacctcacttttattttgggaaaaatatctaaaattagtttgtataaatattgggaaattacttatgtattttgttttattttttatttttaaatttacagtttagattg

SEQ ID NO: 69083 - DNA, 848 bp, Cannabis sativa
tgctgtgttgtcatctccatcacgaatccaagtgagtttggctttttgatgaagaaaggatagatagctagtatgagcatcagaataattttgcctcaagccagtgcctatattattgtcattgagaatatcaataaaatatcaaaagtataatctagttagataataaatatgcatacgtaaaataaatattatgatattacacttaaattatggaaatcaaaataaaatataacaaactaaaattaccatcttcgagcaatgcttgtgtttgaagtatttcttcttcatccatgtactctcgcacaacaatgggttgatgtgatctgctccactaattcttgagataaattaatgcttcaaccatccttgggctaagtgaactcctaaaaggatctaaaatctgacccccaacagagaatgtcgcctcaaaagcaacagtagtaaccggtatatctaacacatcacgtgccatgagtgacaatatcttgtatttgcacccactactagcccaccatcctaaaacatcaaattgttgagttggttccttagcttcctcttcaaaatacttatcaagttcatttttcatcttgccgtcattttctccattcttcatgccacgaactcatcatggacattacgagacttcttgcctttaggtcgactagaaacgatcaatgaagaagaaccaccatcattaataggtttagcttgtgattgagtgattgagggttccaatacttgatgctgaatcattatattgattaaacattctccaaatcgtttgttccacccctttcaccatctctttgcattctaactttgtatgagtaaagctaaaataatga

SEQ ID NO: 69084 - DNA, 604 bp, Cannabis sativa
atatatttctaaatttaaatatcataattcattacagaatttattccaaaaaaaatatatcataattcattaaaattataccaaaatcaaagattattagaggaaaataaaggatacaattttgaaaaaaaaaaataaagataaaacaagggagaaactagatcagattataggctatagccgcggaccagatcgatgttgtggccatcataattccaacgagttgtgcacctccgatcctgagtaagagcgaaattgatgaacgcagtgagcaccgaagcctttagctttcgcctaaaagccatggtcaggcaaacaacatcccttgagcaagtatatcgctaaacaaaaccatagtgattcaattactgaataaagacttgaacactaacaaaaaaaactacaataaactcaacaaacccatctacgagcgaaagagatactccgtgatatccttacaatttattattcagtatatcaaaatattacatgtatatgtcaaggcttgataaaataacacaaatagtgcaagaaattaattcgccaattcaaggttcagttctttcaagtacaacctatataaggatatagtcttatagaaata

SEQ ID NO: 69085 - DNA, 675 bp, Cannabis sativa
  modified_base (627)..(629): a, c, t, g, unknown or other
tgtaatggctgatattgtttgataaaataccactatctcatttacaagaaaattaaagaaaaggaaaaaaaattcatttcactctcaattctctctcattttttaaacccatagaaccaactaaggttgggttttcttcagcaactctaggggatttccagctaagtttcaagtgaatccaagccaaggtaaagcttttgcaacctcctttttggttttcttgaagtgtaaggaaagaaagtttatgcatgctttgtaattttgttgttgtggctgctgttagagtttagttttgttttctaaagcttaattatgtttagatacatggatttaagcaatttttgtggttgttggttggcgttaataaagtttggagttttgaactcaaactttagtctttaatggtgaaatttgattttgaggttcggttgttgttttgttgcttgggttttgttctttatggtctaaataacaagtctggaaagtttggcttgaattggggttactttgattgagatatggaaattttggtctttcctgcactgaaccgaaattccggtttagaggggcctgtaggaatcgagattccggttggctccgaggaattttttcccagaaccggaattnnngttggggaaccggtctaccggctggggcagttttgggaaccctagt

SEQ ID NO: 69086 - DNA, 1761 bp, Cannabis sativa
agactataaattacctaagtaaatttgctattacatagaatttagtaataggaatagaatcatattaaaccataatcaatagatgcaattaaaatagaagaccataacttttaatcatcgttaatttacatattaattacttgtttcctgtttttactgtttctttatcgttttttaattttaattttctcttaatttcgatataactaaatagaagtaaatgtttaattttaaagtacttcactataatccttgtgggatcgacctcactctttgtgagtctataacttatctacaatgcgtatatttacgtattaaaaataccacaacagaatactaaatgagtaatataactaaaaaatgtttacacatatagcaaccactttcatacaaatgattactctatcaattcaatccacacatatatgacccatttggcacatcttttaaaaaaactaaaatctacttcttaaataaattgtgataaaaaaatatttgataaaccattcaaaaaaaaaaaaaaaaattatagagaaactacccctagaagataaaattgttacaactcaactttttaaaaaatactggtttgatttacttaaaatatatttacttatttattatataataaataaattataataaaataaataatatttaaatattcttttttttttattttgctttaaaagaatattttatattttatatttttattattaatattccacatcaacttagagtttctcatatatttgaatttttaattttttttacatgtaataaaaatataatataatttgttttatcaaatacatctaaatttatactttaaggagaaaataattaaaaatataaaaattttatatagcataagtttttatatgtttgtaattataatcaactaaattataacattatcagtatcaatataatagaattttaacaactcacaacactttaaaatttataatttaccaaacattctgtttaacttttttctatagttttatgtagctgttttttctcaaacataactataattattttccccacaacacaactatatatatataaatttttaaatgtatttaaatatatgtgaattagatttgattgttatatttatatgtcaatcaacatctaatttatacaagtgtaaattttttatttttcaatccaatctaatctgcacaagtgcacagtttgcatattaaattgaatcatgcgaattgaattaaattgagtattttataaacacccaaatctcaattttcaagtcgtgtgtttagaaaatattattggagatgctcttatgtcgtatttttttttttttatttattgaatttatttatgttaaaatgatttatttgttgagaatattgtactatataccataaaaatggtatataaaaccttaaatagtgaaagagtgttgtactatagacaagaaaaaagcctctctcttcttatctccaattttttttttatggatagataacatttctaccaaaatcttcatcttcttcattttcacaaacactaaacacaacacaacacagagagagagagctctttttttcaacaatggcgacctgtactacaaccacaacaacaacaacatcttcttcgctcgtgctatcatacgccacctcttctgtacacccacaagatatcagcatcaacatccactcttctcttctctccttcaaaccaaaacccctttcaagaactttttctctctacccacttgttctgagg

SEQ ID NO: 69087 - DNA, 1403 bp, Cannabis sativa
  modified_base (255)..(257): a, c, t, g, unknown or other
  modified_base (1067)..(1071): a, c, t, g, unknown or other
aagtgaggtcaacattttggtgctttcattgagaggggaatcaaggatcgctcttgattccaaatttcatcacaagtacgattgtggtacagacttgtaggggtgtgattgatccagcatatgcacaggtggtggatccggcattgcagaacccaggaaacacaagggttctgccagccgtaaatcccggacagccatcaactgggggtcccggtgtgacgactcctatggatgaaatcgcgcctagtgtgcaannnactgggaataccagttcagcagccgaccagggcattcacagcacagctgttgtgccagcttccaatgttcaaacaacctattagagatgacactaagatctagaatctcggtgctgctcttagactcatgcagagtcataccaagaccctacatcatgattaagaggaactccgtggtgcggtaaatctcgagtttgaagagcaaatgctcatgtttgatgaatggagggacaaagagatggaagcgttaagggctcatcatgcagtcattgataatcgtagtcggcaagccactgtgctgatacgaaaagcctatcagactatcgggcatcaacctacaaatgtcattcctttggctgaaacagatgaagatccaacgatgaatacctcatagactataaatggtcggctgcaaaatcccccggcacaggttctacctgtgggccaagtagtaggtgcgcagaccttgtctagtaattcatcaagagaagtcatacccaacaattccaaccaggttaatggtgctggtcagcacattagccaaaccaaccaatcactgagccagccaggcgtttttgtatttgataggttggggacgaatcatgacctcagaaatgatctgaataggaggagaggagtggacgattagcgtgacacgctgatcgtgcagcccggaacccgcgctcaaatttccgctcagaaagatactgatgtgacttagatcggccgaaatgccgaacaggttagtccagccatgcaggcacagctagacaaactaaagagtatgttccaaggcatggccagtcagannnnnaatgatctcgagttggaccgagcacgtggaacccctttctcccctgagatcaatatcttggagttgccccacaagtttaaaatgcaacatggaagatgtacactggaaaagaagatcctttgtcccaccttaactatttcgagatgcaaatggatctgcaagcagtacgaggagacgtatgtgtcagaatttttcctgccaccctctcggaagccgccccgtaatggtatttcaagctggcacatggaaagttcaactcatggaaagctttctcctcgggattccatgcgcagttttcctcatctcgccaacttcggtttcacctaggagac

SEQ ID NO: 69088 - DNA, 1061 bp, Cannabis sativa
  modified_base (1001)..(1021): a, c, t, g, unknown or other
ttgggtctcggtggttcgtggtcgtggtggtcgtgagtcgtcgtcgttcgtctttgagaaatggagagagacagattgaggggtgaggccagttcgtgggtttgtgggtgattgaggggtgaggtcggctggagattggtggagaaggttgggtcgactggtggagaaggttcgtgggtcgcgtgaagaaaggaggacagagagagagggaaagtctgagaaagagagggaaaatttaatttaggggtattttaggaatcttttaaaattaatggaatcaatttgtacaaattataaatgggtctaaattttgatatggggtattttattaggaccaaaaagtaaaattttcctacaaaattaaaaaaaaaaaaaaaaaatactttgcgtgtcatattcccatttgtttcaatcttttttctcacttacattatcttacctcatttaccctctttaatcattaataaaaatatatttttgtaatattttgcagtttatttggatttgatctctaattgatttacatattgtaatgagagtgatatcttattttgttttttgtttattctgttgtgtttaagttattatttttctaggtttttatttattttatttttaactaaaaaaatagtatttttgtaattttaaaaatattaaaaaaatattttttaaaatttaaagttgtaaaactattaaaaaaaaaataggaacaataaaaatgtaaaaataacatcagaaataaataattatgtacgtaatctttataagaattgtaatgtattttgacattttgaaataagaataataataatatagaaacccaaaatattaaaatttaaaaataaatggtgaatggaaaatctgtcatgtggtgtaaatggtggtacttagtcaatccattgtcttatcttcctagcaaaatagtctcaaatttaatgtgttgtttacttgaaatagtgtgttttaccctccttttaaggctcgtttggaacgtcgtattnnnnnnnnnnnnnnnnnnnnntattatattgaattgtattttatgtaatatttttatgtaa

SEQ ID NO: 69089 - DNA, 1524 bp, Cannabis sativa
ggcggtggtcggcgagagggtttcgagctctctggtttggctgggctgctgtttggttcgagtgaggaagatgaggaaatgagacacagagagttttcttatataaccttatggcgtcggttcctttataggaaccgatggcatagggtacacgtgtcagcaaaccgtgtaccctatgccgtcgggtcctataaaggaaccgacgccatagggcttgtcattaaaaaaataataatttatttcccaaccgcctctaaatagtataatgcaaatttacacctacggtttttatcaaaaaactgcctctaaatgtcaaatgcgaacaaagcgggtattttttacaccctttagcttctctttttataaatgaggtgaaaaaacagcctctaaaaatcaacattgtcgtcgcggattatgaattgctacatttaatcatgtgtgattttgatcaccacgtcaaaaaataaataaatttaatatgtatatttctgtaagaattttttacgattagggataactaagaataaactaatttatctgatggtaccctacccgtatgattagggtattacctattggattagagtatatgataaggtgaaagtatgaaaacatgtacgtacccaatgcgagtataggatagggtacacgtataggtgtatcttgccttattaccctacccgatcgtataaatagttatatatatatgtatatttgaatgcatttggtgtatatttggaaagtacataaaaaattacttttattatttattattatgtcatattgaacataatttaattgattttttttatcattatttttcttaaaatttatcgagatagaattacccgtgagtgtaccctatactcgttaaggtaatactacataccatactcgcaaaaataataggataataggggtaggctagggtatgcatggatgaaacttttttcataaggtagggtcatggaatatgcttacactacccatatttattttgtagaataacctaaaaaaggtaggtcgaagagggaacacttatgctcgaaggcactaaagattctgaccctggtgcttggtacagatgaacacggtggacgtgttaggggtatggggatgaacatcacctatacgtaatattttaagaccccacaccctaccaaaaagagacagtgagcatgtggtgaatgactgagctaaagacaagacttcaattgtaacgctctaaataattagacacgctacccaagatacttaagaaaccctaattccctaaacgggattactaataaaaatagcgcggaaattaaactttaattataattggaatgaaaataaacttgtaataatttaaactttacaaactaaaagttacaaaagtaattgggatcccaaaaatatttacaaaacactattacaagttcttttccatcggccgacctaagcggcaaaacagagtttcaaaatacatcactgttagaccccaacccgcatagcctagtgtggccggaacatgtacattcg

SEQ ID NO: 69090 - DNA, 539 bp, Cannabis sativa
tagatcacttgaagcaaaataatgacattctacaaagtagttttttcagctaccattctagttgttgtgtatgtgatttggtgagctaaaaatatagttctttgaaagaatagagtcattggaagagaaatcattgctagggatatcaaatatattgttcataataacaggataagcaagttcattcccattaaaactaaaattattgatattgattagttttggactttgaacaatgtatagataaatcttgattggttttgttgtcacctactgcgacttttgttggtggctgccttttgttgttatttggtagattttgaggggttgttaccctttttatagttgcatagtttgattttaataaaaattttataacttacttaaaaaaaatatcattatacaattagaagtaaaatattataaaacataaatccagctaaaaataataatatattatgctgctacactggcagcattaacatacaatgtctggtagacccgaaatgatcatttttggaatgataaccatgtacaaa

SEQ ID NO: 69091 - DNA, 1114 bp, Cannabis sativa
  modified_base (28)..(36): a, c, t, g, unknown or other
cataattaaacataaacaactgctaatnnnnnnnnnaactaagcgggctttacatatttttaactcatatttatagaggaaaaaaaataagagatttgattattgtgctatttattttatctattcataatgtgaactcacatggtaatgaaagagggttactttcatgtttagcattttgtcggttattgtaatttgtaggaggtagcaagaagaagttgactagtcaattagtcatggtcatattgctattaattcttaccaaattatattcaaatcacattatcaaagtacaaatcttttatacacacttttatttttaaaatacattagaattcaaataactacgactacaaaaataaaacttgaaatttccattcaatctcctatcttttcattctttctcagattatattattgcaaaagttttacataatcctcaacctctttgtggttgataagctcgaaacctctttgtacccccttcaactttcctttcttcttcttcatgttcatcttgatgtttttggtgcaattcatttgttttctctctctgttgggctttacatagccaaacaagataccatttcatatatagaagtaagtggctcatccttacgcaagagaaaaatatgagactacctaagtaaaatcttcaagagagtgaaacccaagtgaaaaccatcacttacttccataattcgcacgtcaagaagtctagcagatacgactcgaaaatccaatcggtgatttcgaaggtcaagcgacgatatcaatcactacaacaatttttactattaccggcggaaccatccgccggtattaataggccagatcgccggcaataattaataccggcagaatccgccggtaattatccgccgggactaattggtcgctattagtggttattagcgacgaaaatggtattacgccggtaataatattaataccggcggattaatagcggtggggtccgccggtattaatgcctgcacttttacacgcaggcgcattaataccggcggaccccactcattgctccgccggtattagtacttttaaatattaaaaaaaaaccattattttgattatttaatataattaaattaat

SEQ ID NO: 69092 - DNA, 559 bp, Cannabis sativa
  modified_base (43)..(68): a, c, t, g, unknown or other
ttaaatataaataaaaagtcacacccataaatttctcataaannnnnnnnnnnnnnnnnnnnnnnnnntttatatagaatagatatatgaaacacattactcatagacatcattggccaatcaaaaacgaaatcaatatgaaaattacaaacattataattctcactaccaaacactacttccataataaaccaaaaaggcaatcaatattcaatagaaatatattaaatttaattaacatgttagactatcaaatataaaagtcatagtcttcaagacttctcttttcctcttccaaaggctttatgagagtttgataaacccaaatgaaaaagctaagcaaattaacagtgcaatcttattattgcgagttcaactctttaagatgattccttttagactctattttctcctcgagttgttctcggtgaaatcccatgtctgcagtgcagccgcctttcacaattccaattcttcttcatgatgctctaacgactttgcactcacctccgccatggaaacattctcttcactctgtgcgttttcaatctaaaccata

SEQ ID NO: 69093 - DNA, 634 bp, Cannabis sativa
aaaatattctttgaacgtaaaaatataaatattttacaaaaaaatagtgccttatgtaattattcctttcttttttgtttaccaaataaatagggaaaaaaaaaaaaaagctaataagttgcatttaattttgtcattttctttgaaaaatatatgtttttacatataaaaattattattttgaaaagttagacaccacggtttaagttttaatctcaaacaattattaatatagttagaatttttttaaaacaaaaaaaattgtaaaaaagagataaagataaaaaaagaaaattaattaaaataaagcaaatagaagattaagagaaggtattgactcctattttataccgtgttatagatttgaaattcttgcacgttatatttataaagtgaaatgagcaacggtaattctgtaaattagataaaaatatcgtttgtaaatgtaattttcccaatgtttttttcttggccacaatttaatatgactactcagatttcctgtaaaccaatgcaggatggatagcgttcgaagagaagatctaaagctttggcggtctaggagcgtataattctgaacattttttgcatggctgctccggtgggggagagagtagctttggttgctctacgg

SEQ ID NO: 69094 - DNA, 770 bp, Cannabis sativa
ctagaaaaaaatcataaaccagaaaaaacaggaaaacctagactctcacaccatgtcacgaaggacaagacatttagaattttgattatatcgattgacaaccgtttgacagttttaagtgggtcctcaccaataaaatattagctgaatttttaaaaatactattcttttatgttttatttacaattttacgatttaaattttttaattataaaaatacgcttgtaaagattttaaattataaaaatacactttgctcagcaaaatgtaaaaaaatatctaaaaacaaggagaatcaatcttagatcaactataaataaactataaaacaactaaaaacaataaaaagagaacttcatgataactataaataaattataaaacaaaaaaaaatatttattatttttactaaagaggtattttataaataaaaaagtttaaagagaaaaaataaatttgtattaatgtatttttataattttttttttaaattttttagtttattatgtaaatttttcttaaattatgtagttacaaaacaatttacaaatgatcacaatcacaatacaaaactgtacgatgagacctcatcaacactttaccgattaataattatcaattaataacggcagccaagatggagatgttgatcctttgaatccaagagtgacctgtcaaattgatccaactatactagcctttaaaatcactaggccaacctttgaaattcatccaagaaaatgtctcatcgatgatttttctagacacaa

SEQ ID NO: 69095 - DNA, 1173 bp, Cannabis sativa
aatttttatgattatcttacttgttaggaaaatatgtttgattagcaaaaaatgttggcatactaattttatgttccttttctcggaaggtactgttattctcaagagaacttgaccattgatcatgttttgccaatttcacgcggtggcgaatgggaatgggaaaatttggtaagacgaaaacaattcattattacttgatgcaaactgcttccacaaacaataggaatatttcaaacacctcttgtcaaacacgaaaatatgagttgcaggccacaacttgtgtaactgcttaaaatgattctatgaatatcgatacgaatgctggcataatacttccgcattgttaggccctgcttttccatcttattgggccgtcatttcaccttaacttctatattagtatgatattgtccgttgtgaacctaagcccttacgatttttagttttggacaccttttcaaaaggcctcaagtagtgggactttgcatgatctcaaattctcgcaggaggatgcctggcaagattttctttaccttagtagatcatgctacccgaaattgtgagatttgttttttcttcataccattttcttaatcctaaaaagctttaaagaggagaatctgaaaccattgattttctcttaagggaacagagttgtgctagttacggttctaaccgacaaacaatatctttcccaggtgcttgaaggtttttgcaatgttgtgttttgttaacaggttacagcttgttctaaatgcaactcaaagaaaggacacaaaacaattgaagaagcaaatatgaagctaattaaggtacccaaggtaaaacttgttcgggttttattttatttatcgaaaactacaaaaactgttttgtgttctcgaaaatgacttgacaaacactcgttgattttgcaggccccgaaagaattcgacatacttgccataccccttacgaatgcagccataagaatgctgaaaatgaggaagggaactcccgaagaatggcgtcaatatctaccataactttctttttcgtctttgtcatttacagtcattaaatcatggctgttgtacattcatttgttctgtacatctgtggagataaatatctcagatgaatgaaaatttgtatagcaacaagtgcttaaccaccaatgctaatgtaagg

SEQ ID NO: 69096 - DNA, 701 bp, Cannabis sativa
aaatttaacaatttccatagttcgaggggaatttttaacagctaaaaaagttcagggagcacgatttactacatgtcaaaattcaggaaaaaaaaaagtagccttaaaacaatgactgcatcgtgtaatataagtactacactatttctttatttctatatatgtatatatatatatatatatatatatatatacacagtaatagactaagccttatatagatcgcactaaattttagaattttttttcctaactttaacatgtccaaaatcatactccaaaatattttagattgttaaaatttttcttaaactattgtaattgttagattcaaggtttatgttcaattcagttcaatttgattaacgtacgaattgttcatgtgttaattgtactcctaaactttaatatgtaccaattatgctaccaaatttattatgaattgaactaaaaaaaaaagccggtgtgagattatgtagaagaataattaagtgtgagattatgaatcaaaattttttcataatgcattatttttatatatattccaatcatataaagttgatgtcatgttgtagttcctattgatatcctcaaatttctaaacttaacactcaatttattgttcttttaattgatcaataaagtgccacatgtaaatatagtactggttaattgattaataattattttagaaaaaataa

SEQ ID NO: 69097 - DNA, 583 bp, Cannabis sativa
gagaattgtgatttggtactttttcgttcctttcttattgttaattccaacgcacaaaatttttaattgtgaattaattaagtatagctattattttattagtttatgcattgctatttttttattgttaaatttttgagatttggtattgtgtaaaaaaaatatacacaaattgcatattgggatctgcaaaattaaaaatatgggtgatgatttcgttattattgttttcgttagtgaccagaaagtggtgaaaataggcataattctattctagctaaatactcaatctttatgttatgagtgatataaggcaatggttgatttgctattatgagcaaaaactatatattgatacacaatactgtatatgaatagaaaagtggtgtttttctctagctttttttatttaattagagccactgatctaatagcacaatatttttctagacattcgtttctgtatgaattgcattttataataatggtaaaattctgatatctagatcctagtggataggttgttttcgctctgctgtgactatgggccattagacaatgtttttcatgtataagtacaaaa

SEQ ID NO: 69098 - DNA, 3767 bp, Cannabis sativa
  modified_base (2298)..(2304): a, c, t, g, unknown or other
  modified_base (3305)..(3308): a, c, t, g, unknown or other
  modified_base (3719)..(3725): a, c, t, g, unknown or other
atatatatatttatatgtaaaaatgatcattttaatacatataagatgttaatatagactgacattaacaacaacatgaatcaaaagattaaaaagaaaagaaatcacaatcggacataaaccaaaataaaccgatcatgtgaacttatatatacatataaaaactcaaacataaattaaggtagagataaaatgactctaataccaactgttagacttaatattatatgaaaataaaccatacatgaacgatatataaagcggaataactatagatgtatcaaaatcgtacatgcaatgaaaggaccgaaatacctccagccattgatatttgagctttaatcctagcgatagattcaatattagaaatcgggcttctcactctctcaactctctttagataaaatttattgtttttacagaatgagtgaagatttcagagaccaaaaccctatatttatacgtgagatattttatcaccctgtcacattaattatcagaattttttgacaattaactagaaaataaaatcaagtaataaatattaaaatctaacgaggaactaaacccactttgggtcataatccagaaaacccacttaaagatgaaggtcatgatgaagaattgcagcgtttgcacatgttatgtctcctctatgcatcgcttttatatttaacttggaggtttgagccacaaaacaaaggtagagactaacagcttttcaattcattattgttttgcaagatttttttcccaataaatataatatatttggattaagctaagctatacccatttggtagtggacacataataaggtcaaaagtaataattatgcaattttcaataataaccttttctctatgaaaccataatttgtatgttctaaaaagttacttaagtgagtacattaagaactcggcgattgcacactaagatagtccaaattaggcataattatggtgttaataaaggggtgggggattacttatgagattgacccaacaaaagggaacagaaagattattgagaataaaaaggagactgatgggggaatataatgttgtgatgtaaaggagggcagaacatgttatatatgctcaagctccacatgggttgaaaaagttaaggtaattatttagtgtggtgagaataacataaaggaggcaccgaaaccaaattgagatctctcgtgtatatgaaacttattagaaaaatcaaatccaaagctatacttctgcagttgaaagaaagaaatatggccaaaaagctgattattacttgtgtaagaattaaaaaatatatataatggattactgtaattaaattgacttgccaaccatgaagaattgcttcagatttgttcaaaatctttgggagatgccaaagacaaattcaatggttggacgtaacacgtcgaatacatggctgtacagcaagttttccaccattaattggaatgggggcattaaaaaatgatagattaattgtttatatcaaaagagtgatgaggtgctttttgtagttagaaagtctttatttattattacaacaactacacagaaataaaagtaaaatttacgcctcagatctaacaattaaagttttaatgagtttcttaacatcccttttgaggtttgttgagataggattaaacataaaaagacgaaataactatatcactaatcaacaaaagtacattaattaccacaacgtactactgatgatctcgaagcacttgattaaatgtgggacctatgtcgtggttcttgttgcttggtcatcttccaagctaacggtcgaaatcgaaatgagaaaaaacccaatgaaagaaggaagggttaggttaggaaaaggaaacttggtgttgggacaaaattttcacctttctgtctttcttttctttattgaaaaaagaccctcagaactgctcagacattagtgtatgggctgagtagcttgcttaacttgcagtctaacacaccaagcaagatcattttattttattttatttttaaattattaatacgcaaattttctttccacacatcctgatgaatatgccttgacatttaagggttataccctctactttgccatatctaagctcatttttttgccaagttcatatgcaacatgcgtgtctggatcggctcgcgtgctttacttgaaaagcagtgaatattttggtaacttgatagtatgtttgttaaaatttgggagataagatgaatgagttccatctcaaaatcaattgacaattggaggagtattccattcatcttatatatcacaatnnnnnnncacacattagcaatgtgagactaaatcttaatacaccctcctcacgttttggcatggaaagtttgggtataacaaacgacatttaagagaccacaagaccgaatgtgacatttgaaagaatcccacaaggccaaatatcgagaaatttgtgggtgtacacgtcgggaaatttgtggatttttgaaataggtcaaagacaccaacactggaaattggcacacaatggaggttaaaggggaaacaacagaagtatctgtttggaccgagaacactttggctcacaacggatcacaaacgactttttggaccgatggcaatttgggctcacaacagatcacaagtagctctgataccatgttagaatttgggagataagatgaatggggttccatctcaaaaccaattggcaatgggaggagtaactcattcatcttatatatcacaattaatttccacacattagcaatgtgggactaactcttaataaaaaaatctagatagaaactcaaactaatatttatttccacacattattgatcagtctagattcatctagtttgtatacaagtttgagtctatctttttctcaaaaaatctagatttgtttaactagacataatatttttttagtttttctatttttctaaataattttatatatttattaaatttctaatttttttaagatttgagcttgtaaatattaaataagtttaattttttcatcatttatttaaattatttatttgattttcaatgatttttgtttaatttttttaatatatgtgtttataaataagataaaatttaaaaatattatttttttaggaatattttaggtttattcattaaacttaatacatatttttttattaatttaataccagtgctacttcaacaagttaagcaatgtcagtggcaagatgaaaagctaagatttatttggaacttaatccatgatggtgagctgctagatgggtggacagttaatggtgaagggnnnntataccatatgggaagactagttgttgctaatatcactaatcttagggagtccattttgattgaggcctatagatccaagtttgttgtacatcctggaagtacaaagatgtactaagatttgaagagagagtattggtagaaaagtatgaaaagagatgtggctagctttgtagctaagtgtatagtttgtcagcaagttaaggctgagcatcatagacctttaagtttacttcaacctttgcctataccagaatggaagtgagacaagattataatggactttgttacaagatttccattgacacctataaagcatgacactgtttgtgtgattgttgatcgtttgactaagcctactcattttattccaatcagaaaggattacaagcttaccaggctagctcgacttnnnnnnnacaatatagttcgactacatggagtgccttcaagcattattt

SEQ ID NO: 69099 - DNA, 1301 bp, Cannabis sativa
actttttttttaaaaaaaatgaatagttgataatttctcgtaatgtttatttctttttatcgtaagttaatttgtataattacattggtaaaaaggatttgaaacatgatatctaaaataaaactaagtatgcgtgcattgtacgtaactttcttctagtatatatatagggatacgattttgtcccgtgatgtactttcacagaatgtattctgtgatgtacgacagccgttagatggtggagttatttgatctgagagctggggttgatctaagggtaattagggttaaaaaatggtaacgtaccctgagactcatctaatgtattctgtacatcacaaaatatatttcgtgaaaagtacatcacgggataaaatcgtgtccctatatatatttatatagggattatttctatttgggattaatactactaaaaataaatatttatatcatcacaagaaaaaataaacatttatactttttacttatttcaaaaatactatcttttaaattttttattttcaaaattacggtaaaaagaaagccaagatgcagataagaaagtgagccatacatgtggatatgcgagcaagtgagactcacacgcgagtggaaaggcatcaaagttgactgacacgcgtaggattacagcatcaaaactcgtcagtggccccacgtggcaagtttggacgtagtgggctttgtcctgttaggccttttttctcaacgcaataataacacaaaaataactaaatatcaacaaaaataataactgaataacaacctaactttcaaaatacaaattaattcgacatcaacatattaagtgaacagaaaaggaaaaaaaaacttacaaatcgcacaacaacaacctaaaaagaaattaaaaaaacataaaaaaaaataataataatgtttaaatgttttagaataaataagctaaaaccataattttgttggaataaataaacaaattttgttagaataaaattatgaaaccatgatttaaaatcattagggaataactccagattaatattaattaaatataaattaaaatattttgccaactaaaatgaaattttaaaattaataaaagaaattacccaattagaaacaaattagacttcaactaaaaaatatacttatgaaattaagcatttttttattattatttgtaattatgaatatcaaaaaataaataattagacaacaacccaactttaatataaaaattaataacacatcaatattgtaaaaaaaaaaaaaaaaaacttaaataactaaaaataacctatata

SEQ ID NO: 69100 - DNA, 675 bp, Cannabis sativa
gtgaaaaatatatatcattttttttttatttataccataatggtaattttataaaacaaaaattattttaaaaatgtaaagaacattttggtcaaaataataaaaattctatttcattctatactataccaatcatcacaattcttattcaattattgattccatagtctttaccaaacaaaagaatagaaattacattccattctattcctattcctattattattcccattcctatttaatttttattttgtaaccaaacaccaccttaatatatataattaaattctaaaccctagttgaaatactataaaaaggaacatgatgctctcattctcatccatccctcttcaaccaaactaaacctagtttctaactctatcagacaactagtagatgagagacttctttctatagtaatttcaaacctttttgctgttcttcatgatattcgatcctttagtgatggagtaccatgcccacacatagtaagttaagtacttaatcgtagtgtggacgacggtggttaaccaaaccgaaggagagaagggaatccaggctgagatcttgttattactttgagacagaaaagaacaaaggttagagatctgagcggaaggagtcgtattattctgctgccatcaatgtaagatttcataaactcttatgtgttta

SEQ ID NO: 69101 - DNA, 966 bp, Cannabis sativa
tctcatacctatacagtctcagaatcatcacacttgaccttcctcagacagtgtgagattacacaacttacccgatatttctccttacggatcacatgactacggactatcacaatattaagcacctaaaagggccacataacaataataaatacaaaaaattatttactgaaaaaataatacaaaaattattcataaaaaataaaaataaaaacacaagacaaaaaaaattactacctaaatatcacatgatatcacatcgagaattttaacactcataacaaataaaaaaaaatatttaccaaaaacaaataataaaataaaaacagaaaatgacaaaaacaaatcattttcttatgaatacattcttcttatgtagtatgatatattatatacacatatttatttaatattaatatatatcattatgtagaagtatcaatataataagctgtttcctcacagtacctctgaagctgcctagaaaattatatatacgtatctctttttttcatgttttcttaatttaaaataaaataaaatataaaaataattgttgatcatgacattattataataatataatgatatataatacaatttcatcacaaaactatattttaataaataacaatataattttcccatacaaattactatatatataaactgtttcctttcatatgtattatctagtaaataatattattagaatttaatgttatttagaaaaaaatatagtatttttttaaaaaaatttaataaaaaaaaatatgtaattttaaaaagagaaaaatttattgagctcctgaattaagtgggatttagccacaggtccgactctatttcttttttatatatatatattaatttaataaatgagtttttataaaaaatactggattttatgtaaaaattcactattttactgtcacatagatttttttttttttacaaaatactatc

SEQ ID NO: 69102 - DNA, 999 bp, Cannabis sativa
ctcatttctcctaggattctaccccaaattgtcaataactattcagaacacataattaggtcatacaaaacataatccaacaggaaaaattatcttcaagcttgtaaaacaaaatttaccattaatgaccaagctcaaactttgttcaaacccaacaacaacataaaaaacagcgaaaattgacataattagtgaagaaataacctcagaaaacatacctaaacacttccaactaaaacagcaaccaaaacttaaaattacatgtgaaaatctaatcttaagttaaagaaaataaagggaagagattataccttggcttaactacaaaagtccttggacttctactgaatttcctagaatttttggtctgaatatgatgaaaaccttgagttttcctttggtttacttgtggtcgacccccaaagggagaagaagagtgtttgaacttttctaattaatgattataggatagcttatccattatttcagcttatgattaataataactgccaacttatacacctataaataggggtaaaattcatagaaaaagggacaacaaattagagaggaaatactattattaaattttactgtacactgtattcaagtaaatatctctaataagaaggacccgtgaagtatgtagattttaactacaaaactacgaaaatatctagtgttcttttattattatttaattctgtagtaaatttattacgtaaaagactatgtatttagttaacaaaaatctgcgttaacaccttctgtccaaaaacttcagttaagtgacaaagtatatacacagtaaatttttagtggtccacgtaatattaattattaaaatattataaaaaaattaaaaacctttttttttctttctctttctctttcttcttgaaagaccaaaaccccccaacccctgtaacttcttattcttcctgatccacctttaacccaaacaaaactccatctccgagacaaggtatggacccccac

SEQ ID NO: 69103 - DNA, 1212 bp, Cannabis sativa
  modified_base (61)..(84): a, c, t, g, unknown or other
  modified_base (372)..(377): a, c, t, g, unknown or other
  modified_base (470)..(490): a, c, t, g, unknown or other
aaatatctacagtaaaataatacaatttgaaattttatgtgggaaaatgattattaaaatnnnnnnnnnnnnnnnnnnnnnnnnattctaatttaagttgatctgaaactatcaaatcttcgacttaaatatatttttctatttaattaaattcattaaaatagaaataattaagtacttggaataaaatcaacttaattatgaattctaatttaatatttaagaaaaatattctaatttaagttggtctaaaattaatcaataaattaatttttaatttaaatatattttacttatttaattaaatttcatgaaatagaaataaaatattaagtatcttttgaatagaattaacttaattattaattctannnnnnttctaagaaaaatattctaatttagttggtccaaaaataatgaacaaattaattttcaacttcaatatatttttttacttaattaaatattannnnnnnnnnnnnnnnnnnnngaaatcactatctagaatcttttcattaaactaagtgtgtttttctaaattaattttaaaataatcttatgaaaaattaatttcatttatttcaaaattaattatgttgctgattcaattttaattaggttaaactagtataattataatataattatttaaataaggcaaatgagctttcacaattggggttgttcatgtgaggaagggttgggttcagtatgtcgtacccactactaatgaccccctaactatcacacaaggccaaaggagaggaatttaaccttaaattaaataattgttattcattgaaagcctaatactaattgggcctaaataaaactatcatggatgatattttattcattttataagcaacctagtccatttaaatatctagaaataaatgggctatctatatgcatctaagcctaaaagcaaacatataagcccacacaggtcaaattgatttggatgtgccctatcatatttctaggtttacacagatgaaagaaatacaaaatttaccttttacaaattatttataagatctattgacaattagactatgattaaaattagatcattagatctgtcaatgagttaatcgtaataatttaaatcagataaataataggtttgtaataaaaagttttgaataaacaattaaataaaaataaacacaatatccatgtaataaatgtgaaataaaatattaatat

SEQ ID NO: 69104 - DNA, 853 bp, Cannabis sativa
tgttccacacccttttcttgatggtcttgaaaagctcagttgttttccttcccacaaaaatgggtaaacctaagtatttttcgtaatactccacacccttgaccccgaacatatccacacactctttttttgttgcttccccacttgtctccccaaaacacatttttgatttgacaaaattaatcgtttgcctagaagccctttcataatcagtgagaatttgtttgatccgactgcattcttctttattagcttctaccaaaatcaaactgtcatttgcaaaaaaaaagtgagaaacagagatacgatcccgaccaaaatttagaccgtgtatcaactccttctcttcagcatcaatgatcatactggacagcgcctcaacacaaaatagaaaaaagaaaaggggagagcaaatctccttgacgcagccccctttgcggccgaaaacttctagtagggaccccattaataagcactgagaaggacaccgaagacacacagttatggatcttcagaacctgattcccatcaaatcccatctttattataaccgcctctacaaacttctattccacacgatcgtaggcctttgacatatctagcttgaaagctactttggaactatttatgaatctgttgcgcttcatacaatggataccctcaaaccccacaattgcgttatcctgaatcaaacgatcctcaacaaaggtgctttggaactctaaaataacttcattaagacatgtttttaaatggttggccaagcattttgaaatcaccttatacaccacattgcaaaggttaatcgaacgaaactgttggaaaattgttgtgctccaatagaaatatcaaa

SEQ ID NO: 69105 - DNA, 6049 bp, Cannabis sativa
  modified_base (5980)..(5995): a, c, t, g, unknown or other
caaataaatataaaattagaggcaaatttggttaattgattaataaaagaggcatttttcaacttaccccataaaacattgcttttgaacaaatttcaatttatttaaaaaaaaaaaagaacaatgtcaatttttcttttgctagggaacaaattattattttgaacatagaaaataaaatacgaagaaagtgtcattatgtaacttacctaagacgtaacggaataacggaagagaatatttgactaatcaaaacaaaaaaccagagagataagagaagaaaattcaaaaaaaaaaaaaaaaaaaaattaataagtaataaactttgtgtttaattcgtgcctaacggccattgtagaatgtacaactacgtgggctgtctatctgtcgtttcggctttaggccatttcgccggccaactaaaagtctaaaacaacacactctgctctctattactattcttaatcaaaattaacaaacatattatcatataatacaatccgtaaaatcttacagttttaataattgactctctttttgggtttcttttctttgttcttaccatcactgcaacatgaacgatctccttacggtaattttggtttcaattcaatctcctttacatgtgtttttctatggtaatttgaatttaagtgctcatcatgtacaaaattcagtctcttgggaaaacttaattatttcctatatttgaacttgtcctccgtcacaattgggtggtgggttatatttttaactggggtttctgctttgactgtgaccatgaattctgatgatttgtatgtgaaaaattgagcctttactggaacccccacttctgatatgagattaaagttttaattttttttttggctggaactgttaaaattttaatttaatgactcgagatatcagatggagttaaagttcttatgatggtccgtgtaagtttcagtgttggggtttctgacattttagaccaaatttaatataactgacacactgagaagaatcgtatcatggatattctttggtcccacaaaacattttaaactgaagcatatatagttctgtaaaaagaaatttggcagctaaactgattctgctttgcaagtttatgctcatcttttgtatgtaacaatgttcaaatcaatgaattctctttcttctttctttttttagaaggggaatgtattctaattagttcacctgaaattaatttagttttgataagctgcataatgttggtttttactttctagtggccttcttattggatgaaaagtgtgattgtaatttttcagctaaattgttatgtttttttttattatttttttttttttttgtaattttgctttgctttaggattccttcgtttctgatgccaaaggccagccttctggagaaaatgatatagaaatggggaggcaagttcaacggaacaatgctgatattggaatggagactttcaataaacaggtctttcttgctcctattcatatcgttttttttaacaaccctgttcatatcgttttgttcagctatttttctcattattgaaaaaaaaacttacgtaaaataaattgtgggacatggttctgtgaaagagctaaactacatatttatgtctgtgtaacattgagctttctaataaatttcctttcctttttgttacacaagcagatccttaaatttgtttctgtgattgtagatacaagaggttgagaaattagtggacaagctctctgagctgcttaagaagcttaaggtcagcaaatttttatcaaaggttgtatggttaagattgacatttttacaaaatacagttagttttggggtgatcttttaaagtatatggttgtctctttatgagtagtgatttccacattcctaattatcttggaatttgagtaaagcatcatatatgatcatagttaactaattagcattcaacataggaattctccatactgtttatggccatagtaacatattgatctaattcaaggcaggagtccaaaattatattgcccttgaaaggaaaaaaaatgcccttaaaattattgtcttagatagttgacatcagttaaaacttcagattaaaccaaagagggtcttcatgttttctacaggatgctaatgaggactcaaaatctgtgacgaaagcatctgcaatgaaaggtaattaactataggtttaaaagtaagcataaattgaaatcacatcacattgctgtttcagacaagttgcattatgtcaacttgtacttaggtggacatgcattccttctatgtttttgagcatgttattcctttaagaactgattatagtttcaattacctaacaaatctatttctatcattcagaaatctatcaattttgttctgtttcagaacattttgtcaattgagttttggttgctaatttgttcaatgactcccatgtctcagcaattaaaaagcgtatggagaaagaaattgatgaagtgttacagatcgcgcgcaatgtgaaaggaaaactagagttgataaacaaagatgtaaatctctcattcttggtttggttcaagaatagttagcctattgttatgttttaaatgatgctctattttttctccagaacttatttaatagacagaagcctggatgtgagaaaggaacaggtgttgacagagcaaggatgaatatgacaaagttcagaaacagtgaaatttttaatattctcaacaatttatcattaagctattttgttttaggacaagtttggctaatgtataatagtttttggatggcagtgctttgacaaaaaagttcagggatataatgtctgagtttcaggtatatctatacttatgctatgatgacttggtttccactttattcttagtagtgaattatttttcagaccctcagacaaagaatacaagatgaatatcgtgaggttgtggagagaagggttatgacaggtttgaatgtctcaatctacaaattacagcccctgaaattgtagattcatatgactagttaatgaatctgtaaaaatagttgaattctgtcatggtttgatcatatttgtactaatcacgctgtttttctttttgtgtgattgtgattgttcagttacaggtaccagaccagatgaagaggtgagccaaaatcctaatgagaatttaaatttaaacttgaatgttattgtagtaacaattttagtatctttattagacaattgacaacctcatagaaactggaaacagcgaggaaatatttcagaaggcaattcaagaatcaggacgaggacaggttctgttattctttgaaacatcaattttttactaaaatttggaactttctctgactcgccaatgtcattttttctgtaggtgctaaacactttagaagaaattcaggagaggcatcacacagtgaaagaaatagagagaaagcttcttgatttgcaccaggtacaacttgcttaccatgaaataaaaggtttaattttagaactaactaactgttgaaagtaagctgtcacaacttaatttctccccattcttcaggtctacattgacatggcagtcctagttgaagctcaaggagcggatatcgataacatcgagaatcaggtttgcttatatgtgtgattagcatgtgggggtttgcgtgtgttgcgtgaatgtgtgttgatggggatgttatccaggttagaaacgcagttgatcatctccaaagagggaacagtgcacttaaaaatgctaagaaactccagaaaaagtcttgaaaattgatgtgcattgtcattatcattctcttagtaataatagctattacagtcgtaggggtcctccgaccatggaagaatgataagggtacttgagtgtttgtcctttgaccatatttagcagtaacaaagttacaggggatttagttggcaaacgataggctttttatttacctctattagaagtgtcatgtgtgattacttggctaccgtttcaccctttcttttgtgaagtttggtttatgggttgggtgatggtgtgtcttgtagatttggaaatatctcacaattatcctcaaaaagtcatgaagtgaaggataactatattttgggtttcaaccatatatgtttgcgtatatgtacataaagacatgagttaagcacacaatgtaatgttgtttgcccatgattatgcacgtaaatgactttcttttcctttcatcccaattagaaagaaattaaaattcccaaaatgttaactcacccgaaagtttttttttgaaaaaatgaaacttagtaccatgtacatacttatactcgtgtttgttggcatttaagttttttcgctgttttgggctagagagtaaggaaagctcaccttttaaccccttatcagagtagatgttaggtttaaagctcactcaattattcgggttaagttgaagacctatgcaaataacctgtcttttttacaagaagacaatttttctacttattcctacccatatagtgatggcattagcttcagtccaaacgttcctcacaaccaagcgtcaagcccgtgctttaagttttacatgtttgcatccaaaatatacatcaaaacatgacacggtgatgtaacacttttttttttaaaaaaaaaaatagtaatgtaattgttttaaaaaactgttactctttctttacgtaatattatgtacaccgaaatcatgcaccaaaacatcacgcacaatcatgtcactgtgtgtaatttttttgtgtttggtgcagatattatgtatcattcataatttactcatgaggataaatagtgttgcaccacttttttatagagggtttttcagcaattgattgggctggcagtgccactgtcttcagtgggctagttgttttgagtttaggaccaaaaatgtgtaggcccataacactgagactagcccaagtgcttccagtatgaattttcatgagaatgcagtcgtgcactatgtatcagtattgtcactgaatttaccaagctttattgatacacttttctttaattgaatttatctactttagttacttgtagactaacttatatgcatcctaaaatctagaaaactttttaattttctttttgatctttggattatataatgattagcatttttcaatggtatattgagtttcaacgtgatgtacacaggtcacaaacgcagtggaccatgtaaggtcaggtacagaagctctacaaacagctaagagcttacagaagaggtcaagaaaatgcatgataattgccattatattgcttctggttattgctatcatcattgtcttgtctattttgaaaccatggtccaaatgaaatataactaaaaagacagcacgcccatcatccccttctgcaaggtgcacttgtttatctctacattttcccattcaaactttggattacgaagataactttcttttcctatattttttttaccttgtatatctttggagtgaagaggttgatttcctctttcctgtatactgtagtagattttgatacacaataataattaatgaataatatactaggcatagtgcctgcctagtgctttgaaggagctctttggaccttttcttttcactatgctatgagcaacaaatcatatgttacttgaacttacatgattttcgatttagaaggaaagcatcccattatgtggctgtgttttatgtactaaaattaaaatttaatgtaattcgaacttagtttgatatgtgtagacataattattaaaaccttctgataaactgataattgatgtatgaacgtaatacgttcccattggaaccaaaaaaatcctaccctaattgaaataagttaaaactaggcaatgtctccccacaaaatgaaaagagctaaagaacccaagaatcaataacagtgaatatgatcgcactactagtactatacatcggtctcatactcactcactctctctctctctnnnnnnnnnnnnnnnnctctctctctctctctccctttttttttttttttcttctttttcttctttttct

SEQ ID NO: 69106 - DNA, 541 bp, Cannabis sativa
tctccctagatctctcactaacttcagcggtcctagtgacctaggtctaatatgcctttaatatatagttggctcttactaaaaactactccatataatatctaatattctataatatgtcatattattatttgtataatttaataatataattgcatatatcttttcatatagttaaaaataaaaaatcaagtatcaaattacaaaagagtaaataccaaacttaagaccaaattgaggtcgttttcattttattttataattgaggggtaggagaaagacagtatttgttgcggtcgttgttgtgggttgtaataggaatgtcataaatcaattatttcaaaataccagctaattttgctttcaaaaaaataaataaaaaataccagctaattttgtatttttattgcttttatctctatctctattcaaaagaagaatggatattgacagattttggtttgttgtgttgattttttttttttttttaaattagaaaaatataattaataaataatagataattttttctttttttttt

SEQ ID NO: 69107 - DNA, 555 bp, Cannabis sativa
tcaaagtggtattaggaaaccaaaggtatatttggcaacaaaacatccacttctagaatctctattgcccattgaaccaagaactttgaaagaagctctcaacaaccctcacttgcttgctgcaatgtcagttgagtttcatgctcttatcaaacaaggcacttggactcttgtcccttatgctccacatatgaatgttattgataataagtgggtacatagaatcaagctgaatgttgatggctcattggataaattcaaattgaggttagttgccaaaggttatctccaaacacctagcatagactatgaaggtacatttagtccagttgttaaaccaaccacagtgaaagttgtcttaagtcttattgttagtgctcattggcctgtaaaacaactcgatgttagcaatgttttccttcatggcactctccaagaaactgtctatatgcagcagcctaaagggttcattgatcctacaaagccaactcgtgtttgtcaattgcacaaaatatatggtttaaaacaggctccacgggcatggaatgaaaagct

SEQ ID NO: 69108 - DNA, 641 bp, Cannabis sativa
  modified_base (182)..(185): a, c, t, g, unknown or other
gaaaataagaatatagattttattttttttgtgaaaaaaaaaaaaaagagagagagaagatacctattctgtaggttttttctttattgtatttatgaaatatattcctatatatgaatacagtatacagagaggatgaggtattaattgagaattttttgttttgcttatatatatatatnnnnatatatataaatttatatatatgtgagatttttcttaacaatttccaatgaaagaggggactgattaaacatgcatatccaaacacacacatatatatataagcacatatgatcataagaacaaatatttaaagctgcctcataattaattagaaatgattaacttaattatataaatggtgatatgaaaaaattacaacgtggcaacatattaattaacttccatttgtagcttcttcctttttcatgaagatcatatcatataagattgtgagctacgtttcttcatgtaaatggtatatatgtatatatatatacgtacgatgatgacatgcaatattattaattatatctcattcattcatactgtaaaaaggcgttatgcaatgattaacatcatccgctttttttggctttctttctattcttacattgtcctattcctatatatatata

SEQ ID NO: 69109 - DNA, 654 bp, Cannabis sativa
caacttgtaactaaatacaatgttagtaatattttgttgcgactaaaaatcacatttaatcacaaaaaaattatattgtgactaaaaagttatcactaaaagtaacagttttttgcagtgaatttatcttaacactccacatcggtatagtgttactaatgctcttaaaacaaacccacaagcacaataataattgtccccttggattaaagtattaaaatcaatttttagtcacacctgacagggcatcctaggaagcaaccattgccattcgaataaagtttgaactttatgtgttttattgttgttctgtcttccttcgttataatagtattacatagctaattaaactacatttcaataaccatcgtgtcgttttatttttaatatacaaaaatattttcaatttttttcaaataaatattatttaatggacaaaattaagaaaaattataaattttcaaatatcaatttattaattttacgtaccagaaatgattgcgctgatgatgatcatgtggccaaagtttgtgaacatcttctttgggagattcaaagatggtaaacccctcagaccacattctcttcggatgcaaacacgattttcgagaggttccatacccactaaagctattggctgatctaaaggcttgg

SEQ ID NO: 69110 - DNA, 731 bp, Cannabis sativa
acccaagtgttttctttaatttttcagactttctggttatgtttttagtttatgctttagtatttttagtattttaaatttttagctaagtaccagacattaaaaattttccagttgaatcgtgaaaaacgtgaaaaaaaaattatttttttcgggaccaggagcccaatggtcgcgaccaccaggttcctgggtcgcgaccctttttggtagtcgcgaccctggtcgcgacctggggtttcaacagaaacgacaaaaaattttactcccagtattcgcgactagggtcaatgcaggtcacgaccctttttccaagttgcgaacccagtcgcgactacccctttttttcagaaacctcaaaaatttgaatgtaagctagtcgcgaccagccttagggcaagtcgcgactagctcacgattttttctataaaatcccaatttttcccccattcaaccctacaccaaaaattcaaatctttcatcttctcagccgaccctaaccacttttctttcaaaattttcaaattttcttccccaaatctttaattctttcaccttcaatcaaatttctcaatcccaatccatctaaaaccccaatttcactcatcaatctacactttccaacaaaaaccatcccaaaaattaccaacacaatcccaaatccgaaaataccattgttcttcatcttcaacctcaagctttcaagaacattcaacaatggaggtggagta

SEQ ID NO: 69111 - DNA, 2378 bp, Cannabis sativa
tttacttttcttctacctatggtcattgactagtcatatagaaaaaaattccccaacttgtaaaaaattatgacatctcatcaattacataatttttcgagaaagtctacttttatcaaaaaagcaatgttaataaatagtactgactgtacgaaaagtcgatcaaggaaaagcgatgagaataaaaatcaaatggcttttgatttaaaaatgggtagctgtaatgcaaagttagcaacagcaaatacaacaatggagagagcaaagagttctccttccccaaaactaaatgaacgaacaagtttaaaccagacgacaacgaaaaagattgacaaatgtaaccaacaaagtactaacactacgtggatgcagccacagaaactgtttgaagccctttggcgctggagccaagcctgccacgtccaatgccaccactgttcggttgaacagcgtatgaatctctcttgctccactcattgagtctcttccttccctctgcttcttcatcattcgatctccaagtccggtagtctgtcgaatctgccgaagaggatgagaaaatcccggccccccgctgctgctgctgctgcatatagctgttgctgccagaagactcttgatcctctgatgcagcatctccacctcctcctccccttcttactgtcacgtacttatggaagcttggctccgtcaagtcgtcacagccaattactacctctgattccacaaaagggtccttgcttttaggggttgaagttgaacccatcaaagagttgaagtgatcttcggacaagttggaaccagttgtcgagttgaggtctgccacggcttccatgatggagcaggccttgctgacacaggaagggagtgataccactgtggttgtggtagtatttgtgttcttctggtgaaaattctggatgtcctccaacagcagtctggtgtaagaaggagttgcatcagaatttgaattcgaatttggatgcaacagagcttcgggattgaaatcaaggtctcgagatcgtctagcagacctgcttcttgttattgtctgtggctgtgtttgagaagaagatttatgagggccagagataaccactgtagtctccaccattccttgttgctcctttgtggatgaaactctgctgccgtttctgtaattagtcaccacatttgttttctgaacctaaaagttgcagagtacgaccatatattttattagtccacattgtaaaaccaaatatcatgttttagcatttgaaatgtaacaagcacttcttccaaataaaaattgtaaataaatttcatgttgaaattaataataagatgtgtttcaactcaaccaaatcaactaattatattcaatattttgggttgatcaatacatttctgtagaggtctttaccatcattacaagtttcccatttatcatgtaaaaaaaggatcttgaaacgaaaggagagaactaaaaagaagtttacctgatttgggtcatcagttattccatcagtttctctgggtctggttttggtttgtggcctgctgttattggtagtgtgtggatatgccaaggaattgggatcaatctcactcaaaggatttcttctgtaaggcgagtgttctgccttcctcgaagagttgcggctcagagaaggttgctgctggtcgttggaagctgaagctttagcagcattgccattagctcttgccggagactgagaccgaggtgatgcagcgccccttgaggcagcgccagcgtcggttacatttctcttcaccgaaattctcttcacagtagcagcagcagaagagtccaaattgttgctcttgtccatcaccaaagatgaaacggtggctggaaccgataccatcttcccaggtctattagaattaacaacattgacattattagtattagaacaagaaccgccgccgccactggtctctgatgaacgcctccctggagacctactcacacgcctctctcgacttgcagaccgttgctgctggtctcccctttctctgctgggagttcttctccttccctgaggagaaggagaagcccttgtcctcgacctacgccgctcgcggtggcggcgactgctctcctctgtcgctgcaaccaccccatcatccccatcgccaccattgttggctgcaatggctgcatcgttgttgtcgaagtcgtagctccgcttggaaccagagtactttctggaggcggaagaggaagaagctgcttttccagaggagctacgactgagtcttccacactgtatgagaatggcgtccacctcttccttagtacagctggaagtcctcacacccgcggctgcggaggaggaggagcccgccgaaaactgatgaaccggcggggg

SEQ ID NO: 69112 - DNA, 934 bp, Cannabis sativa
actattgttgttgatgatgttgttgtttcacagacggtaatcagtgaggatattggaggttggaaaaatttatttaagagtgatgtacgtaccacaagttcacaactagaatgagatagtttattttctaaattttagtggcaattacaatttggagggaaagagaaagagtgtgtgtgcatttgtattgagtcaagcgagcgagagaatgaaatttaggtcatttttttgtgttagaatagtgagttacgggaatatcagaaactcgaacttgatttgtgacccacaatggtgtgcaatccttgaaaaaggcttttggtgtgtggcggccaatctaatcgagtgtgcagggtgcaagctaaactccacacaaatattcagtcctaatttatatcaagtctattatttagaaattttttaaaattatgcaaataataattattttcaatgagtatgaatgtttttacttaattaataattatttattgaaaaaaattagtaggaatttaattaatgaattctaatttatatatttaaacttggttgattatacgcggataatattatgattatctcaaaaaaaaagtataaaagtatagcaatcttaattaaaaaaaatatatatttacaaagtccgcgcgaagcgcggtgtaattctctagtatatatataaaggagaagtatgaggccgtgacgtggcggactaaaatcacttcaattatcactatctcttctctccttaattctctcatttttaattttttattaagtttataaatattaattaattaattaaattaaatattcttaaaaaattaatatatataaatagaaaagggaaaaaaacaggaaaattccaaaaagggtaaaatattacaaaaatactgtgggtcggcccaatcaacatttgtacagcccacattgaatatattac

SEQ ID NO: 69113 - DNA, 4782 bp, Cannabis sativa
tattgtattatattgaattcgattatatatcatatttttatataatactatgttaaattttaattcatactaaaatattatatatttaattgtccacaaaaattaataccatatatagttttccataaaaatattgcacaaaatacaatttaatataatactatacaatacaatatggtataatacggcgtaccaaatgaattattttattataatataataatatctaatacgtatataacctaatatagttattatatatttttttatatttagctattttctttatttttttaaaaaatacatttactaacttaatttttaaatttagtcattttatatctcaaccctatactgtatatttattagtttaatttgaattcacccaatattttaactcaattattttttaaatcgtatcaaatccatccaatattttagatcctatgtattgaattgaacttgattcatccaattcaaaaaaaaaaaaaaacaagtacaattttagtattatttttcatatatacatataaattttacgtataacaatataaaatataattatctatccaaactaaatgaaaatactaattagtttaattaaatgtattaatttttgaacacctcaaccaccatccaatccgatcaaattgaatatttaaaaataacattcaatctgatccaatcacaattgaatatcaatatttgacggtcagttgtaattaaatcgatcagttctcattgaattgaatcaatttatgcacactcaatatcaaacataactctataatcgaagttgccataaatgtatacaactatatatcaactcattgaatggcaatgccagattatcaaaacacaccataacagctttgaattcaaaaataaataaataaattaaacacaacgatagctaaaagcaggggaaaagaatagcaaaaattggaacatatacactcagaaaacgaatcacggtataatctctccaaacagacaaaaatggagatgatgagagagacgaagcaagaaccaaacctgcaagattaaaaaataaacaaatacaaataataattaatggttaatgtaattcaactaccattgcacaaagaacatgcaacactgtaataacaaaaacagaaaatactacaaacctaatcaccaaaataccaattagaagggaaaaaaactgttatcataataccatggcatcttttcaaatttccctgatctaatgatttttctttcacactattacaaaggtttcgcgaaacaaaaatttaaagtttaataaaagaaaagaacactacaatctgtaaagggaataaatttagaacaggttcccacaaggaatcaaacctagacatcatgcataaagttaacaaataacctttcccaacctaaaacctaagaggcacttttatatatatataactaacatgcaattggtttgttgtcaaaatcatatgcttacctgatgtaatgatgacttttaagaattaagccgtacccaaccgaaaaatgggtagaagaaatcactctctttgagaaacaacctcgccaataaatataagtgttggaatcgaggaagaacagattactagctgaatcaactagaatatcagatggaagaatgaaacaaggacaccagaaaaaacgtatgtgtgaaggaacaaatcacagttctagcagatattagctttttggtgaaaatgcagctagggcatttgcatgtgcaggagacaggttgctcaaaaggggctgcatttgttgtccataaagtgaaatcaagtgagaaaaagctctgccgacttgagctttaacttcaggagtttcatttggtgaaattacaacttgtgcgaacacattaaccaactcaggcactaaagatagaatctgcttcgcatacacagaagaaaagaaaaaccagaataagatcaaattgcatatgaagaagttaaaaaacaaaagatatcaacgttgcacaacaatttagttacctggggattagatgataacacaagagtggagacacaagtataaaccgtcatggactcctcgtgatcttctttgagtgggagagctttcaagaagaagggaagaacctgggaaaggtagcagaaaaattaacaccacgctatcaccatcacatgaaggtaatgtaaacgatcccttacgatctgctttaagaaattatgtaattacagtgagatttacctgatttaatgggatagattcagggtgcaccattatcattcttgcaactgcaccagctgcattatctcttacagcatcatctggctctgattctccaaacaatggaaagagtccacgcaatacatcaccataatatctggtattggttaaatgaaaaacctactgggagagaagtgctgaaataatataaactgtaaactgaccaaataagtttcagtgtttagataacaagattatcttcttcaactggatcattatatgacaggaatactttcaagcaggcagcacagcactacacaaaatgaaatggtgaaaattcacataaaaggatacttcaaagctccatcacccccatttttacacaactctccaacacaaaatgcagcatttctcctattggtaggatctgatgaagctaattctttgagcaccaagggcattaacctctgaaatgttacataaccgatcaacaacgaaatatgcagcagaaagcaaactacattaccaaacagtaaatcaaaataataatatttagataaatcacggaaaagattacgtcaacatagcctgcaattggagctcccatgtcctgagcgacttcagcgaggcaagcaaccaccattgtcctgtcttgagggggacgtgaagctttctgcatgaccaatggtgcaatcaaagagatgaagtgtttcaactaactcgctatcgtgttattattgccacatcagaaaacacagattataacatttatatgcaacataccgcaaatttcattaatggttcaaaaagcttggcaaagatgggcgcaaaatgagaccccattgactttgcaaatgcgggaagaagatcagaaacagcatccattagtacttcatcatgtccagtatcatcatcatcaatatcatcgtcagactctgttagctgacatgcagattcctcacgaagtaataccaaagttgcatcaacaagaggagatatatctgaaatttaatatttttatcatacatttgacagcttattaaatgatatgatggtacatataaagcaaattcacttatgacatacaaggttctacagctgcatatccaaaatccttgagtatgtcagctacacttgtgcatgcttgcgcaacaacttccttgtcatcatcttcaatcatagccttgatatatgtgctcatcacagtatctgcaaataaagaagagtgagctacgaattccaaaatggagttggatattacaaactaacaaacaaaaaaaaacatttccaaataatcatctaaccaaaaatttcatttgctttagctgctccttcctgcaaaaggatgagagttgataatattaaatggacataatgaaaacaaaatcataatataactaaagtcaccaaaagcaaggttgctaaagaaaataaggtccaaactctttccatggatcatgtgattagactgaataataatcaaaactaaatatcaaaaaaacactgaagatgtattattgtgttcaatgtgcaagtcaaacatgtacgatggcaaatagagtaatgcagtaaaccaagaatgagaagggggaaacaggcaattgggtcaaaagaagtgctcacattgtgattttggagaatagcttgtgcagctgtcaaaagatctgcagcaccaattaaccaaaacatggacagtcaaaaagccaggcaatatgtatgacatttcaaaaaaaaaaaaaaaaccaagaaagtagttaatgccatgtcagactagatgctatcaactatatagatagttaatatatattatagtacagaataaagaattgaatgaccacataaaaacaatagatatgattgtagatgttgtttagcacaagactatgttccatacttgtaaaaattaatttgagataatagaaatacgagtactgtcatacatcagaatggattaagagatgaagcaacaggaaggacaccacataaaagattaaacagtaagaagtaaaagaacaaagaatgtcatgtcacaagagataacaccatatcatcaacatgtgatgatgctactcacgtttcaaggaaataattgcctgaagccgaacatcttcatgaaaatacgttgagtgcttaaccaaaatcctaaatgactcctccaaatagcttaaaggtaatcaaagaagcaaaaattatagatgttgtatttaccaaataaataatttgtttttgcaaacataacaaaaaagtatgttaatgtggtaggttaacatacggtccataagaactctttgtgtgcaatgcaaataacccaagtgcttgagttgcagctgccttttcatccaaaactcctgttcttatactaatatttcgcactctgggttcatcatgagcttcatcatcagatgaaactccaccaaagttattaatattctcatcatcagattcatcaacatccacagcagagccatcatcaaggttgcaggaagaaaatgcaagaggcacaacatgaggaagatactgtttgacaacaatagtttttcatataagtaaaggcacagtggataagtttaatttaatcagagcacagtg

SEQ ID NO: 69114 - DNA, 995 bp, Cannabis sativa
ggcatttaaaattcagataatcacatagagctcggaatgagctttccaacgatataaagaactcccaaatcggagttcggaattaaaagatatggaggttcaaagttcgaactcaaaactacccaaaaacacaagggcgggcggcggcatgcccaagccatgccgcggcacctgagaaaaatcctaggttccaccaacaaggggcgggccgcggcatgcacagcccatgccgcgacacctgggttaaaaacttagaaacagccaccaagaacacgaattttcagcctcaaaaccatacaaattccatccaaagctcaaccaaacactcaattcaattccacaacctaacaagcttaagatagggcataaaaatacatgcaacatgcattaaaactcacactttaccctgaaaatctagattgtaaaaacatctcaaaatcatacttaaactcacaaatctcaagctctttaatcttgagcttaattccaacttctccaaatatttttccagcaacaatcatcatcaaacaattgaattcaagttaaggaagaaaccctagaattccatctagagcttaaacaacccacacacccagaattcaagcaaaattcacttaaattagtaaaagaaccacacctcatgcaacctatacttatcatcttcatcaacaccaaaatcatgcattactaacaatcaaaaattcagtagatacaactacaactgaaaagattacctcaaatctcaagctaggattgagcacaaatacaccaagaatccaagctcattcaagtcaaaattaaataatctcttcccaaaataaactttgaaaaattagagagggttagagagagagaggggtcgggtgagaggcgaagcaaaccggaattctcttttccttatcctcaaaaatcaattttgtcaaacatagtaaataatggtcaaaagaccaaaatgcccctagggccaattcccacattttcaaacatacaagggc

SEQ ID NO: 69115 - DNA, 4312 bp, Cannabis sativa
atatatttaacaattatatatatatataatataaaagatgggttttttttttatttttatactttaattatattttacggaaatccacataaaaactaacatatagtaactaacagaacaatttaaatctcaacaaaaatctactaaacaacctatgcataaaaattaatggaagaacttaaattgtaaatttttttaaaaaaaaatatataaaattaatagtatttaaaaaatagaaacgacaaatgcagttggtaatttgtagtggactagcaaacgcactacatttacatatcagatgctgattagttggaagagaaaatgaagtgcaaaatataatatcatatatatgcaatcacattggaggtggccttaattatatcatatataatcacaaatgtttaaaaataaagagaattcattagctagaaagcaaataaattatagctaataaaacaaaaccaaattagggccaacacacttgtacaaatagaccagttcatcatcacaaaaatatattttatttttgggataaaacagtgcttctcagtatatataatatacattggtcttgaaagatgaaaagggtgagtcaactcagttgacccaggagaaaactaggtggcttaggcataggtaggtaatagtgggggcaatgtttcaacaaaatcttagttgtggggttttgatgtcacaacatgtttctgacatgttacaatattaaatatgccaaaatccaccatcatatccatctctctctctctctcatgttccatggttcaaattttgtattttatgttcccctaatcttcttccttgtttacaaattttacactaatacaaaatttagaaagcccatcaaagtagtagttgtattcaattagtgatgttttctcacatgaaaaaaaaaatagtgatgttttgcataataaaactaggagaaataatgttgagaggtgatacttactagttgtatttagtactatttaaggtgttattttgttattaatacaattaattattgaatttaacataatttaatatatgatttttataaaatattactaattaattacaagacattatcttagtatgaaaaactatctcaaaactattgaaaatatgttgataagagttatttctaatcttagtatgcttatcatcaataaaacgtcatcgagatattattgataaattattgaaatatcattaaaaaaaacctagatctcaccaaaaaaattagatcccgctatatttcatatcaaaaataacaaaataacaccaacacgaataataatccaaatttactgaaaatgactattacttactcttctaaataatgagcagcgggtgaagcttttcaccgtgaaagaactggaattggagacaagctttgttgttagcacatatgttgttgtcataataaaaattgtcgaaaagcgaaaaaaaaaataaaaaataaaaaaaaataaagtttatggtgcttcattttagagatatgaacaaaagaatgagatatgtcataatcttttaccatctttgaatatcaattaatcaatcaacatcttattacttctaaagaagctttaaaaaatatttttttaaaaaaaaaaatacttattttaagcttaatggtccaatagtaccaattcactcttgttttcatttttaaaagtagactaattcaaatattgttttcattatgaataagaggggactaaccagagctcttcatcaattgcaagtatataacacaatattgaagataaatcaaataataataataacaaaaaccttcattaatatcaaacttcatacaataattaatacaataccatgaataacccatcaaattagaaaactaaagatatcacactctataaatttatatatatattcaaaatataatagatgacactagaagaggggaagaggggaatgttgggttgaccttgattttttcagcttctgatgatcattctgcttttgggtttttttcaccatggaagaaatcaatgcacttgccttttatacaatcatacataatttttttaaccaattttttctttggaggatttacatcacaaataatgggttggaaccctttcttcttcctcctcatatttgttgggttggattcatggacctctgatttattctgagatggggtttgattcattttcattgccgtttcgaaatcaaagatttttctttattacaaagctgctctcttttttttagtatggattgttgagatggaactggtttcagccttgagtacggtttttataagagataaaagcgtgttagaatttagaagtgtagtggcagaaatgaggtttcgaaagtaagatgaaggtgggtgtttgataaggtgtaagggattttatttcaaaactaattatataataaaaatgtgtattgtatatgattagtgagtgtatagtaatgcataacattttataagtagtatgatatatcttttaggttaagtctacagtacatcttataaaagagtgtttcggtaaactgttttagcatttagaaaaaaaaaattagtttaattttttttataaccgtgtatattatagttatttaggaccatctgttttatgtatatatatacacgcatggtaagtaattgtttaaattttatttttagtattgtaaattatccgaattttttttaaaatttacaagtaatcctaaatagctataatgtacgcgattatgaaaaaacaaatttagatatcaaaatagataaaagatctaccaaaacggagtagggccgtgtacattaaaaccaagaagaaaaagaagaagaagattctacacttattcaatgttggatactcaaattcacactgcttttgtttcagattcacaaaaatcagaaaaccaagactcttgtatctctagtcaattggctaaaaagaaaacaaagcagtggaggaaagcaattcaacgtaagacctaagttgatggtgttgaaaaagttaacaatggagcccatcactgatttttgttccactaattaaaatattgcttcaaatcttttcactttcttttcctctgaaatagttttacacataactctttcattaatgcttttattctaaacttagtcaaaccaaacaagttattaatcagtccaactacgaaataaagcaactaaataaacttagaagcacatactcaaattatacacatgcatttgttctaaatcacttttacacacattcagttcttaaccctttttacaagttttggttgatttttttcccccttttttgagaccatttttctttttgaaaacaaaaaggaaaatgctctaaaaagaaatgcaaatcaagccaaagagagagagaagaagtccttagctaatagaacaaaaccaaactagggccataataaatgggggggccaacaccacaactttggctagtagtggctactctctagacaaagcaagagaaataaaggtcaccctaacactatggtgtctcttatataaaatactaaaggtcactcttgtactatggtgtctcttatatcaaaatttccctatataaaatactaaaggtcaccctagcactatactatctcttatataagatagaatgtaattttctacttttgggtcttttatgaagaaaaaaggaaaaagaaatcaagaagtgtttcactcaacagttaatagtgggtgacaatattaatgttatcaacaaaatcttatctacagcttctcaaatgttaaaattgaccatcacatctcacttttatgttccatcctttcaattttttgtattttgctatgatgtgtatttaatttgaattatatatactttacaaagaagaattaacacattacttctgtatgattaagattaattatatataattatttatataaattgtgtatgattttatgttttaatattcttaagcttaatccatacattataggtaaaacaattaattaaacaagatcctctaacaaatccatatcactaaatagaagacaactaagtcagataactttcctacctcgaaggctggaacaaataaaagtactaaaacattccaaaaaaaaaatgaatataactgaaatataaattctccctttttttaagtataaaaaaatgtacagaaagaaagcaaaaaatccgtacacttttctttttccaattataaacaaaggaagcaaaaaagaatctcactaataacaaaatccaaaagcagaagattctaatttcttactaaaccaatccaataatctaataatcctttagacatgtcacatgggattggg

SEQ ID NO: 69116 - DNA, 8858 bp, Cannabis sativa
  modified_base (8787)..(8823): a, c, t, g, unknown or other
ttgattttctaagtatagaaaatcaaatttcccttttaaggtgtgcatcaaaaaaatttcatatgcatgttaacacacatgtatattaaaaataatatatttttttttctaaataaaaacttaatttttttttgtcgtgactcactaaaatttaggacccgcctaaaaaaaaaagtaggtaacaatatgttgacgtcatggacaaattcaaatattctttttttttttttttttttgaaagaaaattcaaatattcttatatatttaatgagagacacttttgatattaataaaagttacaagttagtaaccaaacgtctgatattggtgtgtacattggtccaggtcatggccgtaggactacagctggtgagcgccttttggttctacaagattgcaagaatgattacttataaattgaaacagagaacaacaaatcctgaaaaagttgcttaaaaatataaaccttgtgttgtgtaatattatcttctgttggagaagcacttattgtttatttattttttgtagcaaaaaaacgaagcataaaaatgatttatggaatgaattttaatgaagaagagaaaaacagaattatttcagaaatatattaaaaatataaaaatatgattatatgaaattttaaatatttttacagtttataaaatattatttacagaaaatataataatccattaatgtttttacattgtactcctattatttttttattatatttataaaatatcgtaaagatattaaaaaaaaaaaaaactataatatataaaagtatagtaattttaccaaaaataatacttttattgactcgttgtctcgacttttcatttcattaaagggctataaatattggtgcagtgcaattaataaataataaatattgaactataaattttgtctacggaagttgatataatagatcaccaacttcttacctaaactcaaccgagataattaattcaatatgaagtatagttgagattgcattatgagaggaccaactttttctgaaattctttaatacccaactcataatttttctttatattttcaactttcatgaagaaaaaataaattaaaaaagaactgttgttaatctgtgataattctctcaaggtaaaagaaaaaaaaaatggaggatcaagtaaagaatgtggttatggtgggagttatttcatggtcaatatcatttatgttaataagaaatattttaccaaaccgttcttttggattctgcaatcgacttgtttcttcaatgcatgcaattctagctgtgattttagcttcactgtctgttgaagattggaactgccctgtttgtcctgtggcttcaaattcttcttctaaacaggtattaccttaaataatcaatgcccaaagcaatgatgtttcatggggttattgtaaactcaccaaaaatgtataaatttagatataaatatagctatacaaatatacagacatgtgtgtatattgggtggagaagaagagcttacatgtttgtagccatgaattaaacaggtgacaacattagctgtgaccctctcttatctcatatacgatctgatttgttgtcaatttgataaacaatttagtcttgataataccattcaccatttggttagcattgttggaatcggcgcaggtcttgcctatggaaaggtaaacaatggaaaatatgttataattttcttttatttacctcaaaatatgttacatttttttctttctttcttttcagagtggttcagaattggtggcagcactgtgggtatctgaactctctactccttttctacacttaagagaactcgttaaagaattaggttacaaagatactgacttaaacttggctgctgatgtacgtcctagtcgaatagacttgtcctattatattcctttgatatgaaaatcttctaacattgttgcgtgtctgttcctttgaattattgttattagatttcttttgcagtagtattttcagttgcaaggatggtactaggatcttatgtaacttgcgtaactgttgtggcaaacaatcctcttgtcatacaggtaaaagggtttcctaagacactgctactaaaagaattagaactaggagaagttactaattaattcatctggaatctaaataacataatgcttatgttatctattttatccaggccatggcagtgggattgctgctcctcagcgcattctggttcttcaagattgtaagaatggtcaaatataaactgaaaagaaggtcgtccacaaacacaaaacatgcctgaaagtacaagcatatataatcagtagaagagtagcttgagcaacaaataaattttatctggaatcaacttttattaatattactatgttgaactgaattctgctgttgttagtttgactacttcatgaagccatattctgggtagcattcaaaaattaaaatttaactttgtgtgttccttgctaaaaaaaggttgaccatcgagtatatgatttagttactacagtattattgcatacagaatcacaatgtggtaatacaaccaacatctccaaaatccagtgatccatttcttcaaagaacttagtaacactcctgtaaacatagactaaaatgctcttgcctaaaacatccatgaccgagaacaggacattactcttttccgaaatctgcattgtaatgtgaacttgattcgagtttcttcgcttcatttagcttccgtacagcctggtaatttgcagtgtatataatgaatttatgaataagtcttcaaaattatttcacatgggtataatttacataacaattggcacataaaggaataacccttttttttattcccagaacgtttattttctcaacagattcagcaaaatttctactgggaaaacttttaccttcatgaaatcttcatgaatgacatagtcccgctctacacggattgctgacattcccgcctcagtgcaaatatttcggagatcagccccattaaagccctatagaaaccacatagcatacatataaagatgtgacaataccaaaaatataaatataggtcgcacacatatatatgtattggacactaacctctgcaagctttaccacagcttcataatcaatttcaccatgtttggctataccagcagcatgaatcttaaggatttccattcttgattgctcatttggtaagggaatctctatcttcctatccagtcgacctgggcgaagaagggcaggatctagaacatctggtcgatttgttgccattattattttaacctgtacaagaaacaaaaagagaccatatgtattttattttatttactaaacaacaacttgttaaaaaaactttataataaagatatagtacacaaacctttcctaaaacagacatgaaaaggatctgcaaacatttctaaggtttctctctaagaaacgcatataatattgtaggtgacaattgacataaccaaaccaacagaatactcatccaccacattccatgactattgaacaatgttactggggcatgctgagtcatctatttgagccattagattcctatgattacaaatacaaaagtctcctgcctgaaatctaagctgtgagtaagtcacctgaagtttcttcaatcataactcaaattatggttcctaaaggttgggttaacaaaaaaccaaacttctattcaaaagattggctggggtgcttattccatatgtgtaagaagagccttggattccataagactcgatgttaaattcatacctttccaagctggtcaaatccgtcaagctgattaagtaactccatcagtgtcctctgaatctcacgatcagcacttgttccctcactaaaacgacgcccaccaatggcatcaatttcatccatgaatataatgcagggctttaatgaaagaagcaaataatgaaagttaaacaatgaaaagagctgtaaattaaaggaaaagaaatatagaaataacagcaagagatcttacctggtgatcacgggcatatccaaacatttcacgtatcaaacgagcactttctccaatgtacttatcaattatagcacttgaaacaacctattgttgataaaagcaacagtgaaactatgcattttagaccaaagccttaaaatactaaagcacattaagcacccaataattaaaaatatatttatacctttaaaaagttggcgtcaatgttacttgcaattgctcttgctagcaaagttttaccagtaccaggagggccatacaaaagaacaccctttgaaaagtaaacaatggaagaaagttgattagtatagaagaatcactttaacgaacagggtcaattcatatggtacagtattcatgtaaaccaacaagagggaataggataaaaccttgggaggtttgatcccaactctcaggaagagttctggattcatgagaggtaactcaatagattctctcaattctctaatttgatcagataaaccacccacagcagaataactaacattgccggggtcttcatgaagcatattataaacaactgggtcaacctgttaactcaagttttggaaagaaaggaaaaaaaaaacattaggcatcagtttccacatgagaactaaaactgaagtggttgagtcatctataaaccattatgtgtacccttctaacttgaagtatgcatataatatatcaaagcttacttcgcgtggaagagctcgcattattgtgagtgttgtcatgtcaagaaccacccttgtgccagaagtaagcttttccttatctactttggtgcgacagccaacgacatacctaggtccactgcttgctttcacaatcactgaaattttacaaacaattacagagcagtatacaatgaaaaactaacattcatacatctattaaatgcgatcttgttttgattttgaaaattatggataaatttccagtcctagtttaaaggagaaatgtcaaagagcaattacatcgttcattgttgagaggcctgaggacttctccaataatctgcccaacactttgaagagacttcaaatcatcttctgttttgttaaactctttctttgaacttcttaaactatccctcactgtaagaaaccaattacaattttacatctattagaagctttctcagttcaaaattgatcaatgagcaatgagcataaagaattgagcactaaaaagaccttcacaaaataagtgataaactgtagataaaacaggcacaaatcaactcttaaactccaaatctttgcttctgtttcaagatgaaatgtgctaaggtactgtgagcttagtttttaacttcaggtttaaaccaaaaaaaaaaaaaaaaaacaagaaatgaaattctgaaaccctaacaatcagagatgaaaattatgattagggttaaaagagtgggaagagagaaaaaaaaaaccgtgtcgaactctagactcgagctctctctgctgaaggagtttcttgcgatagtcggtaatgacagtacgacgtcggagtgcatcttctccatcgctcatggttgatatgatatcgtcagaagcaagtaaagaaattccttcttagtttctgctctgcctttccactgatctcgattttaaactcctctcttctctaacatttttcttttgggttaaatatttacaaacacactaaatactcaaaaatgaaaatgatgccattttttctaaaactattagaattattgtatttaaagacttgtgtttaatttcgttcacttttactaacgcggtgattgcctatattaaatcgtgctcttaaactttaatatctaccaaattcgtgtctctgaaatttgacatataccaaatcatactctctgaattttcaacaatattaggcttccgttaataaaattagacaaaaattcttaaatcaatagttttggagaatttttaacggcatgaaaagtttaagagcataatttggtacatgtcaagttaaaaatcttgattagtcctttttttaaccaaagtttattaatattatgagaaatttacagtcaaactccgtatatttttttttgaaagaaaaccttgtatgctttaatcgctatacatttaatattttattttattttattgggcaaaatctccttaacttaacttctgtttacaaatcttagacatctcttaaatttgactgttaaatgccaactgagactgtcactatgtatacatgtatacacgtagcgtattttcattgtatcagtgtgcttacttggcagacctgagtcattaccaacataaagacgttctaatccaccatattgaaaactattcatgatgttgtgatggtttacagtgcaatgatttttataccagaatcaggataccaacttccatctccaccttgactagtgtgagcaatgtgagcctgcatagtgttagaatttgaagttggcaagactcatgtaaagcttttatcaaatctatagaaataatcaagaacaatgtagctaatcttgtgacaaagttgagattgtggcctgtttagtgtagaggagaatctaccactacaattatgaatagaattttctcagctagcattgaatggtgataatccacctcctgacatattgccaaaattgccatggtaagatcctctggtatcattgaaagcagacaaattagaaaagggatgtaagtggtgatgagaaggaacctgacctcgagacactccataagtcttaaaattacaattgaaatgagccagattagcttcatgaatcaaatttgcttcaagactttaatatggttcatcaaccaccatgttagcactaggatcaacttctttatatgtctttttaatttttgacccagatgcaacaaagagaccccccaatttcaacaataagatatccttcagtccttatattagatgatatgatgaaggtgtcacactcactagacagtcctttaaagattgcagctatgtcataacgagcaataagcatttcactagcagatgcaagaagaacaacatgttgtttcaccttaagaagatattcgtttagtgccattgatcccttccttagattttgaagtttggttcgaaactcaagaatcttggtagagacttgaaatatgaagtgcttctttaacgtactccatatctgacaagcagtattacatcccaccattcgcgttagcaagctctcattcatagattacaataacaagtgtttactaagattttcgggaacgagattaagtaagatcttacgaaattaaatagtgattaagtcaatgagatggatgatttttacgtggttcgggcattaattatccctagtccacgagtcagtgtattgaccttttaggctttaaaatgtattacaaattagctttacaataaggaaccctatataaagaaatagaaggaaatgaaaaaagctaatgtcacttcttcttctcattaattttcaaaaatcaaaagaaataactctctcaaaattgttccaaatttgtttgagtatcagcccacactattcaaggtgatactcagacctttgtagaagactatgatgaaacgaaggaggagaagatctaggttcagttcttggcaatactctactacagaaaggatcaagggtaagagaactgaacggaatgagtcaatactttctactacaacctaatgtaaggtttttttttaatctcttatgtgtttaatttattgtcttaggaaatccatattaggttgttagattagtttaatccaatatacatgagtagcaaataagatcctagtaaaataagttttccaacatgttctttctagtttggttgcacaaaataagggaggattcgtaaagggcgcttcattgtgcataacattatgaatggtcagaaccttgtgaagcactatggaagaaaatcaagtaaagaaaattgcatgatcaagttagacttacggaaagcttatgatacaaaagaatgtgactttataaaagaaatgcttgaaactttccacttcccgagcaagtttattaaacttatcatgtaatttgttcgcacacctaaattattctatcttatgattaatggtccaatgcatgaattttttgaatccaagagaggtttaaggcaaggtgatcctatgtctccattactttctgtattgggaatgtagtgcatatccagaattatgcaaaaaaatttgtcttatggacgattttaagttccatgaaaggtgtgatgatctaagattcaactacttgagttttgcggatgatgtcatatttttttgtcatggtgacttcaagtctatttattacatgcttcaaggtctcaaattgttttctagaacatcaagacttcatcctaatgaagcaaagccttccatttactattgtggtatgtcggagtcagaagtacaaagaatcttatattcctcagagttttttaaaagctcccttcctttcagttacttgggtattcttatatgctctaaaagaatttcagcaaaagattgtcaatttcttgtggaaaagatgacaacctgtattagaagttagagttctagattaatttcttttgtaggaagcgttacattgattaatttggtattattgtcatttcattcttactggaatcaaattagcattttaccaaagaaagagctagaggatatcatgggaatatgtagagcatacagttggactgactaagttggcttaattagttttggtatcattgcttgggagcattttgttgggttttgtgccctnnnnnnnnnnnnnnnnnnnnnnnnnnnnnnnnnnnnntaataaagatcagaaatcattttatattgcatggt

SEQ ID NO: 69117 - DNA, 811 bp, Cannabis sativa
agtttcacctgggggacaacataatcatcaatcgggtaagctccctattaatcgagaaagtgagataattgaaaaattctcatcccgcccaattccttctgaacgtgataatggaataataacaacgattatggcccgaatggggcccacttatgaacaaatggtggaagccacacatgcccaagtttgcgtgtctcgccaggcccataagcatccggagtcaaccccatttccttggcccacttatgcaagtgaaattgggcttacagaagaacttatggggccagcccaagtggaaaaatttgagcccactcctgttattttccatgaccctaaagatgtatccaatctgatccaccattgtccacaagctaggaaaaggaaggcaggacttacgctcataccatatgttcagagaactcctgaaacggttcgtgatttcgaagaattgattccatcgactaagggattctccccagaaccatcttcctctttcaagatggggagtggtggagcggcaagttcatccaagaaaaaagaaagcaagaggcggaggaggtccgtaagggcgacaactgaaaaaaggaaagatgaggaagactcggcaacaattccccaggattctagtattgccaagaatttggccatagatatggaacaactggtggaggttaggattgattttgctcaggattttcatacgggcgaggaggcggccctcatcaagcccccaaccgatcaatgaggatgttatcgtggatctgtcggggacttgcaaaggactcgacagttcaagcccttcggggctggg

SEQ ID NO: 69118 - DNA, 1265 bp, Cannabis sativa
  modified_base (997)..(1008): a, c, t, g, unknown or other
ttacaaataaatcaatatataattttaattatataattataatattcagtattatatttaagttttattattattttacttatttacaggattttataatgtgttgtgccgatactttttgtgtgtaatgtcttttaaattagtttattcgtgcttacatattatgctatgttgtgtcaaatatttatactatcgtgttatattgcgctcaagtctataatttttttatgtcatattcattcgtgtcatgtcataaaaaccccactttatatttacaattagaaattacttataatgttgttattttgagtgtgtgagaggagagttagttagctcgacatgtgagctaaactaacatatttaaatacatgatttctcttgtattatgtaacaattaagagagaaaagaagtaagttatagagaaagacagagagatagagagtccaagaagagaagaagattaaagatgaactatatatggtgtaatatttcaataagcttaataataaataattaggatttatatttatattatgggttaatcaggtaataagtgagattatgatcctattaatctatttcagcataaaatttaaattttgctataagtgagtaaaaagcgtaatttataaattacggagatttatatagtatgtgagaatgtaatatgagttatatgtggaattaaaatatttttaggttcggcgatcctgaagacttgataagtagataaataagcgtaatttgttaattacagagatttatttgaagtacgtggatacaatatgagttatttgtgaaataaaaatatttttaggtttgacgactctagagatccgattggaggctaaaaatgtcacaacagttttagttaaaaatgttgatgcgattattgagataagttaattttagaaatactaaaatattttggggtacccaaagttagtcaaataccttaaaaatagagatttcttagtggctaaaaaataataagannnnnnnnnnnnataaagtttttattaatattattaatatattattataatattattttataaatatataaacttaagttttgaatgttttgaatatatatatattataaggtatatcagtaaacataaacgaaacgaatgaacaaaattctcgttctccgtcttttgacaaaaccttctccttttatatttatatttttcaattttcaaccaaaacctagcgatctaagctccggtagtagcaggatagcaaatctttgaagagggaa

SEQ ID NO: 69119 - DNA, 894 bp, Cannabis sativa
ttcaaaacaaatattttatgagaagaaaggaacaaagggagaaaggagaagaacaaaggggaaaatgaaaaagagacgattgaaaagagagtggaaagagagcacgacgtcatatgactcatattatgtatatttttttatcgacacaactaatagaatttttttttgttttattctgacctaattgacataatttttttttacagaaacacaaaaagtgttttttagtgcgggaagccacactgtaagggagctccctgattggtcacgagcaaccactcgcatacctccccaatggggcacgaaattcatttgtgtcacactatagacctttcctataatttatattagaaactaaaattatgtttatgtatttaataaaatgtatattaaatgtaagtaaattattatatatattgtaataaaattatataatgtatataaaactataaattttctttaacaaaaatgcatggtacaagagaagtaaatgaaaggggttccaaaatttagttgtttcatcacaaaattggctttttcatttgaatacttaataaataattgagaaatggtaaaggccatttatgatacttagcaattaacacatttataaagtataatattgttattgatgtaatttaatatcgattcacatttactttacaactaactaattataaaatgatactttatcatagtattaagtaatgtaaatcttttatatcaatgctcttaacaataagtccacaacatgactaagtgtaagttatttacaaactttacaaatgggtttgactattgttgctatcatcaaataacaataatatatatatatatatatatatatataaaaatgtatttaaagtagcaccggaaataataataattaaacta

SEQ ID NO: 69120 - DNA, 1614 bp, Cannabis sativa
ctgataaatgtagtgcatatgcatatagcaacatcagaattctcagaaatcaacctagtccaactccctgtaagtagaaaattctaattgaaagatgacagatgacgagaacagaaaaatagaatattcaacgtagatcatcagaagacagcatacactgcatttataaattactgaaggcacatagttttataaaactttaatttatagagcctgaggagaaaacacattcagtagtttaccataaaaaatacagaacataacacgatacagccaaagtccatgcaatgtcatacatgtaaatgatgttgaagttataagaaaggatattactatcgaccttggtattgtcttttaggtaactctttcctctaatcataaatcccatcccacttggtgaagtccaacaatttgtgtctttttcgtccttttccttatgcaaggagccattgaattggcttggatcaatttcagtaaaagttgcatttgtatctagttccttctttgtagctgaaaagaagaaaatagaaggtaaacatgcagaactttaagagatagggaaatgtgcggtgtgtgaggtttaagcgctgtgttaattggtcggggcttgctaatgagatgtaaacttcaaaagcatgtggggcttaagcagctaagcctcactgattcaacattggctttttaatcaaaatgttgtttgttttattttagaatcgtgttccaggcaaccacatttctattacaatgagacacaaatagtgcaatgcaacacagaacattgaaatgcctaattaaaaccacaaagcaatggcagacctgaagctcgctttttagttaagcttgtaatggcccatgaaacattcctcagtttcacatttccatcctgaaaatttaggggcaggaaaaaaatgtcagactttttttcaccatctttcttcattaaatatgatgtatggagcaatgcattctagttcaaatgacaaaagactggaaaaccttatggtcaacttcttcatcatcatcactttcttcttctgatgatgatgatgagtctcctgcaattgcgtcatagaattcttcatgtgcttgtgtctcctcttcatgtccattttctccgtttgaaatagacacttgggtgaatttagagtggacaactgtagtggttgattcatatttgacagcaggatttgcactaatatattccttaagacctgaaaatttttcatttaaagagtcaaaaaccaaaaaacattagataattaccaaaactgaaggtccatacatcaaaatagattttgcaattgaaaaagtactaatatatcaaggtattctcactcagattgtactgtatctagcatagttgaatagttgctaagagaaagaagaaatgtaagggcatcaggagataatggattttagaaatttaaaagaatagaaaagtgatggattaaatttaaggaaaggcagaaggtcaaaaaaataaagcattcgatagaaatgtaatagactgcaaggagatgtgggttttaatggttaattaggtttcatcaagaccaacactttgatcacttccttccagtgcaaggcaaattagaaagtgataatcggatcaat

SEQ ID NO: 69121 - DNA, 1476 bp, Cannabis sativa
ttttcatataacaatagttatcagagtactattggtatgacaccgtatgaaatgctttatggaagaaaatgtcgttcgcccattcattgagatgaagccggtgaactgagataccttggacctgatgcaatccaaagaacgagtgaggccattgagaagattcgagctcgtgtgattgcctcacaaagtagatagaaaaactacactgatctgaagcatagagatattgaattctaggttggggacttcgtcttcctgcgagaatcaccaatataggggtttcagagatttggaaagaagggaaaactatgtcctagatttattggtatgttcaagattctgaaaagggtaggtcaggtagcctatcgactagccttaccccatgctttatctggagttcacaacgtgttccatattttgatgcttcggaagtatgtatttgatacgacctatattcttagttacgaggacattgaacttcagacagacctatcacacgaagaacaaccagttcagatcttggataggaaggaaaaagtgttgcggaacaagactcttccgctagttaaagtgttgtggaggaacaacaagattgaaaaaggcgacttgggagttagaatcgcagatgcaggagcagtatcccgaattattcaggtaaatttcaaagacgaaaattctgtaaggagggaatagttgtaatattccaaaaattataattatgttaaattggacatattttattaaatctataattatatgaataagtaagcgtaatttattaactgcggagattttattagattatgtaagtattttatataccatttttgaaataaaatatttttgggttcaacgaccatagaaactcgacggattggttaggaatgtcatggtgataaataatgagatatattgaaaatataccgaactagtttagaaagttgagttgtcagtttagttggataagttaaaaatgaccaaaatacccttaggttatgttcttagtttaagtgttttaagaggggtaaaatagtcttttactaagttttattatttttgttttatgtgaagacatagaaattactatctgagaatttagttatctctttagttttataattaattggttagataattaagttagtaacttagaaaaaaatcaagaaaacatacaattttcatttctctctctctttccttcgaagccctaagagccagtaggaatcaaagcatttttttcttcacaatcaaccaattataagctgaattagctaaccctaggtgctgttcaagctttgaggtaagttctccctctgtgtcttattgattttaaggtttaggttgacttttggttagggtttttgtggtttcgaggctgtggtgtaaaagcgagttcaggatgtgtttctagatttaatttaagtttttttttgtgtgtgtgtattgatcatatccttggctgctaggtctagaatt

SEQ ID NO: 69122 - DNA, 1687 bp, Cannabis sativa
aagagcttttagagagaaaaacacttcgttctttctctcaagtcaatacaactcaaggaaagtaggctattaccgcactcacggggtcaaacctctttaaaatttggtgttctttattactttattgtttttgctctattttaattatactcttaatcggttattaattgactcactgtcgcaggctaaaagtgaggtcaacaaaatgatattgacaagtctatgggattgttcaaagggaagcatgagtatgatccccttgatacctttgtagttcaaggtctgccacaacaaaatcttaggcaattattcattagtttagtttttgttatagttgttaggttttttattaattgcgtagtttttgttgatatgtttttttttgttttttattgattccttgtttctatttattgcagtgattgtggtatattcatattcaagtactctaaatactttgctcatggtttgattgaagatattctaaatcttttggatgtgacatttgtatagaacaaagtttgtatcgagttgtttgtgcatgacatggcaaagcaagtaaattgatatatatctttctctgaacatcctaggaggacgccagttaaggatgatgatgcagatgaatagatattgatagtagtgctctttttagaactttttatatttaatggtaccaaaccttttatatgtaactggttaagtaacaaactcttttttttattacatcttcttttataggcaaactccttagagtttgtaattttgtggatatgtaaaggtattgtctagtttggagttttttaatgaagctttagaattcgtaatcttttggaagtttatggatatatgtataggttatttcttgttgcagttttttgataagcaaactctttagagtttgtaatcttttggaattttatggatatatgataggtactctctggttagattttagttgttttgcttctttttcaatttaatggagttgttagttgtcatctagcaaaactattatggtattattttgcatagttttatgtaaaatttcttagtttttatttttatattgattgtttttttttactattacaatttttagtaaaaaaattcaagttattatcttatgagcttcttattttctaattttttttttaagtttttatgaaaaatttggtttgatctaactttaatttaattttgtaaaaaattttatttgttagttttttataatcttaacaaaggaatattttgaaagcaagaactaatgggcaaattatgaccgaaataacagcataagttctccatttagcaacatgttagaattttaatagatattgagtccaatttttaaccttcgtagtttgttattatacttgaaattccgtattttaatattcctatttttattatttaattaaatacttaactaaatgcaaaataatgaaactgatactgaaatagtttttatgtagctacagaagataactttgtaactctagaagaaactagaaaaacaaagagtgcagaaaagtaaaaacacacaaggtttttgtatgtggtttcaacaatcctttcatattgttactactcgatggggtcacgcccagagataagatttatgagatagatctcaaaaatataaagtaattgacttatgcataaataaactccctcttattatatg

SEQ ID NO: 69123 - DNA, 818 bp, Cannabis sativa
  modified_base (134)..(135): a, c, t, g, unknown or other
  modified_base (225)..(226): a, c, t, g, unknown or other
atattataattaaatggcttaattgttaaaataattagagtaagaatttaaatataaattaaaaaaattatttataaatattaattgctgaaagaggttttgtaaaatacttaattaattattttaagaaaatnnttaattataattaattaattttgaaaaaagaatgtttacctattagtaacctgctattacaggtcaaagaaaaatgtaaccatgatggtnncaataaaaatgtaatcattgaatagttacctatttatatatgcaccacattgtatgcttaattttttttattcagtttaggcttttacaaaagtatatatatggataaatagcggcataagtactcaaagttttgagtttataagtggtatacacctactgatttttttagtggcataagtacctaatgtgtgtaaaactgtaatttttctctattttcgtcaatacaaactccgttttaaatttattaaatgaagatttggaagtaactgatactacatatttccgtccagaccaaataatctataatctgagtcttatatgtgctctgtttatgataataacaaaatctgtactgatgaaactggaagaaaattacaattttatagacattaggtacttatacctctaaaaaaatcattaagcttatacagcttaccaacctaaaactttggatacttatgccactatttaccctatatatatatattttttgcttctttttctatacacatacctcattgtaattagctttaattatctaaacttgcaataattttacattttatttttccaatgagaatttacatcac

SEQ ID NO: 69124 - DNA, 634 bp, Cannabis sativa
cgattaccaagtttcagtttaatcctattaaaaattcgattcacgagttcaagcatcaaaaaaataaagaaacaacaataagagacaatcaatttacaagcttctcctgttactgaaaacacattccagttaggtattatttgagttcactaaactaagaaatttcactaaataatttgtaaaagtacaacgaccaatttgtacaaatttgtcaaatcccttacagaagtatttatcccaatatactaaatcctttggcaaaacaagcaagatccctttgcttattgttcgttgaaatcctttcaacaaagctctagatctgaacacctttagatttgtaacaccaagccttagctgaaatcgattcagctttcactacttgatttcagcacttgctctgaaactttaactcacaagaatggagtttcttgttttttttttaaaaaaaaataagcaatatataaataggaaaattagacctcgcggtcattacaaaggatagcatcaagaattgaggagggctccacaaatcctgaaatattttgggcgaacgtccaattagccacattatgggccacaaaattacaacaacgagaaataaaagaaaaattacaagataaaaagtttttagaga

SEQ ID NO: 69125 - DNA, 537 bp, Cannabis sativa
atggagtttcgaactcaacaatgtgttttccttggatattcttcttcacacaaaggatatctttgtgaaaatcctgaaggaaggctattcattgcacgacatgtggttttcaatgaaaagttgtttcctgcatccataaagcaccaaccagtacaggtaacttcagaccatgcttttccttttgctcagttctcagtttctaataataaaccctgtactagtaccccctataacactcctcaccatgctcctaatattgaccctgcgtgtcatgtacctgctgctttcccaaccactcaaccaaaccctgcaacagttgtacatcctaccttgaatacagctcatgatcatgcacctgtccctgtcaataccagaaataacaataccagtctaccaaacactgaaccatcttttatacaacaaaacatatctcatcaaccaccagatattaccattcctcctacagaagcacaaaatgtaaatccaccagtagccctgcctgcccttacccgtacccatcctatgcgcacaagacta

SEQ ID NO: 69126 - DNA, 810 bp, Cannabis sativa
aaatcacattaatttttggaataaaataatccaacgttcaccacatccccaaattgggaaattagctcataatctcaacattcaaatcaatgattaaactaaaaatagaataaaacataagaaattaaagggaagagaaggaaactagatggaaaactcgatcggatcgccacactcgctcccagaatcttcttcttttattttctagggttctctaaatgaatccataaaaattcgaaacctcccttttgaaactcatttttacaacttaacatcgagaaaagacgaaaatctccttgttgacgtgtaatatccaatacaaatatattattatttggtatattattgtgtgttataatattttatcgttgcactaaataagatatgaattggtatttgctaagtataattattttttgatttttagagattctgatagttagattaaatgttagtaaattttaattgtattagaaaataaaatttattagtgaatattggtatgaatagataataagattgttacatatataataggattatataatatatatatacatactaaagtctggtcatatgacctgtgttttctctgttactagtcagcagtaaagtgtgttcttattttttcttgtgactttctggtgcgagttttacaatggcagatcaggatttaatggaaatggagaaggagtgtgatcatatcacgctaacgggaggagacgacgacgacgggggattgttatatgatacgaatgaaaaagaattatccgagtttgatgatcgatggtgtttagtgggaaggtttct

SEQ ID NO: 69127 - DNA, 1692 bp, Cannabis sativa
tcttttatcaaagctgtcatggttaaaatgggttttgctagcaaatggatcaatctcataatgaagtgtgtcacctcggtcacatattctgtggttcatagcagtcatattttgggtcctattactccttctcgtgggattcgtcagggtgatccactatcaacatacttatttatcatctgcgcagaaggcttttcagctttaatcaaaagttatgaggctaacagaattatacaaggctgtcgtgtggctaatggggcaccttctattacgcatatgctgctcttccgatctagttatcttttctgttaagctacatctgatgctgctgagagcatgaatagacttctccgtacttttgagcttgcttctggacaacgtttcaatgctaccaaatcctccattttttttttcagtcccaatactgagaatccggtcaaagaacaaatcagctcaactcttggaatgtccgaagctactgatggctctttctatctggggttaccaaatattattggaaggaaaaaaacggtgattcttggctttcttaagaacaagattattaaccgaataaacagttgggatggtgaattcctttctcgtgctgggaaagaaatcttgcttaaaactgtcatccaatccctcccaacttatgctatgagtgtattccttattccgttgggtatttgccaagacattgagaaaattatggcaaacttttggtggaaaacaaaaagttccaatggtcaaggaatcatttggatgacttaggatcgtatggctgcaccaaaagactctggagggtatgggttttcgccatctccatgatttcaacattgctatgttggccaagcaaggttggaggcttttatgttcaccatcttctcttgtaagtcaagtctataaagcaaaatactacgctctcactgatttccttaatgttgaattgggtaataatcctagtttcgtctggcgtagtatttggagtgcacaacatttggttcgtcttggggctggaataactatcggcactgggttttcaacacgcatactcaaacaaccttggcttcctgattctatcaacccttatgtatctactacaggaccgggtcttgatgagtacatggttagttctctccttgatgtttctactcgaagctgggatgtctctcttgtcaaggacatgtttaacactcgggatgtggatttaatacttggaatccctcttagttctgttgatgtcgaagattgttggtcgtggactggtgatagaacgggctactacgcagttaaatctgcctattccatgctgcaacttcaaaaaaattctcggcctggtgtgaacaattcaggattctggcacaaactttggcatctaaagataccacctgaagtgaagaacttcatgtggagagcagtgtctgatgctcttccaacttgtctccaactggttactaagtgtgtaagtatttccccaacttgtcctgtttgccttcaacatgttgagacaacttctcatattcttcttagctgctctcttgctttaagttgttggcacaaagctgatttgattcctcatgttgattctgatggcactattggacactggcttgacagtgtgtttaatagatatgatgatgatgttatttgtcgtgtggttatgatttgttgggctctttggaaagcaagaaa

SEQ ID NO: 69128 - DNA, 747 bp, Cannabis sativa
tgttagttaatctagatcctggtaaaatatacatccaacaggatgttcctaaaatagttttcgtaccgatgactttgtaattgtttttattaagggtattgtgatttcttcggatccaagggaggcatatgagggacacccttggatgatgttgtaatgcctctagaagcataagttttatgctaaatgtaagaaatgcgagttttgctgattccaaatttgcaatgaaggttagaaattttctagaattaacatgatactacagaatagttgttgggggttgtcaacgcccttagtggaatcaaatcgaaagaattgaaatagagagtaaccattataccaatattgacattgttagtcagttaggggaaaaaatgatttgatgtgatacttctatacaaggattagattgtattctaacacagtttaggagagttgttgcttaattacttagaccaattgaaggagtataagaagtggtattttagtcatgatattgaattggcagtaatcattttgcactgaaagttgggcaccattttctatatggtgaaaatgtgaagtttatacagatcatagaagcctcacatactttatcttttggaaagatttaattaggaggcagtgacaataataagcgttgattgaagattataacggtgtgattccttaccactctaggaagtaaattggtagtagatgatgtaaatcgaagaggtctaggacaagtttgtaaagagaaaagat

SEQ ID NO: 69129 - DNA, 1074 bp, Cannabis sativa
  modified_base (158)..(169): a, c, t, g, unknown or other
  modified_base (425)..(430): a, c, t, g, unknown or other
caaacttatttttgtgatatctttcgattcaaaaatcatttttcagtgaaacaaaattcaaattttagtagaattttgtgtagaatccaaattttcaaataaaagtctaattataagaataaaattattattcattaattttttaattaattaaaatnnnnnnnnnnnntagtagcctttgaatttaaaattttgatttttccacaaactagcctttagttaatttttgaaattttgattatttttgtttgttttatttattttaatcttaagattagatattacttattttattattaaaatttaaaatgatcttattttgatatcaaatcattaataaaacttaaaaataatctagttaaaatttcaaatttgctaaccatatcagtttttcaaaaaatttatttttgaaatatattttattnnnnnnaattataagattagaaaaatattatttttaacattttatcttattaggtatttattttaattaaaattttatttttgtcaaataatatgaagttttaaaaatttgttaatttttgtttaaatagaaattttaggttttcgtaactataaaattttcaaacataggatattttattctatttatttattaaataaaattgataatatcctaaccatctaaatattttattttcaaattgtttatttttgtatatttgatgtagtaaattataagattagaaatataatattagaaatatttgaatttcaaattaagatattatattatattatcttattagatatttagttaatttaaattatttaaattaattgaaaatttgaaaattagttagctatttgattttcagttagaattttggatatttaggacatttgttagactgttaatttttttttaaaatattctcaaacaacctaaattttaaattctagttaagatatattttttaatattttattttataatagaaatatcctaacctacttttcagaatctgttacatgtttgtttgtttatttatttatttattcaaaattatttttacaaacctattatttgtttgatctaaattgctatgatta

SEQ ID NO: 69130 - DNA, 931 bp, Cannabis sativa
aactaagcgggctttacatttggtttcattagagatatgctcatgaagattaatatccatccatcgtctaatataggcaatggcttttctatgttgaactttccattcatcatcatctaacttagatggcttctcactacctttaataggtttatacaaatctgtacaattagaacaaatcttccatcaattgcttccaaccagaatattttgataagttcaatttcatcattccatccgggtcatccatttttcaacacacaagaattcaacaccaatcaatcttggctctgataccacttgttaggaaaacttcttgcaattaaccacaatattttcccactttgtatgtcaaaaatgggatacttatcaaataccacaataagaaattattaaatatcaaccaaagcaccacaaacaatataaaatacacaagtcaagcataaaagtgagataccaagatctttacgtggaaaccctatgcggaaaaaaaaaccacgggaccgtagtctgctcaaatcatccactatcaccaaagttcaatcttgggattacaaagttcttctctagtaaaactagaggctcacaataacatcatgagtaaacaatcttggaacatcaatacaatcatcatcttcatctcaaagatgaatacaccaataaaaaaagtttaggtctcaccaagtgggtataatagaagagcaccttagagaggacaatcgtcaaaatggaactggtagatttaaagagcaccttgcaagggttcaccacctaaaatttaaggtaaaatggatgagaatcaaccacttgatcttcaaggcaaagtggcgaaacctctttctctctctagctttctttctcttctttccctctctttttcttcctttttctttctgctcacgatacctatttctactttttttttctcttt

SEQ ID NO: 69131 - DNA, 839 bp, Cannabis sativa
atgtggttattatttgaaaatcgcacagctatgatttatccgcttttactgggtcaatgctgatgtggatttagatacgctgcaaaatgtatctcgctgagtcaccccactaggatagcaacaattaccctgacagcaagctagagattttcccatatctttctgagggtgataatgtacataccgtcgtttttgctattgaagacataacattccatctgacaatcgtagttcttggtgacaaggtgaagttcagcagtcaacatcatttgaatgtcaacttctatttgagagagctgactcgatggagccgtcgatctcattgaaagatgtctggagctgattaatgaaggtaccatgagtaggccttcctatagaaagatggatgcctcgctattttttgtttggattcgttcaactattatgattagtttgtgtaatgtatattatacgctaagtgttctaacagtcaatatctcgcgtcttcatctctttatacgtagcgaggtgggtgcctcactttgtattacacatatcatccttataattgcgtcttctgacgcgaaatgttttcttatcaacgcatcagtcaatagtttgtatatccttatctcgcttaagactttgcagtcagcgagttataaatgtactctatcaactctgcatttaattagttattccatttgaatatcgtcaaatataattgccattaattgtcattatatttgttgattcgtattgtgcaagattgacacgtgtcctcctctgaagtgccagccaaatttcaggtgtaacattatccaagataaatatttgtcccttctaatgtatacttcata

SEQ ID NO: 69132 - DNA, 1044 bp, Cannabis sativa
gtatgggtcccagatccaaacacttactacgggtcagttccaagcaatgagtcaggggtcaaggttctagtctagttccactttgggtccccggtccttgccttggtcctaggttagggtccgggtttgaggtcgggtctcggtcctaatttttatggccatgtcccgggtctaggtccctcatccaagtttgagtcctaggtcccagtccaagtccaggacccggtcgtgggtcaagtcctagtctgagtttgggttttggttccgatctcggtttgggtccaaatttgggttcgattctaggtgcaggctcgggtccgtgtcccgagttccgatctgggtctaggttccagggcccaagtctaggtccccaatgtaggtccaggtcctaagttccgatctgggtcaattcaggtttgggtccttgtcccagtttatattttgattcagtttttgggttcgggtttgggtctgggtctaggtcggggtctgaatccttgtccaagtctaggtctgggtttgggtccagttcaagatcctggtctgggtttgggttcgggttcggtccgagttcaggtcttgggtgcgggtctaggtttgggtctgggtcagggttcagtctgaatctaggtctcaagtttcaatctcggtctaggtgtagtttgggtttcactccaagttcgtattcgaatccctatctaggtccgagtttgggtctgggatcgggtcccagatctaggtccttctccgggttcgggtcttggtctcggtcatggtctgggtatacgaacgtgtttgggcctgagttttggtttcggtttgggtctggggctaggtccgagtttggttctaggtttgggtccgggtcctagtctggcagttcttgttcagtttccagttttgggtcccaaatttgggtcaaggtctcagtttgggtactagtctgggttcggatcctggtttgagtcccagatttggatccctttcacgtgtctcagtctagcctcctgggaagttttcccaggagatcggaagagcggttca

SEQ ID NO: 69133 - DNA, 607 bp, Cannabis sativa
aatttatcattgttgagagtgattcgagggtaacgatcaatgcccttaatgggaaggagtcccgttgggagcttgagaactatgtctcattttgtaaaagaacctctcatttttttattggttgtagctttcagcatgttagtagataatgtaattttgtagcccataatgtggctaagtgggctttttctcttcagaggtttggtttcgtgccactatcctctatgcccgataacttattctgtaacgaccgcgaggtctaactatttttaggttatataacagcacacttttcttcaaaaaagaaaaaacaactatttcaagacagtaatcagtaaacaactttaaatatatatctcctctctctatttagtcaaaaacctataaattagaccccaagtccttccaatgactgaccttaatgtttcagcaacacaaaaaaataaggctactaaattttctgtcgctcttacaaaagtaaaaacaaagaagaaaaaaatagaagagaaattattttattatttttatttttttataaagaaaaaaaagaaaactaattgtttcaaatctataactctttttctcctgctcaatacaaacaaagggg

SEQ ID NO: 69134 - DNA, 2925 bp, Cannabis sativa
  modified_base (2017)..(2028): a, c, t, g, unknown or other
  modified_base (2181)..(2186): a, c, t, g, unknown or other
tctccaattcttttgttgatgataagtcaaaatcaaacctcgcatggaagattttactactgctacttctaccatcagcgctctgcggcgggggcggctttgaaaagtatctacaatggtcccctgctacagagagtgcgaggttatgcatcagcttatgaagtttgcatttcgtcaccaccaccttcttcttcatctcatcatcatcatcttctccagaaaccaacaaaaatctcctttgtattaaatatttaacacactgataaccttgttgaacatcattaatgaatccttgcgccagccacatctgtatcaatctaccaacatcaatgtccttacctattggaaataagctacaataagcaaaacaatgtttgaaagacaaaggtagattgtcaaaacacagcttcagcaatccaattccaacattatcatcttcaaattcctttttgaatcttcgccaatcttctgtactttttttatcacgtaacatacttgccattgccgttatcacaagagtatgtcccccacactttcttacaatctcatgtcccacacttgtcttgtaagatcgaacattttcttcatcttcttttggaatagcaatgttttcaaataaaatattcgactgattctcatttagatcacttagtctgatgatgtacccttcactaccactacgcatacattcctctgctacacttccaagttgcataattacaacaacagctccactcgcattggccacttgtaaactctttatcaaagaattccatttcccaccaccgcttaattgctcaccatctaaaacaacaaggaacggagtatcagataatactaaatctttctccaagacctcagaaaatactggtctccaaattctctttacaaatcgttgttttatctgagcatcatcgtacacatgtttggcaagtgtggtttttcctattccttctccaccaactatgaaaacaaccttgaccttcaacttctcctcatcattacccaacaaaatcttaatgatttcatctctctggtcattccatagaaaaacttcttcagcttgttgttgttggtgttcggatgagctgctctgatttattatttcctcttcattgtctactttcctaaaggaaaaaaacttttcataatctttaaagctttttaatctctccgaaacatcgttaagtttcttctcataaatttttttggtaagacgtttcttctcataattatttaataaattctcagcatcattgaggacatcttgaacatcctccatccattgtttcacagcaggattcaactttcgcttcttctccgcatcaacatactgaagattcttctccgcaacaacaagttttggaaggaggtctttacaagtgctacaaagatttttaaggaccccttcttcctttttttctttttccagcaaatcagtgattctacgtgcaacaagggagagattccagcaagctgccattggtgggtacaaacaaagtctagaaagaacaaagagctgatacctgaattttcgaaaagagagagttgtggttctttctgttctgtttctatgctatttcttcataccatctcccaggttgattttatgttttgcaaaagttaagaatttgcaacgaaaccctttatgttttaatttttatacccttaattctcttatttttttttggcaagtttatttttctttgtaaaatttatccgttagatattacgtatcgacttcgaggttttactattacacatatacaggtgtatacaatagtcacacggtaatatataactgtcgtgtcaaatttataaagaaaaataaatttaaagggattttgccacaaaaaaaaagaggttaagtgtataaaaataaaaatataagggggtttcgccgcaaattgttctaaaagttattaattggacattctgttttattaaatcataaaatgaactctatattttctaaaatagtaaaaagaggactttgaactcaattttcaataatttnnnnnnnnnnnntaactaactttaagataatttttaataaaacagatacaaaaaatgtaactaattttgttatagcatttctaaatcagactttgtaaccaatttttattatttttttaaaatagtaaaagtaggactttaagctcaatttttaataattttatnnnnnnatataactaactttaagataatttctaacaacaacatatacaaaaaatgtaactaattttgttataaatcgtgttattattaagttttattttgacaaaaatatcttatttgtataattttaaaaaatacgtgatttattttatcatttaacaaaagacacagtcgaattgataattgttataaatatagagtctaaaatattatttatccttatttatttttaattgcaacaaaatattaacattgtatagggacacgattttgtcccgtgatatactttcactgaatgtatttcgtagtacattagatggatctcagggtacataagatgtgtctcaaggtacgttaccattttttaaccctatttacccctagatcaaccccagccatcagatcaaataactcccccatctaacggctatcgtacatcacggaatacattccgtgaaaatacatcacgagacaaaatcgtgtccttattatgtatatatatatattaaaacttaattggtgtaaaaagaagattcaataaattcctaccagctttacgaacagagtaggtatacaattattgtataattaatttaatatgtcattaaaagattggtcttatgtcgctatcctatatggctatatataaagagaaaggccaacaattttttctatcgaactttgacatttattaaattatattttctgaatttttttggccattaaaaattccttctgaactattga

SEQ ID NO: 69135 - DNA, 791 bp, Cannabis sativa
gctttaatcttccacagcatcttccaaacatcctcctccattgatgagttccaactaccattgaccgactgtaagtgagtataggcccttttgactgtgaagaaaccagttggatccttgttccaaaaccaactatcactctcaagattaacactcaaaggcacctgtttgatttttgattattttttagggcctctcttgtatgagttttctcgtcccttttttgatcttctttgtcactatttataattacatagtggacagtttattacagagttgaccggaatatgtttacaacaattatccctaaaattatgggattggtgtaaatgcggtttatgattttaaaatcatatagttgtgattttcccgcttatactgggtcaaaatgatcgtgttttaaatcacgtctgtaattattgttcctggagttatctcgtcagaagcttggttccaatgatctctatagcgagctggggctattttctcttccgagatcgtcgatgcacgtcttgtgacgaccgtggttcttaaagggttcttcaaggctcatttgaatgttatcttctggctcgccagggttgtaagcctcgctaacgctaactggatgaagctataggaagtcttcccatagcgagatgggcacctcgcttacttagttttgagctgaaacgaccgttgcacttataagttagtttgtactctaaggactttcacaattgatatatgtcgctttcgtcttccaatgtgtactgtccttgatgtctcgctattcgcattcagtgacatat

SEQ ID NO: 69136 - DNA, 704 bp, Cannabis sativa
atttatatgttattttttttatgttgttttcttgtatttttataaaataccgtaaaaatataaaaaagaaaaactttaaacgtaaaaaatataaaaattagttttttatataattatttctttattatattggaaataagagaaaatcatttttctatacctatgttgtgtattagaaaaatataaaaacaaaataatgaaaaagaaattaaactatgaataatattgctataatgtaaagtttttgctttaatttttgttgacaagttctcgaccacacctttctttggaacaagcacttctagagaagaagaaaaaaactctcttttaagagatcttacaaataagtgatggtattccaaactgtcttggatatcactcacaaagttaaaaataagatcggccctgagttattttgaattttaggaaaaataaatttttcgaacatacatgatacttttaaaattcttaaaaatatatttatttttattaaaagatatttttttatttgaatccttaagatcagtaggccctaagtataaacctaacccgctttaacctagaggtagcctggccctaaccataagtaaatacaaaagtaaacaaaaacacaaaataaaaatgaaataaagaacatagtgctaaacaatgttattacacatggcttggttctttttaccgaattgccatgaatttatttttaa

SEQ ID NO: 69137 - DNA, 557 bp, Cannabis sativa
aagtatgttgtaaaataaaaaaaagtaaaattttggtgatgtattttaaaaaaagagtaaaaaagttgttgggagtattaaaagcttgagaggattaatttctgaaatttggtttttaatttttatcacttatgtaactgaacttttgaacgctgaactattttctactgatcgggtcacaactatttatcctgatttaaaattttctattgtattttaatttttattttagtaaaaataggataaaatacccttaaaaatcagaataaaaaactcaaattatattttttttttgttaaaaaaaataaaaggtaaaacttcattacataatcaagtcattcatcattacaaaaatgaactcgaaaggagcattgcccacaggcaaatacgatcaaaaataaaaaatgtggttctccctcgatcagtagtgagtcatattgcttttatggtacatgaacttcaaataacttggacgacagaaaataatccgactctacctcaattttgcacaactcgcgatgaagaatagtgcattacataagattattttctatgtg

SEQ ID NO: 69138 - DNA, 554 bp, Cannabis sativa
gtagtcatagcctaaaccctaaaccctaaactcacaaaaaaaaggtcccgagttcaaatctctcctctttcagtgtcaaaacaaaaggcgagtgagtagccttaaaaccccatgaaacaccaaagccaattaataagtgggacaaaagggtagagaatagtcatccttgtagtcatagcctagtggtactatacctctccccacaaaaaggaggtctcgagtttgaatctctcctcttccaatgtcaaaacaaaaagtaagtgaatagccttaaaaccccatgaatgtttaagacaaagacacccaaaggactaaatataggctcacattgtggttaataagtgtgacaaaagggcgctatgtgtgcatgcaattatgtcttaaacatgggccattttcctaagccaatatgggaagtaataatgtctcaaaaatgggacactttcacatctcttaaatgtctgataattttgcaatatggttagctcaaatcacacaataattgtttacatgtgttcatctctgtcaagccatgccttatgtcaaaacactct

SEQ ID NO: 69139 - DNA, 884 bp, Cannabis sativa
ataggtctgaaatccctaatcctggaagcattttttttttctttggaataaaaacaataaccgtatcattaataagagagatgttcgagttattgttgaggacaaccaaaatagccttacaaaaatctgacccgagagtagtccagtttttcctgataaaagaaagcattaagaccatccaaacctggtgccttgtccctaaaaagatgaaataaagcctccctaattttatcctcagtgaaaggggcatcaagtaaagagacctaagaagtgaaaatgcagttagtaacaccattaagaacataaaaaatgactgcatcatcacaaccttgagtggaaaataaaaaagtgtaaaatttaacaaaatgtgaaacaatagtagaagtacccctagtaactgaaccatcctccaaagtaatagacctaattaaagtgttcttccttttagcagaagccttgtgatgaaaagacttggtgtttttatccctaacactaagccagtcaactctcgacctttgcttccaatagatttcatctttataaagcaaagtatcaagagaagcctgaagatctttggctttcacaacatcattttcacttaaactgtaggaattgtaaatcctacccaactttttatgagtagcagtgatctgatttctaatagcaccattattactattccaagaactaatatcatttgtaatatcccgataagcataatggtgaattattaagagtttattatatactatgtgttaattaggcaattagtgggattatgatcctactaatctattgtagtaaaaaaaattaattttgttataagtggataaataagcgtaatttattaattataaaaatttatatagcatgtgtgaatataa

SEQ ID NO: 69140 - DNA, 735 bp, Cannabis sativa
tagagaaaagtttttcctgaaaaatacatcgtgaattttccacatatttatatgttctatatatatatatataaatacacattcagatcagatatagtttttctgaaattaatataattataattaattacttgcctgtatgcctgaacagttgaagagtttggacaagtcttggcgattaatcacatcactgtaaatgtaccttcgaatctatatataattaaccatatataatatatataaacattatcattaaataaataaatagaaattattattatcacacagaaaataattataccttaacatgtttgtgagagaaatgagaaggaagacaattgaagcaaagagggcgaagacaatcgatacagaaatgatcagaatcattcttctttgaatttggatgaactatgcatctactgaaatatattgtcttgtacattacaattaaccatcttggtaccatcatcttattattattcttcttctgcatattaacaaattaataacatatatttatatattaatatttcatgcatatatagaaatatatatatatttataatacatacattattatgatgatcgtgatgatcaaagttttgtgcatggacaactctcatgttcccaatactactctctttcatcatagctttttggtattttttcttctgagtttatgtatatatatatatacacaccagtgtgtgttgtgtttttactaaacatatatgt

SEQ ID NO: 69141 - DNA, 597 bp, Cannabis sativa
ataatcataagaaaatcaattgctgaccttgaaacataattaatgaatttttttaatgaatttaaaaatgaaaaaaatggatttaagaatctgaaataatttttttttaaaaaagatagatttataatttaggaggagacataaataaaataaaaattaataatatataattataactaacaatttttgtaagagtgtgatatttttattggtataaatatatttttcttgcatttaaaaagattataacatttttttatatgactttagttctatttttattaattttaaaaagtttattaataatgtataatatccaaaacaaaatttaaaatagggaaattattcatatatatatatttttttaaaatttatggtttgagttatctaaagtaattttttgtagattgttatacgatttttagttgcgatttaaatttctccgttaattgtaataattttttttttttatgtagaattccgtaaaaataaaaaaaaaaaactattttaaaataatcaattacattatataatataaaatatgaattttattttgagtaaactaaattaatagagtattgtgtactacttatgtaa

SEQ ID NO: 69142 - DNA, 949 bp, Cannabis sativa
taacaaattagaggttattcttgaatagagtattattaaatagaggttctactgtatgtgctagacttaagtagagagtgagggtaaaaattaggtatattttaatgaaatataatatgaatgtatttttgattaatagacaaaaatatatatatatatattcctcaattttttagggattatttcataaaataaaatatacaaaagcaaaaaattaagtaaaaaaaaaagttttacaaaattatttaattttaagtaaagatttacatatttatattgccacatagcaaaaattacatttttactgccctagtattttttcttttcttttatactgtaaacaccgaaaataaaaaatgaagccttcatctttcacactcacggacagaccaccccagcaacactagaacagtcataaaataatcattaattcagacgagataaagcacgatcattaaaactattaatactagggttgtcatgatttttttaatattacttttgggttgtttcgcatgtttaataaatgttggtttcaaattacacaggttaaaccaaccacttaatatttatttaaggtaaccagaatgaaagaatcatagacattaataatcttacttcccattgaaagggtgaaatttgaaagacaaaaaaaaaagaggatggaagttggttgggaaaagaaacaacataacaaatgcagcaaatgtggagagctgtggcacaacaagaaaacatacaagagaaggtatcaaaaatgaaaagaagtagaacaactaaaaaacaatagtggaacaacagaagaaaattgaacatatattggagcataggatactgaagaaaataacttccatataaattttatttttttcatattactattgaaaatagagcagtacaataatatttagaaaaatatgataaagaaataaaagaaaacaaccttaaa

SEQ ID NO: 69143 - DNA, 878 bp, Cannabis sativa
actggggaactcccagataatcggaatgaagctcgaaagatgagaaggaaagctgcacggtatatcatagtagagggaattatgtatagaagaggattctcgtttctattgctcagatgtgttactcaagaagaagctgcacgactcttatttgaggtgcacgacggattctgtgaaaatcatgccgccgggcaaagtttatctaagaaaattctaagacaaggttatttctggccaacgatgattgaagattcaaaagtctatgttaagaaatgtgacaaatgccagagattttcaaagatacctcgagctacgcctaacgagttaactcaaatgcaaagtttgtggccctttgccatttggggaattgacctgatcggacaattacccaaaggcaaaggaggagtgcagtatgcagtggaagcggttgattacttcactaagtggacggaagccaaaccactcgcaaccattacatcaaagaaagttcaagaatttattgtgaagaacataatctgctggttcggattgccatacaaaatagtttcagataatcgcaagcagttcgacagccaactcttcactgacttttgtgcgaaccatggtatcattaaaagtttctccgcagtggcacatcctcaagcgaattgtcaagctgtagcagtcaacaagaccttgaacttcctgaagaacttcctgaagttctatggtcatatcgtacaactgagaaaatggcaaccggacatactccatttgctatggcatatggatatgaagctatgctgcctgtagaactcgaaccaccatcccacaggcgattggtgtacaaccaagataccaatcacgtactcctgcccgaatcacttgatgaaatcgaa

SEQ ID NO: 69144 - DNA, 988 bp, Cannabis sativa
accatcatttaatgcattgtttaggaccaaggaaaaaatcacataatgatattccctttgaagctcgtgtagaagtaaatagtcgtcaaaacgtttgagtttccacgtacgcttcatcaattgaatggaaacctcactagccaaagaaataatatcatgtaagatcctaaaaaagtaattaaataaaagttgtcttccttattcaatttaatttaatttaatttgacaaataataaaggtttcacctttagcctccacttgtttgtctatgtagactcaagcaagcttccacaaatctataacattttagaagcttagggtaaatgttatgcatgtttccaaacagggacacatgatcacaagatagataattaaagcccatcagccagtcctaaacgacaaagattgggtcaagcccaatataagctggccttttgggagggaaatcacgttactcgcctaagtgagcctccgccaagaaaaatctgtattcaagggaattctagctccacgtagccggaagggtttaccagcatgttcttgaaagtcagtgatattttttctttttactaacccgtacagaatcaggaaattactttccacagatctcggacagggaataatatcaaactaaaatggaaaactacataattgaagatcaaataattaatgtacaattagttatccacaattaaaggacacagtatgaccaactatcaccgtgatcaatctaccaatttagcatacagtcactgtctcatgggctaggctttatacgataagtcgaagtactgtattatttgtaaacaccacattaaaagaaaaagggtaattaagtacaacctctattactctatctatacacactgaatccttcatgaaaaaggttagaaattcttaactaacaagcttgtaaagagaatagagcaacttactcattgtgatccctttggcttttctagcctaatagataataaaattgactcgt

SEQ ID NO: 69145 - DNA, 661 bp, Cannabis sativa
atagtattatataaaaatatgatagataatccaattcaatataatacaatacaatacaatacgatctaatacgacgttccaaatgagccataaaagtatgtaaaaactattatattctcacataaaaaattgtaccaaataagaaattttattcaaatatctccatatcctaacacttattcccataacaaacacgttatacattcatttgtcgaggtcatttattctctttttttttgaaagaaagtaattcataaattcaaaagataaattaaatttcacgataattacataaaatgttttttgcgatgctaaatagttcgagcaaattatactagttgtgagcatacgtccatttaaacacattataaataacaaaattactagatatattaatactagaaaaattacaaactgaaagcatattaaaaatcctacaaaagtgagtaaaagttgtttatatcccatctagaaagagcattgattgtagttctcaaaatataaaccttttgttatttttaattagagttatttgcggcaaaacctccttaagtgaccatgtttttgcaattaacctccaattctaaaattttggtggtaaaatctcctaaacccaagttctgttagcacttagccttttccattcatttttgggtgttaa

SEQ ID NO: 69146 - DNA, 897 bp, Cannabis sativa
caagagtctattcttgacttttgcaactcagattaataaaacacaaggggagtaagctattactgacatctggggccgaacttcattaaattccagtatcttttctttaaatttattgtaaattttggtgtctttaattgcatttattattacaattttggtttaaatctcatttattacgactctgcgtcgattggctaaaaatccagctaacacaacgcatttttgtttttcaaaaacaaaaattttactttcattttgtaattaaaaaattaaaaagtaaaaatgttatcaaacaacaccaaaattaatgaccaatttctcttatttggctttactcttagctttacaaaaggtgaatttacaataaacatataataattaagaaacaagcattaactattacatagatatattgctagctagaataaatttgttatacataatcctcaaaataacattataacatagtgtagtttactttggattcagttcaatacaatatatgaaatgtgttgttgactcaccaaaaaagaagaccgatacgtctcaaaacataaatggcaccaaaaaaaatagtaaaagtataattattattattaattttaactgaagtgtttttttagttattattttgaaataactaattaggtaagtaaattgagttaaattatgtttaataaaaataaaataatatttaaatgatatttaaaaatattaaattcttttaatttcaaattcacgatttttctaacctttaaaaaaatatcaaacatataatattaatttttaaatatttaaatttaaattgaattaatatttttctttctttttttataaaaaaataaatatacataaatatataattatatctattctatataaaatatggctata

SEQ ID NO: 69147 - DNA, 5932 bp, Cannabis sativa
  modified_base (537)..(538): a, c, t, g, unknown or other
  modified_base (5890)..(5895): a, c, t, g, unknown or other
agtgatttctacaaatcaattagtaatttctaaatcaattgtaatcaattagtatattctatttttagttccaaagtcctataaattgtatccctttttcattgaataaaataagaaaaaatcatttcttcacaacaaaatcttgtaaaaaattaatcacaaaatagaatagtagaaaaactaccatatttcataagccttacctgtcacttatttataaggtgtccaccattatcattttaaaggagattgccacataaattatcttttttttttaacacagttaatatggatagtagaaaaatatggatgagtatatgtgaggacataaattaaaaaaaattgacatgtagaatacactttataagatattgtattgtatattagtaataccacaaaatttggatcattataaaaattttaaacaattattctaattaggagtattcacagattgatttggtccgaatttttcatagtttttgagccaaaccattataacagttttttgaatattagaaaccaaactagaccaannaatttctcaaaccaaaccattaagaacgatttggtttggttcgaaaccacagtttaagtgaaatttatattattcttatttttttttaaataattgtactatttttactaagtttttaattttatttttcaaaatatatatttaacatgataagtaatagatctatagcatataaataatgatataaaatattaccaaaggtcaaacataacataaaaatttaaaattcatgcaataaaaaacttgacacacaaaaaagttcaaaattatacatatagttatatataatatatatataaaattaattatttattataaacggtctaatccggtttaaccgttaactatttattacgaaccgcaactgaaccattacgccgtaaacggtccggattgaccaaaccaccaaaaacggtttccccaattacggcagtggttcgaattttcatcgtggtccggatttaaaccacggttttttaatttatataaacaaccctaattttaatagactaattttgattcacattcttattattcattattacaaaaaataacaattacttacaattaaattatttttagttttgttttctaaaaaaaaaacaataattctttccacatatattttacttataggtagtgctttttcatttttacacttcaaaacattttttttttgtatttttacgaaattctatatagaaactcctattgcaactagcgttctgcaacctaaattgtaacaaaaaatagaaactcatattgcaactagcgctgcaactactttagaaatccaaaccgtaaatttgaaaaaaaagttaaaaaaatagtatacgaggtaattctccttttaaaaaacaatttttcatatctttatatattaaaagtgattatctaactataaatttaattccggtaaaaaattaaaaacttatgatcacaaacctaattccacgaaaatcattaaggtaacatccccgagtatccccagaagccatcattgtcgttttggtttcatacaacgatagagctacgagaaaccaaatccctgtagccatctatgccaccttaatcaaaagaaaagtcttactcagattatcaaattgtttttgttttcttaactgattttgatctggatcaataccaataatcggagaaaaaatccatcatcatggcaaaagaagaaaaatataacatgtatacctattgattataggtgagacaattgagagggtttgagctttctcatgtgaagaaatttatatattgatatccatttgcttataatttcatttttgagaaacatgtatctttcaattttgaattgatttattatttgtatattgttatttttactttgtgatttttttctctaatcttgtatcatattttttatcagcggaaacgttatataatcattatttggatgattagtggaagttcttatgtatacgtgtatgaaaaacttacttttatagctttgatgaatctaaaattaaacgatgaatttttctatataaatgcagatctatcttcactcaaaacaatgtaaaactctttattttccaatcatcacactctttcactctctcggaaggataactatgtgttaatctctctctgtcgtgtataaattactcatactcaatgggattttgagctgacgctatctgaaagtgtatacatgttatttgttgtcaaaagaaggaaaatttagtagtagaggacaggttcgccatattattgatattttaagctatttagattgatagttcaacttaaaaattattgactcttttgatttcattgcttgaaagtctattgaagagatttatgatgccttagcattacatcttgttccaacaacaatagtaacagctgaccccaatttcaagtaagcttcaggttcttataaagctaaaaatttatgaaatttttgcaaattgcaaactaacttcaaaactcatcactgccttgtccatttggagtataattcatccaatgtcaaggaatcatggccatacattattgtgtccacaatgtgttcatatttctatgcaataacatgattgcctttgtccttgtcatcgttcccgatctctatattagccactctagattaagaattattctgttgaagttgaaataatgtaatggtgccatcttgcaggaatacacaacttctgcttcaagaacaatcaattggcacttcctgctgtttttatcaattttggccattgtcatgtaacaaatattttctatgtaaactcatagagaatcttgtaatcgagactaacaatgatggcactgcgtgctgtttttatgagtacttcacttttactagtctctaacatgttaacatataggttcttctccgaataagagcatcttcaattttgtgctgcaccagcaatggctttatctgtacccaccataagccaaactcatttcttgtctgttagcttttgtagatcaaacattacattctctattactcatatttataaaccttaccttgcaaccgggctagatgctggtttattatgaaatcatccacaaaattagatgaagtaataactcaaaagattcacataaaagttctacacggttcagcaaatgtattttatatttaaattttagatagtctttaattttctttttaaaatattaattattatgtattatcttctttaattatattttcttcttatactatttaacgttttttatatttaaactaatactattcataaaattaaattataaaaaacattatttattgtaacaattaaaaattatacattaatttttttttttagtacttgtatattgcacttaatctcaacttagtatacaaataaagagtagtaaattacatataagttttctaatttattattttaaaaaaatactttttatatgtaaataaacatattccttaagcaattttcttttttaggaaagagaatatttttttataaatatatagggtaagtatttaatagttacgtaaaaatataattatgatagttacattgtttatgacttgctataatagattactaacggataaaatttatatttttaaacttaaatcgattatgtatttaaaatgaattaatttttgattaaaatgtttaataaaacctttttaaaaattaatatttataattctttttattttttttttattttaagaaaataaataaaattagattagtattaagttacaagcaagttatgaattatttttcgtaaatttttaaattaatcacaatcgttaaatagtgatctaacggttaaaagtaaatataactatcatgattatatatatttgatatttgatgtaaccattaaaattttcttcatatattatatatgtatatatattagattaatattgcttaattttatgttttatgttaggttatttttttttaaatatcatatgcaagtaaaagataaataatttaatataaattgataattaatagtagaaaatataaaagtaatttggaaaaaatagtgtaaattctttaaattaatttactgtgttatttgatcaagtcaacactacttatgcatttctttccaacaacaaaaaaatattatttatgtagtgtattgatatttttcacagtaatgtatactttgatgatgagggtttattgaatacttctcacagagaatccaaaactcttttgcttttcgattaggaaatttcagagtaagttattatttgatgatgggagtttattgaattcttttcatggagaatccagaaattggttttggattaggtaatttcacaataaggtataatttcacaataagttagagattgcatttcaattaggtaatttcaataagctcaatagagacgtttgagtgggatgatcaagactacgaagatcttcactgacatttattacaatattagaaaaacaaataagaacgaaattcttacttggcttttctttgtaattgatatttgcttgaaatcactaaatcttggtaaacagaaaggtatcgaaccaactttcaaacctgaaatatattaaacatctaaatcagcatttcataataggtatgtatatatgatcatttgtcaaaaccagtatagtggcacaagacataagaataaatacattgagatgtaacacaactaaacaataacatcttgagatataaaaggtgggtgattgcttgcagaatatagtttagaaacttcagtatcttgcttcgctaaaaatggtatacaaccttcaatcatcttctgtagagatatatagaatagtaatgcttattatatatacttgccagaaccaactattagttggacatatatgttacaggataaattatgcaggggtatttcagtcctatgaggtgtcccctaatctgttggagcatatagcaatcccgaggcaatcattgcattacagctgtcacatcaattccgttaggcattgattttaaagattccatctttgtaatgatttgttatacacgtgtaaggctgagattgcctcttgtgcattcgtttgtatctgtactttgtctataaatggaaatctctgcatcaaccataatttgagctgatcatttaattctcaatcccttagaaatttgacttggtatcagagcggatttgcctacgcaaatgtcgactcctcaggaccattcttcaacagctcaaggagcaacaaatcagggagatcagactccaactggacagacccctgtaccagtcactacaatggtgccaacttcatcttcatcctctactcctcctatttctaaccccttcagtaacaccctaagccaacctttttctttgaaacttgaccgcaacaactttcccctctggaaaaccatggtaaacaccatcatccgcggacacagacttgatggatttataaacggatctcgaccaactccaccagagttcattacgacaggcacaccaattgaaggagtcactggatctggaatggatgtgaacccggagtacgaaacctggctggtttatgaccaacttcttatggggtggttatacgggtcgatgacagaagctatcgcctcagaagtaatggggtgtcaaactgctcttgccctgtggaattctttggaagaactgtatggagctcattcaagagctaacatggatgatttgagaaccaaaatccaaaaaactcgtaaggggtctcaaaccatggctgattatttaaagatgaaacgcatgtgggctgactctttggcgtcagcaggtgagccatatcctgagagacatctaatttataatgtgctttctggtttggatgcagagtacttattgttggaaattatttnnnnnngatctatttactatcatgtatgttggattaacaacct

SEQ ID NO: 69148 - DNA, 662 bp, Cannabis sativa
tattcttggattttgcatttaatttattttcatataattaaattgtactaatttatatattaaacttatttatacaaattaattattagtataaatatttaagatattatatgattgtaaatgcataattaattacatattatggaatttgcatttaattatcatacaataattgtattaatttatatttgtttggcaaatttattattagtacaattaatttagatacgtgtgatttaaatgttatacataaattctatatatagtgctagatatatttagaaatattcaaacattaaggtaggttgaatattttatttagcacattaagttttataaaacttcataaaatattcatgaaacattcctaaaatgaataaaacgtaatacttttgtggtttgacataagaaaacatgaacctgagacaaatgctcatatctagaacggtttttaatgatcttcggacgaccacactaggagcactaatctcaatgattgtctattatgttaataacgaaattacttttagatagagctcaatatctatataattaattgcaagttatgtccattaaggtgaattttaattaatatatagttttattaattaaagatgttgtggctactccctaattatataaaattaaagggtaaatactat

SEQ ID NO: 69149 - DNA, 1024 bp, Cannabis sativa
tttgcttaggaaattttatcagtactgattttatttcgagaaacaaaccttttacaattttgagtttcctgatcggaacatttgggttaatttcaatctcttctagttcttccattggcccaacatttgtatttggttccccaagtcggggatccacatcttcgtccccgccttgggcagttccctatttagctatgttctttcccttgcccgaactttgactaggggattcctcctttttagccttagttagggcaaggttgtaacattcccgtgcaacttgttgatttcctctcaagcaccctaccccattttttgttggtaacttaaggcacgattgaaatatagatgtaacagcttttaggtcatataaggctggtcggcccaacatgacattaaaagctgatggaacatccaataccaaaaattgtgccattacagttatgctcttcggagcttgcccaacagtgaggggtaggcaaattttccctaaaggtgcaacactccggtcggagaaaccgtatacgggctgaagacagggagttaaatctttgagttggagccccattttttcatatggtgttttgaacaagatatttgcggaggctccattataaatcatagttcaggccactgttttgttagctatttgtacttccacgaccaacgaatcgttgtgcgggaagttaatcttgacaacatcgtctttattgaacgttatggtgggttcccctacccgcggtaattttagtttcctttcttcgacagccaagaccacttcctcttgctcgtgctgtaggtttcatgcatacttttctcgggctttgcctgaatcttcagctatgtgtggaccccaatgatgacttgcaaatacccatctactggcggtggcaataaatcttggttattgtccgcctgagcggccctctgattctgatcggccttgacatattttttcatgtgtggtttattctttcttatcaaaaattcaatttctcgtttcaaattgttgcattcattggtg

SEQ ID NO: 69150 - DNA, 819 bp, Cannabis sativa
gcaacaaaacaaagcttcatgcaccaatacgaaaatcactattgatgagtcaagcttgagttcaaaaactcagagcttgctcatccaactaactagctaacaaaccagctcaaatcactctaaatagccatattttaactacagaaaacatcacataaacacaacagcaagaacagcaagctaaacaacattcactcttaaaaccaaagtttgagttcaaaactccaaacttgaataaaatcaactaacaaccaccacaacctgcttaaatccaatcatctgaacataaataagcccaaggaaacaacaacaaccacacacagcagcaacaacatcaaatttaccaagcatgcaaactatcatatttttcttacaactcaagaaaacacaaagaaagttgttagagattataccttggcttggattacacaaagagctgttggaaacaaaggattgagggagcaaaatcaaaagccctagctgctctaagggtggtcgaaagagagagcttgagagagaaagagtgattttgaaattttccttttctttaaatttttggtaaaatgaaataacatgggtaggtttaactaaatgatcaaccaagaattaattaaaatcacatttactaagtgaaacatggtccacaaaaggacaaactacaaatggggtaaaatgaccattttgcccctccacactaaaatgacatagaaggggttctaagggtattttaggaaactctaaattcccaaccaatcccgacattcccaatgtctaactatatcgccccgctatactaaatactaaattgtgattcaactg

SEQ ID NO: 69151 - DNA, 987 bp, Cannabis sativa
  modified_base (942)..(962): a, c, t, g, unknown or other
tctatataagtcgtatcagaacaacgtaagaacatatcttttccaacattaataaaatcttttctttcttccttacgatttttctcagagaaaacttttgggtgtaatagagcgatatagttcgatgcaaaacatattatcctggggacgtcgtggttgctaaactgtcgtgcacacttcgggcagagccgtgaaacatcttaaagagatcgacattgtccgcgactcagccagattattctatcgataattcgttctaattttattgtttgtaatttcagttcaacactttccaattatgagttcttactattttaatttgattttgcattcaaatttaaaatagatcaaagatgttcttgtaagccaattatcacacaactattatacttaaactattcacttgatcaatacatcaataacaatttaggacctgtattttctcaatgcaataatacacaagatatataaattgaactaaataggagaatatacatttatcaaggtgacgaacgataaaatgaatgcatatagaacacaaataatagaaaaacgcaaaaacaaagcaagaagcttggacatgtatgaagaaattatctatgaaggtttcaaaaaaatcgacagagacttcataattgacctagttagcaaattttaagtatatcctgcaagtttatgaaggttataaaccggaaaaatgaattttccagtcatgctacttattagtagattattgagttgagtaatgtgaagtgaagaagatgatattagggttgtcttagaggtttaaggcgaaatttaaaataaggtgtttttcttttataaaaatttaaaggctaattaggatttttgacccctgaactttgacatgtaccaaatcatgccccctgaacttttacggttgttgaaaatgtccgctgaactattgagattgttggattnnnnnnnnnnnnnnnnnnnnnattcaattttactatttcagtgatt

SEQ ID NO: 69152 - DNA, 957 bp, Cannabis sativa
gtgtgtgcatgtggggggtgttgagtgatgtgtgtgagtgtgagggctcgcatgcgagttgtgcatacaagtgtgtgagagaggttactcaggggttataagcataaaatgaggggtaagtacacatcaacaaggatgatgtcgggcaaggactcaagggacaaggcatgtaagggaaagcgtacaaccatgccttttgaagcctttgaatgtgaggaagtatgagtagcagcgacaatagaccagcaaggtctaaggacccgacgtcatccagggatcactctcctgcaatcggggaccactagcctgcatccagggaccacctgataccagaaaaaagtacgaggtgtaaggccacctccaatacctgtggcctacagcttgaaagcaacgttttgtcccctagggaccaccttgcatcccaagtcgttagagcctataaataccctcctcacatatgtggagggggttggaaaatcacttggtgtaactcagatcttaaattaaatagagagcaatattcatagatcttttcacctttattttcattacatttgagggtacctttgtgttttccaaccactaactttgcgagttcttaccgtcaacaaaaagacaaagaatttttacgtggtttaaatattaatgaaccctagtacacgagacagtcttttagcctctaagggcagtgtttgtgtgtttacagtattgttgtaggaaaccctaactctttaccctaaatttctcttgaagaagaagacctagagtagtatcggtagagtttgtgctatgaaagttgttctctgtcctttcgtatgagaatggaggggtatttataggttaattggtggatatggactagggccggcaaactgggtcagacacgatgacacgactcgaaacccgcacgagagttagcgggtttgggtttgccttaaatgttgggttttatgccct

SEQ ID NO: 69153 - DNA, 620 bp, Cannabis sativa
gccgacctaggagaggtccctagtttaaataaagttatgtaggtgttcttaatgtgaaaatttaaaaaaaaaatgaatataatataaaaatattgttcgaataattctttcatttacgaagcatttacttttttattagttaattcaatttagtattttgataatattattataatttattgtttaccgtaactaaatatttatataattttttttaatattttaaagatatatatatatatatttttttgaaaaagtttaaattaatatttatttatataattttccaattagtacaaaatataagtcaattaaaaatgttataaaatttgacaacatcgcgcgaagtgcgacttaatcttctaataaataaataaaagaaaattaaatactctcagattccataatgataagaatgattaatcatgaaatagttcatttatacatattaaggtgctataatgtaataaagattacatatttataaaatttataatgattactctagtaataatactagaatatgcaaagtatacacatttagaaaatgtatattgaaatgtaatgtaataaagataatacatttaaaaaaatatagactgtaatgtaatgtaataaaa

SEQ ID NO: 69154 - DNA, 895 bp, Cannabis sativa
  modified_base (126)..(126): a, c, t, g, unknown or other
attatgtttgtgattatgtactaaacactcattctagagtgttaatggaactattttagattatgaatttaagtttttagattatttttacatttattcttgttatttgtttatgcaattttgtgntaattatcatcttcttaatgcttgatcactattaattagtatagagattttaggttttacacttgagagaggtaatctaaaatcggacttagaattgcatgatataggaaaagtgtgagattgagagattccactaattccatgagtttcatttaaagagaatcatattgctttatgagtgcttatttgattaacattgaatagagatatcgtgttagttaatttgagttaaatttatcatcactcgagagaggttaataggttacattaggattcttgaaactataaattataagataaattgggataatcagtaaatttagattcataatttgaaataggaaaatcaatgttctaggtttttactttttgattaaaaatcgatgtttgtttatttatttttctatttatcttattatttgtttttaaatataatttactttgtgttatctaattaaagtataatatttagtaaaatttaataatcaatccttgtggattcgacaacctttttagtattaaaactttgctataacaacaatgtacgcttgaagtaaaaatagtgtatcaacatacaaaataaaaaaaatatattttaaatattaagacaaaaaatttatataaaatattatcataaaaataataaaagaatttatacgtgatttaataaaaaatttatgaaaaaaataaatatttattaaaactaacacaaaataatgtaaaaaaatatttaaaactgaatactaaagtgatttttaaaattaattta

SEQ ID NO: 69155 - DNA, 1493 bp, Cannabis sativa
  modified_base (171)..(171): a, c, t, g, unknown or other
taacggctgggaatcgtgcagaatatgaataggtgattcataatgatcttcgaaaccatacaactgccagaatcaaaggaggcatcctttccaagaaatgaatttggcgaaaacgctctccgtaattattaaaaagctctttttactaaaaaaaactttttaaggggcaantgttatacccaaaattcggctggaggacacatatcaaggtaaagggaatgtgaatcggtgcaatatctttttatggaataactcattaattgcgtaagtatcaaagtatatttgtaacccgctgactgtgaggtcttaggcgaggaatcaatgtacgaactggcacttactttattaacgagaaaccatatgtcgctgaaggtgaatagcgaggcaccagagaaaagtgacacataccttagcttacaataagcaaagtaagtgtgaaagtcggatcggcttgaagaacaagaatgcgagatgaccatctcgacttgacacgtatcctcgcattatcaataaatgatgaccatctccatatgtgtttcttttactttttctgtgttgaatcatctcgtatttacagtttgttagggtataacaaatgcttttgtttgatgtactataaaaaacttagaatgttaccgctattctatcccatatagtctgaatgactgtatcctcaacgtccttaaactcaaacttgtttataggaatagtattgcgaacaagaaactttatgtaattgttaagccctttgccatagtcatctacaggggccccagtcgccatatgaaatctaaatttcaatttttgacctgcaggttgctcagctagttcttgttcaaaattttttcccttatactttcccctaactcccttttgctgatctccacttgaacctgcatcagccattctacaaatacaagctacgaataattaattaatcatactattaacaaaagatacatgtatttcatttaatcaacagtggcttctaatattacaataattgaaagtctacaagtcatcataatcatcatcattattaacaggtacattatttttattatcgctatcactagtgtcttcatcgtcactataaataatgaatccatctaaatcttcacggttagactgctcacgacccatgttggtcacttgaattgggtcaacatcatcacgaatatattcaacatcatccaactgtgcaagatgaacgactaaagggaatcctgaagagtttgtttcttgtatagtcgtggtctcatcatcatcctcatctgaaaagtcccagacattgcgagggttgtaaaaattgacaagcttccaattatctccattcttcaagtcaggaatgtaatatattaaatttgcttgggatgcaagtatgaatggttcattttagtactattcatgggcaacgcaaacactagtgaaaaaatcatcactttctatcctattaccgcttgtgtccaaccacttgcacctaaaaataataa

SEQ ID NO: 69156 - DNA, 559 bp, Cannabis sativa
ctgtcaaattgtttgccatagtccgagactatcttataagtagtccgaaccgacaaatgatattcttcacaatgaagtcttgcactttttggatgtgatggttgctagtggctcagcttccatccattttgtgaaataatcaactgcaactactgcgtactgcactccgcctttgcccttggataactgtccgatcaggttaattcctcaaatggcgaaaggccaaggactttgcatctgagttagttcgttgggcggtgctcgagatatctatgaaaatctctgacaattatcacattttttaacgtaggccttggagtcttcaatcatggttggccagaaataaccttaccttagaattttcttagataaactctgcctggatgcgtggttgccacaaaattcgtcatgtacttctgacaaaagtcgtatagcttcttctggtgtgacatgcctgagcagtggcatggagaatcctcttctttacataactccctctacaatgatgtaccgtgcagcctttctcctcattttctgagcttcgtttttgttatctggg

SEQ ID NO: 69157 - DNA, 777 bp, Cannabis sativa
ccatctgtcatatcatttatggtagtttcaatacgtcttccccgtgcagcattaaatgcaaggtgattgttcaatagagtccagcacctcccggagctgccttaatatggccttggcctccaggagcataaagatccttctcatatcttttccaggagtcatcttcacagagacactcctctgttgcctaaaacttggttgatttctttaagagttgatcctctcagctccacgtgccgtctatatacaggtccacgtattttgggtaaaatcaagggcaacatttacccccaagccttgtttggtgaagagtaaatgaggcttgtttggtgcctctggttggctcattgattttgtggcacgtgcttcaggcgcgtgagctgcatttatgatagtcatcattaacatttatttctttttgcaggcaacgattcgccaaccgtccattaatgatccagcgcatttaatcggtgtcagaaaagtactcaagcatttttaaccgccctgattagcatttatcccatccattggatttgcagaatgcgaatcgattgcaattcccaccgtacgatgacgcctgatcacagctgctttgcacccgttttggcctataaaagccagccttttttccttcactgggttactttcaccacttcgccattccacctcaagaacacttactagagaaaattccagcaaccatagatttcttactgctatttctccgtcgctctcgatccacattctaccgtcgatcgacaccaacccccagctctc

SEQ ID NO: 69158 - DNA, 1068 bp, Cannabis sativa
ctgaccgattaaacgagaaccgactaaacatatatattatacgcttacatatataatataattatttttgtacatattaaatatacaattctattaaactagttttacttattttttttatttgaaatcttaattattcattgctttattgtattataatttgatgtattaacgtattatatatattcataaaataataagttttttatataactcattaccaattagtagtacaataatttgagcaaattttaaaaaaattattttacattatttatttaactaaaaaagttttgttcttaaattatatgatatttgatacaatactttaatttttttagtttccaaataattatagcaaatttaaaaacttactttttttttaaaaaaaaagaagctcagccagtgaattaaaacggtcggtttttttacatttatataatggtcggtcagttttcggattataaccatgaaaaccgagattattttttgtgtaaaaaaccgaccgttgctcatccctagcgtggtggtcgcaaaaaaaattaaaaaaatgatgataaatattaaagttatgaaagcaaaggaaaaaattagaagttgaaaatgaccttatgaagaattgaactaaagatctcttggacaaggtgaaagagattttccactatgccaagatgatttggtgaagtgaaaatcaagcaagggaggtccgctatatatacaagacacatcttcgaaaaatgtgaagataataaagttcgcatttcaacaaggcaaaacaccagtttattcactcaataagaatacttaaaagaattcttgtagactaggggcaagtgttacctccgaaaattggcacttatgattttcgggatgtgtttgagcatcacgaagatcgacgaagatcgtccctgtgacgatctgcaaacagaagttgacaagatggagcttagagacatagccgtgcaagttggtgcatgcatgttagatgtcatgcaagaaggagaggagaggggcgagaaagagatgagggcgctagagaaatgggggcgagagagatgcgggtgcgag

SEQ ID NO: 69159 - DNA, 1360 bp, Cannabis sativa
  modified_base (1033)..(1037): a, c, t, g, unknown or other
cccccccccccccccctttttcttttatactgctaacaccgcaaaaaaaaaaattgaacatatattggagaaaaggatactggaaaaaaataacttacacacaaatttcattatttttctattactattaaaaatagagcagtacaataatatttaaaaaaaatatgataaagaaatgaaagaaacaacaataaaacaatattaaagcaataataaaacaataacaaaataaacgagtaacagaaaagggtaagttggagaaagagagtggacttagaagtacggtagagatggagccaacgcttagagaccaaaaaaactgaagaacatgaacttaattggagcatctgaaagatttttacaagaagcttatcacatagcaagctcttcatctctctcacatacacacacaaccacagtcttatcttttccaaatcttcttcttcatcttcctacattatactctttttttttttttgattacctaatacaaaaggagagagttagcttttatttcgttaatgttgtagacatggaaaaagaaaaatgaaaaaaaaaggaagaagaagatgaacaagggaaataaagctcaaaaaacaatgaaaaataaattggagagtgtttttaattatttgcttaagaataatatatacatacataaataataggctaattagtaaccccgaactttgacatgtactaaatcatgcccttgaatttttttggccgttaaaaattcattttgaattattaagattgttaaatttaaagacttttgtctaatttcagtaaaaaaattctaacatggatgaaagttcagggggcatgctttagtacatatcaaagtttgagggacataatttagtaaatatcaaaatctgaggaacatgttttagtacataaacaatcactgaaactgtaaaattgaatgaaattagacaaaagtccttaaatttaacaatctcaatagttcagcgggaatttttaacggccaaaaaaattcagttgatataatttgatacatgtcaaagtnnnnnataaaaaattgctaattagcctaaataatatattagagttcacgtgagtgttaagaaattttaaaaaaaataaaaaacaaaaatattttaagtaaaaaaaaaaaatctgtcaaaaaagtgacaacaatcaatcaaaaaattgctactttttatttatatatattattgataggggtactggttgttgcccaagattttaaaaaaataaatagtaaacacagtaagaaaaaataattaccgcacaacaatacaaatgaaataaaatgaagaaaaaaaaaagtatgcgcgtaaatttttaataataaaattgaatgatttattaa

SEQ ID NO: 69160 - DNA, 2849 bp, Cannabis sativa
taacacgatttatgcctctctcatatcctgctgtgtattggtcagtatgaccgttatttctgttagtggtttaggtgttttaatctgttcagttgggatatttctgttagttaatttttctgttttatttcgttttctggttgtaatcctctgtcgaggcctgggtatatatatacccctgttccttgtatttcattttaattcattcaattcaataaactcagaccttggtttttctcacaaaggttctttcgtgataaagacaaaccatttggttacatcgaatctaagaattaagcaagggatcattgcgaggaggttaaggtaaagtacctttaaggaaatgagttttattctgtgcgctaatagagagcttgaagtcacgtttccattactgaaagttctgatctgtgagaagtagagttgcaaaggccataacacatagagtaaagaaagaagaattgtttttattaaattgaattgattattacaaagtaaagaaaagagtcttacatagataatgagatacagagcaaaactaatggaaaagtatggtataaaacaaacataacaaaatattatctatctaaccgagtaatctaactaactaagctgactttaataattttcaaatcttctcatcacaatctgttagtttaataaatttctcaatatttaataatttattttcttaaattacgtgacatgaaagcaaaaaattagatcataaactatagagtgtggagatttattacatgatcaacttgtcaacatagcaaataatttaatttttaattatattaatatcccataagaaaaccctaacaaatattatcatgagattttttttaatgaagaagccaacaacagaagttttgaataccccacaaccacaaattctatatcttactaattggaatatcatctttattctttttatatagcctgcaatcttgtacagaatactatttgttatctaacaatggcacacccttcaatataaatttggtcaaatattatatcttaaattatgattggcaataatttttgttattgcagagaaactatgtccaaacctgatttttcttcatgggaccttatctatttttccccaaataagtacaacatttctagtactaaaaaaatgcccatactcataaaaaccagttgcagagaaattttactaaaaacatttacaataatttttagtgttttagtgtcaagttaagagataatgtttgtttaatttggaacatattcaaaagattgtagaacaagaaattttttcatgtaacagatcaagaaagtaactaaaatttaatgaatcactttcttttacaaatacataggttgggagaacaatatctataaacagctctctctctttctcactaaggcaattccaacctcattaattttcttctaatgtgaaaaaaaagaagaaatgaggggaaaaaaaagtacaagaaaaaaaatgtacttaattttacaaaattgtgtcaactattttttttttagatagacatgagttacaatccactcaaccttgaagcaacatcaagaaagatttcttctttgcaagggattgttaggccacccattggatgatcaaacccgaattcttcctcagcttggcttagcaattcttgaaacgaaggttgattcaacaatgagattggaacaacatgtctcttcttgtgttcttctccaacatacaccgcgagatagcctttgggaacgtcgacgggtgttgaaactccatggttttgagagaaactcgagcggcgtaggaggtgcttagcattcaacattccatgtaatcttatagccatgtttgaaacagagaggtttttgtagaagagagaagagtgtttgtaataaggcttgagcagagtacttgtatgtgggagtttatgatttagtgacatatatagaagaaaatatgagtaggggaaggtgtgatatgtggagagaaattaatgtagattttttttgagtggtgtttggttagtttcaagagccatatatgaaatatgtcacatgatcactctttccttctattggtagtgctattcatttattgatgatgtaaccttacatgtgattttggttttggattatctcaagcttcttttcttgaatgaaaaagtagagaaagggggtaagatttatatggctattattacttgtttgagaagagaaaaaatgttgggacaacattaatttcatttaggctttgttgttatatgtgcttgttaagaaaaagacttatttctagacactttaaaaagggaataagagaagggtccatatgggatatgaatcttctaaatagtggtggtcaatttctatggaacttaagtgttttggtcttcccttctaacttctaagctcttttttccattattttttattaagggcatctcttttttataccagttatattatttttattaggatgtataataaattgaaagtaagaaatttgaaaaaatataatgaattatcttctataatatgtcctaccatgtttagatatgagataatagagaagaagataaagattggaaactaagggttactaaattatgtgaccctttgggggtagggactgaaattatatatagttatagaatgtgtgatcttaaatgagataaggtcatatgtaggacttacatatttacaaacaaagaatatatataaatatatttatatatatatatatatttatctgaatcaaacaaaagtaggtaataatatagagttcatgataaagataatgatcacgagtataactttacagctaaagaagctatacctaacagtaactgtaatggatatggtaatga

SEQ ID NO: 69161 - DNA, 1042 bp, Cannabis sativa
  modified_base (102)..(110): a, c, t, g, unknown or other
tatcataaacttaccgttatatctctaagtcaatatcaatggttgatcttaggtctatggatcttaatcctgatatcgttaggttcagcttagttgtattannnnnnnnnttcaagttgttcgtggatgctaacgaatggttttggcggatatttactgtaatgccctgactctcagggacgccacgtgtgtgcttttacaaacttattcttactaacgatttagtttagtaaaagtgtggtttaattaaaaacctttaattgaatttaaaataaaactttacaaatgaaatattgttggaatatggggatatcctactaataaaattcttttacaactaatttacaaaacgactaatacaaatatagaaaaagaggtcaatcttgcttcccagaagccaagacatcggggctgatatgtacactgcttggagacctctgactcatggcttaacacatttgctattcttcttatctgcaccatgaagcacctgtgagtcacaatgactcagcaagaaaagctactagacaatagtatagtaagtactagcattacaacataatatacatattagtggatcaatacatattcagtttgtctacgcgaacaccttcataacacagtgtaagaaaaatcatacaaacttataattaataaattcacattttcactaagtagacattcatttaatccatagccatataatctcagtgctttgaatagcactctagccatacatcattgtaattacataatttcagtacttcacttagcactctacttaaacaataacataatcacctaaactcagtgcttcataaatcacccttaccactcgttatcaacgagctatgtatgtcactatcgttgcccgataacgtgaacgataagtaagaaacctatccacagtttcaacgagtaattactcatgacggtaatgactgtatcttctctcgatcataatcgagtcacaaacgataataattgttacctcgatcataatcgagtcacaaacagtaataatcactatctcgatcataat

SEQ ID NO: 69162 - DNA, 621 bp, Cannabis sativa
ttattatacgaagagcaaccagttaagatcttaaatagaaaagataaattcctttggaacaagaccatagctttggtcaaggtacatctgagaaatagcatggtggaggaagccacctgggagttaaagtctgacatcagggctcactatctagatttattcaggttagatttaggggacgaaatcctttatacagggggataattgtcaagaccacttaactttatttgaaaattagcagataaatagggtttaattatgaaacttgcatattagttatgaattattattttacggagatttatttgaatacagaatgcattttatattctatatatgaaattttatatttttgcctgttttgtgccccacgacattagaacgtgatgtatgaccattataatcatattttagtatttttagtatagcgggacaatatagctagacattgggaatatcaagattagttgagattttagagttgaccaaattaccactaggtggttttgtgacattttggttaagtggagggcaaaatggtcattttgcctaattgatttcttgtcctttagttggaaattttatgctgatattattccttaattaatagataaaacttat

SEQ ID NO: 69163 - DNA, 860 bp, Cannabis sativa
  modified_base (814)..(834): a, c, t, g, unknown or other
tttttctttccactcctcaatatataacattattgaaaaatacttttggttttgctttggcctttttttttaggggataaatactttatataaatacatataaacttataaaataatataaatattcaatcttgattaatattttaaacttcttattagtcctattaattataaaaaaatttatagaaaactaaaaaaatacatagttgtcatagacgataatattggaaccactttagataattgtttgtaaccagacacatgacatatacataatattataattatatatttaatactgaaaacaatgtatttatatatatatatatatgtataacaattaaactatcagaaaaaataaaaaattgtaataatggcattaatctgtaattattttgggtacgtacccacacagggcagtgtacaaaaaatttaatttataaacattatattattttaaaaatatatgttatatatgttgttttttttttttggtatttttcacgtattttgacatatacgtatgtgcatggttcataaatcataatttgtacgtacgtagttccgtacgtgcttcaatatttcatgcacctataaatatatgtatgtatatatatagacacttttttttttttatgaaagtatatatatagacacttatgttgatggatgtgtatacaatatagctggggcctgttctgttgggtgatattatatttttagaaatccaacaaatttaaatttgttatttgtgtttctcttacatttgggcctcacctgcttctcgttaaaaataccacttttattaatcaannnnnnnnnnnnnnnnnnnnntttatatttatttgaaacatacctct

SEQ ID NO: 69164 - DNA, 516 bp, Cannabis sativa
aaatgactcattgtcgttcaaacgaagtcaatattttggtgctttcgttgagagtagaatcaagaaattgctctctaatcaaaatctgatacgatggtacacacacgtagaggcctgaccgatccagcaaattcacagacagtggatcctgcgttgcagaacccaagaaacacaagggttccaccagctgttaatcctggacaactggcgaacgtgggcaacggtgtaacaactcctatagatgaagtcgcgcctggtgtgcaagagactgggaataacagttccgcacccaaacaagtcattcataacataaccgttccgcctggaaccaatgcccagacgaccatcggagatgctactgagttacaaaatctctgcgacgctctcgggctcatgcagggtcacaacaacaccctgcatcatgatcaggacgaataacgtgctgcagtagatctcgtgttcgacgaacaaaggcgtatgttcaacgaatgcagggatagagagatggaggcatta

SEQ ID NO: 69165 - DNA, 588 bp, Cannabis sativa
ttatcataataatataatttatttattaaaatataatatatatatatatatttgtatatattttgtgaatgtaaaatatattttatatatgaaagtttatttcaatgtggaacatctctcaacaaataagttggattgggttatatagagttagagtgtgtccaacccataattatatgacctatcactttttaactcaatgacccactgacttactcttaacaaaaccgcttactaccaaaattgggttgggttttcctcgttgaatagtttggcccattttttgtgcacccttaaaaactatatgtgttcacagacaaaattaaaatactcaaaactatgttacagagacaagactaaaacactcaaagtcatgtcagtttgtcacagagacaagactaatcccagtagcaaaaatggaatggtaatagtaaaacgcaaccccgaccaagccacacctctaagccaagggaaggccggttgggctagtcgatctgagaaaaaagataaccttcaatagatataaatttaggaacgagaaactctaattttttcttttagaataaaaaaaggagaaacaactaagct

SEQ ID NO: 69166 - DNA, 2868 bp, Cannabis sativa
gtttttagcaagtttattctttatttttttattattacttttagattcatgggttttatataatatttccaatcattggttcatacttatatgtttcttttcttaatataaatataatcaaaagtgatgtcttaaaaaataaataaaataacatttcttaagaatacccattaatggtttttgttgcatgttgtgtttctatggtaagctcccttttaattctaagcttttgcatgatgaattgtcttccttgttgggtttgaattgtttattatcaatttcatttactctctttacaattcatatctagcccttttgttggggtagaagttcaagttgtattataggaaataggaatcatttgaacttatctgatagttttcatacttggtgcttgtttgtttagaatcacttttgtcttgaaactattccaaacaagcactttatatgtgtgtatgattttacataacattcaaggttcactatgataccatttcaagcatttctatatattgtttaactatgttatatcctctaatgttttaatgtggcctaatcttttgttgttgctgttcaatgtctaagcaggcaatttccagcagggtctctaaattgaattcggtttcgttttcaatcaacagattgggattccagtctctaaagatgcagcctaggcgctttcaagtttcctgtgcagtaagtttatctgatcaaatacaagataatgaatgattagtagttttaaacaatgttgaactacatgtgtgttatttgtaatacatttaacaatagttgaattatataattatgaccaggccaaaccagaaactgtggaaaaggtgtgtgaagtagtaaagaagcagctagctctttctgatgattctactctcactggtgaatcaaagtttgctgcccttggagctgattcccttgacacggtactaaaaaactcatacttaaccaagaatcattctgaacctgaatatcagttagttatatacattttttgagttttgcttgcattgaaagtgcaaagaatcatttttttcattagtgaattggttgattgacctcaaaaccacataaactgttctcatgcctcacatcttcaaaacccacttggcaaatttttatctttcttctaatctcaagtaaactttaaaaatttgatatgcttttcttaagtagtaatgtttgtttatatacttcatatgtaaacaggttgagattgtgatgggacttgaggaggtttttggtatcacagttgaagaagaaagtgcacagagtattgccactgttcaagatgcagctgatctgattgagaagcttgttgagaacaaagctgcttaagatgtcatttggaagaaagccgttccatttttctttgttaccattttccttgtgttttttcttttttctttttggcaagttaagcttctaaatggagctctactagtctggtagtggtagtcttgaataacttcatgaactcttattagtgtctttttattttatgttacaaaaacttttcttgtatttgcatatttatttagtggtaagtgaataatctagaattgacacaattgtgtttgtgcactaaagtactggttctggttatatgttagtcatgttgtcgtccttgtcaccttgaattataattttggaaaatttacaataagatatctattttatatttaagttacagtttcattacctgaatttcaattaatcctgattttatttattggttatttttttggttaacgtattatatatatatattttttgtaaaataaccaacgaaataaaaattacacagtaagtgggggagttttttctattcaagaaagttgattatttatcttaagggcattgttatttatgagcttcaatattaaagttgcgactgatatgagagagatgtttcgagaaaattaaacaataaaatttttttatcaaaaaagatgtactcccaattcattcaaatacactgtctaatcctccaaaactgagagcaaagaatcccacaacttgagtctaacacaaacctactagtagagcaactgtttttgcctgcaaaattaaaaaagaacctgcaaacaaaatagtttaaaagtaataactatttttaatttttgaactcgaaaaatattataatatagttgtaatagagtcaactctcaaagggaaatccctttggtttgactctttacttaattttttattgataatattttaatggtacaaaatagtataaatttaataacacatcaccctaaaagcggatcatatatctattttgaaaatatcataacttaaaattttttaaattttgtctaaataaaattatttaattggactatttaaatttcataaaactattttaaaattcctaataaagttttagacctcctaaagaaataaatagattagttagtggaaaattgaaatgtaactaatactctaaggaaacacttcttattgtcttatagagagaacatgccatcaactattatcattaacattcagtattatagctctatcatgctacacttgctattattacatccttttgtaagttcatttgtaataagtaaaattgcaaccatgattttaaaactaaaagaataatttaaattaatatttactatatatatttatatttgggaattatatgtattattcaatcataatcatcaaaacatcatattatattagaatgatttaccttgtaataatttggataaagccaccttttattaactaaagtgtaactaaacaactttaaaaaaaaataataaaaaaaaaataatataccaatcactttataaaaattactaaaatatatgttcattttttttttttttt

SEQ ID NO: 69167 - DNA, 512 bp, Cannabis sativa
atagttaattaataacatgctcatacattaatgaataacatgtcacacatagaaatctcccacaattatattatcatgcatctcatagtagaaacatgatatattaggattgtcctatgtgtttatatgtttaccgttttttttaaactgaaaaacatgtaaagtcgctagattaatttagaattgacttggtaattaaaattaacttaacttggtaatttaaaattaacttattaatttaaaatagttttaaaaattataatagaaaatttatttataatttaagacttttattataaataaatcaatcataattattaaaatgattaatatgtattatgggaattaatgaaataaacacattaacctaaaatagtgagtgggagaaggaatacaagtaaatgtaacctacgagctccattattggtcaacacctaagaagtataaactggcctagagacggctttgcattcgtcccctaaggaaggtatgcgtttatattattgttcaaa

SEQ ID NO: 69168 - DNA, 819 bp, Cannabis sativa
tcggaaagatcaatgacctccccggaaggcctcttttcctttgaagaggacctctcaccgcccttagacttcttggctggaggaaaggcgctagagcttttgcccattttcttccttagagcgtcgagcatctaccgagacatgtctacacagaacaaaaacaatatggttagaagacagccatcagaaacacaaagcatgaaagtcaagaagctcaaaaacaagataaagtagaatgcaaggtgactgcccgaacaagactcagcagtccatcatcacttgacatcgatcttatctcaaaaatgacggctttcccttttccgaacacgggaggagatggccgaacaggtgaagtgggctcccttatgcgaattgcatattcaacaggtgtgggcgaggttgggagtttcttcttcctcttcaatggagttacctgctcttccttagcttcatcttcaggattcaagggctcctgagcgtattgcttggcccttgtacctcctttcaacttagcttcacgcttcagttgaatcaactcattctctggatgagttcgttcagtctggccagcaccagctttcctcttcttccatgccacggacttaggagtaaagtcctcgggatagagcccgtacctcacaaagttatcctcggaggtcaacttgataatcttccattcttcccccggcagccgggcaagtttttgagctctatccctaagagttagagtgaggggaggacggtgatatgtcggaatctgctagaaccgagtccgggtaataccatgaagtactcatcagcaaaatgccttatcttgct

SEQ ID NO: 69169 - DNA, 865 bp, Cannabis sativa
cgaagggctttgttagcaatattgatacaagggtttttaacaacggtctcatttaaatttttgtgggtcccctcaacaatctcctgacgattcttggtagtggccgccacactactcgtaccacccgtaccagagggatattccaacagttgcatggccacatcaacagtacgattgccctccgaattctcctctccctgagtattcaccgcctccacttcgccttgacggcctctgtttgccaacgccgccggtttgggaccaaaattatcatgaagggcagggcgcctcgtgtcaaagcaatctcttatcggaacggacgccttcaaccctggaccatagagagggacagctttccccacgggagggtacgcaaaagcttttggccgagagcagttccgttcattgtggtcaagaaacccacagttgaaacagatcaccggaaccttgcaatacttgaactgaacccattctcggcgattccgatttatgctgaggtagaaacccgcaggtatttgagcatccgtccgaatatccacccttagttttaggaaaccccttcgagaaatgactctgttatcagcaccatcatgctctaagaactcacccaccttggcccctatgacagcagagttttgagccacaagatagggagttggtaatccatggatttgaacccacaccgaggctttgctcatatttacatcattctgccagcttccatcttcctccggccaatctctaatattgaggagctgattaaagattaagcatggccttcttttcagaatctccttcttatcctcttcattgtcaaaaaagaagccccacagatctttctcgagcgtctttatcttccatgctc

SEQ ID NO: 69170 - DNA, 1340 bp, Cannabis sativa
gggttcatagggtcaaattgaatgttgatggcactcttgcaaaatgcaaatcgaggctcgttgccaaaggatatcatcaaactcctggtataaattactcagaaacgtttagccccgttgtaaaaccagccaccattcgaataattcttaaaattgcagtgtcataccaatggaaagtaactcagttagatgtgtcaaatgcctttctcaatggcacattaacagagttggtattcatggttcaacctctatggttcgaagataagctaaaaccgactcatgtgtgtaagctgaacaaagccatttatggcttacaacaggcacctagagcctggaacgagaaactgaaaaacactcttctcagtaagggattcaaggcctccagagctgattcatccatgtttatctttggctcaagacctcatctcatcatttttttagtatatgtcgacgatatactaatcacgggtccaaacttgtctagtatcaagtgcctcatacaagaactacacaaagaattctctctcaaagacttagggtctctccactacttcctaggaattgaggtacttcgaaattccactggtatgtacttatctcagtcgaaatacttcacagatcttctcactaaactcaacatggaaggggctaaaccagctgcaaatcccaccagttctacccatgtcctcacactggacagtggtgaaccctttgaagaccatactctatttcgaagcacagtaggtgctctgcaatacttgaccctaacccgacctgatatcacgttcattgtgaacaaacttagtcagttcattcatgcacccactactgtgcactgggaagcgtgcaaacgtttgtttaggtaccttaaaggtactatacatgagggaatccatcttagacaagccttatacttgtctctccatgcctactcggatgccaattgggcaagctccccagatgacaggcgctcgactggtggttatgcagtgtttttaggaggtaacttaatttcatggtccgccaagaagcaaaatgtagtttcccgtagcagtacagagagtgagcttagagcctttgctaacactgcagctgaagtgaaatggcactgctatgttctctctgagttacacttcaccttacctgctgcacctataatctgggtcaataatcaaggtgcagcatctctagctgccaatccagtttttcacgcaaggtcgaagcacattgaaatcgatctgcactttgtgtgagatcagatattggccaaacagcttgaagttcgttttgtaccatcaattgatcaaatatctgatatcctcacgaagccactcaccaaa

SEQ ID NO: 69171 - DNA, 3148 bp, Cannabis sativa
ggttacttttacatatcaattaacatccaatccgcacaaatgcaaattttaaatttttcaatccaatccaaatctgcacaagtacagatttttatctaaccaatttcgtagcatgtcgtaaggatgctcatccaatctgcactattttgctcatactccatctgatccgcactaaatgcaaaattcatattttgaatccaatcaaatccgtacaataactcaatccactccaatccacaaaaatacatattagattaattattttgaagtagttacttttcaatattaaactatttaatatttataaaaaaaaatattatttttcacgtaacaaaaaactaaaataaattattattgttttatgtttctaacgataaattaaaataaataaaataacaaattcaaaaacaaaattgtatatacaaaaatatttcaaattgtatgtaaataaaataaaataaattatatataaaaataaaatatacatttgagttatcaaattttaaaatatatttatattatgtgttagattttttaattactatttttttttccatataattatatatatatatataatttttaaaatatataaatatacataaatggacttaaatcagttacttttacttgtcactcaacatttaatctgcacaagtacagattttgaataatccatctaatgcaaattgaactaaattggattctgcaaattagattgaattaactattttatgaacactcctcacatgtggtataatctataagcaggtcaaaacatcatatgaagcaaccgagaatataatagaagttgagttaaaagcataaattagcaatcctcaagcactagaaagatctaaagtagatactaagcactcttaaaaaaaaaatacataatactatgaagtacataaccttgacttctggtaaaaatcaaattgacaagatacatataactagccagaagttccaccagatataaaccgttatgccaacatctttggtaacatgatttgaaacaaattcacgcttgaagaaatgaagatttgaaaatacatgaaaattgacaattacaaactttttaagtaaccaggaagcattagaaaagcttactgataatcctctgtgggtgtttcattgatcatctctaaatccatctatctttgcagttctctctcagattcttgaaaattgagagatacacaacagctctaaaaacactgatacagcagccctttaagttacatcagatgcaagtatgacatcagcttatgaacttgcaagcatagcaacagaaaaggtactataaagtcaccaaaaagcattgaaagcatactaatgtttctctgtcggcatttcattgatcctctccaaatccatcttgcagttctctctcatgtcttttagtgagagaaaattaccttgctgcaatgcaaaatccagagaatctatcatataaagaacaggtgaaaaaaacacactaccatgataagaaactatatatgcatatatgtatgtgcctgtgtatatatatataaatcaaactatggaagcctgattataaagagcaaattatattggttgattgtaacacataggttgaagaactcgcaaaacagtgaacagcccaagtaaacaaccaaaaacaatattgaatcttaaccaaaacccaattgacagcaaaagaatcccaagtgttgtgaaaaaactgaatactgttttgtatgaatattgaacaaagacatgcatatgaaaggaaaaccttcaacaaggatcaaatcataggcaaatgaagttacacgtactaattgattgctttcttgaataagtatgtcctccatatgacaaaatagagatctccactgacccgagagatcagactcaaggcttgatgatttgataggatttcctcgtccttgaatatcagcctcctctgtgaagcacttattaaccaaggtatttgcttctttctgactcttctttatagctgtaaaatgaaaaagaaaacataacataaaccatcaaatacatacgattataggtcattttaaatgggaaattcacacttatcatgtgaacataccagaaattcgacccttaatatcctggtactgtaagtctgcccaaatgtaagcagctgtgtacaaacattgtaaaacaaacacacatttagaaagccataaaaaatacaactttcatgaacgcaaacaatctagaaatgactagtgtaatttcctagtcataattacctttcaagcaaaatgagcaagaacaagattttagaagctcttcattgacatctgtatcaccactaccatcacccttgagagttgaacatctccccagttcccgtggtttaacactttgcataaacaacttcgaccactcattaggattgggttttgtagaagcctgtttatcagcaccacaatcctctttgctattcttgcaaacagtgactacaggtacatgagcaccatcgcttttagttttagtagcatcagaatcatctctcaaatcatcatcttgataattcgatgtcaccccaccagaacaatctttattccaaaatcctgagccagtggcaattgaaatgctagacaaagaactatcccttgttgcctcacaatcttgtgccgcaacactctgattaattttgccaccatccaaacccttggccttcttattctctttgcataaattggagattaaagactctcgattctcctgcgaggcatcaccactttcttccacaacactctgatgaaccctgctgccatccaaatccttttgtctctcaacagcttcattaaacaacttcaaccactcacttggatcacattttgtagaagcctgtgtatcagcaccacaactacctttgctgttcttggaaacagtgactacaggtacacaagcaagaccacttttagtcttagtagcatcagaatcacgtctcaaattatcatcctgataattcaatgctgccccatcagaacaatctttattacaaactcctgagcaagtggcccttgaaattctagacaaagaactatcctttgttgcatcacaaccttgtgccgcaacactctgatgaactttgccaccattcaaatcctcggcctttttattctctttgcatatattggag

SEQ ID NO: 69172 - DNA, 696 bp, Cannabis sativa
tcgttatgtatctgatgatggagtttatacaaccttgctcctacccaattgcggctaccgtatctttgattctgatgctcggctccgcaaggtgtttaatgggtactacccccagtctttctatctcactgtccgatgccaacttggccaaacaatctgcatgagcgttcttctctctgggaattctttccactttgtactctgtgaaatcatggagcagttcccgcacaatagctacgtacgcggccattttctctccacacatttggtatcctcctgagacttgattcaccacaagttacaaatcgctgaagacttctactcttgcggcccctacggcttttgccaacttcaatcctgcaaatagggcttcatattcagcttcgttgttagaatctgggaatgcaaaacgtaaggctgcctggagccgaagtccatatggcgatatcattgctatcccagcaccggatccgtttttgtttgacgcctcatcaacgaataccttccacactagggttcgcgatactggcactattgaactagcttctgcttcattacactccgttatgaagttcgctagggcttgtccttttattgaaatgcgtggaacgtagtgtgtgtcaaactggctcaattccatagcccatttaaggagtcttcccgaagcttccggcttctgtaagacatgccgaagtg

SEQ ID NO: 69173 - DNA, 610 bp, Cannabis sativa
tgcaatgaataaggtgtagtatgagcctcatcaagtgtctcttttctgagctcatcactgtttggaacacaagcgtgagctttgtaaagcagcattctattatttgagatcgagaaatatttaggcctacttgctaatacatcatcctgaatcttaattagctcaacatctttcaattgtgtctttttaattatttccaaaaaaatctgactggagtgtcaagttatgtaattttccaaccacaaactcaattccagccttaaccatatccgaagccaactgaggtgctatcattatggtactaaagacttgttcaggaccttttctcctcaaagcatctgccactacattggctttcccgagatgatatagaatctcacattgataatccttcactaattctagccaccacctctgtcagatattcaaatccttctatgtgaagaaatacttgaggcccttgtggtgtttatagatctcgtatttttctccatataggtaatgtcgccatattttttgagagaatacaacgacagcaagttctaaatcatgtgttagataacgctgttcatattccttcaattgatgggaggcataggctataaccctg

SEQ ID NO: 69174 - DNA, 654 bp, Cannabis sativa
  modified_base (330)..(331): a, c, t, g, unknown or other
aaataattcaaaaaaaatattaaaagagtaatttttaaaaattattttaagtttattttttataaaatattagggtgtacttattaatttgtggggtgcaaataaaattttttatatttttataataaatgagttccctaaaaaaaaggggaattaccccatatactattttttttaaccttttttttttcaaatttatggtttgagtttctaaagtagttgcagcactagttgcaataggggtttctatacaattttttggtgcaatttagtttgcagcgctaattgcaatatgagtttctatgtagaattccataaaaatatatatannaaaaaaaaaaaaaaaccccaataaaaaatcatgttgaatacaaatgcggagcacgtgtgcctctcactagtatcttataatttataaatagggtagtataatatacaacaaaaaagtcaattagacaacaatctaattttaatatgtcaatatctactagtccgaattatgcaaattaaaaaatttgaaaaaacttatcattgtaattaaaaaatgtgtcaaaaataaactacatatatacatcatcatccacaaagcaatacatatataacaaaaaaaaatgtcaaaaataaactaaatatatacataaaatacttctcaat

SEQ ID NO: 69175 - DNA, 538 bp, Cannabis sativa
tttaagtttggaattatataataaataaaacaagtttatagaatgatgatgtgattatttttgtctcttataaatgcaataattaattatcatcttattatttggagtatagttaagatattataatacagtgattatatatgtcacccacattaaaaatgtgcttgtaggatattaaactattacaacagcatgaattaagtaatgtttaatttggtattaaatcaatttgtttcacattggccatgtgtgaatattatttattgatttcttttacacttaatagttactgagcttttgttatatttaaatttatatatatataaaaaaaaattatacctactgatagaaaaatcatattctagctatcaactatatttttattgtattttatgtcaagaaaaataataattgtgtgtggttattttttttcttgaaagaaaacttgagtgtttaattttttaacttaaaaattatttttacttttttaaaatagaaaagtactttgtgaaaaaaaaaaatagtgggtgttttgcca

SEQ ID NO: 69176 - DNA, 1131 bp, Cannabis sativa
atgacatataccataattttttttaacaatgatgataaacttgtcaaatattctctttctttttcttcttctttttttctattaaatattttaggtttatttttatattttgttaataaataaataaaaaatacttaaatttaaataaaatttaatgtattaaataacttaataagttactaattttttttttattattttttttattttattttatatttagacattacaagattaaataaaaataatatttttataaaattattttaatagatttataaaataatttgtaaataaattgaatagtacctgacacttcatgagttacattaaaagaaaaaacgtaacctcaatgtatcttaaataataaaataacataatatagcttaaaaatatagaataattctatggtagggacattggttttgttcctataatataaagacatcttataatatttgatatcgataacttttgagtgtacatattatcgaatttatacttgtgagtactagattagtggagaaaaatgacaactttaatataaaagttaattgaaaaaaatatgattggtcatggatatgattcattggagttggcaattcacacactaaattcacttggaccaataggagaagggaatgactaggggaagagagaattgaaaatactaaataaatatttgatggaaaaatatgttttgttttttctcttgttagagcatctccaatggagagctataaatatggtgcgttgccatttttaaaattttttacaaaaagttaagtccaatggtgatctaaaatgtgtaccgaattattgacacaaaaataacatgtgctaaattttaacccacaataaacgacacatttttaattgcctatttgacactcatcaatactattcattaataaaaatgttaatgaatattaatgataatattgacttttataactataaaaaattggtcaaatatagctatatgatatattttaggccaaatttaactcaaaatatacaccatctattggagatggtcttaagttttttgacaaaattttgttccaaagttatcaaatacaaatataaatcaaattcagaataatataaggggtaaatagcggcataagt

SEQ ID NO: 69177 - DNA, 802 bp, Cannabis sativa
attcgtgtgttaatactttaaaaacatgtcattttgaagaatttttttataagcaatatttacgttacaaattattcaaaattttacaaaaaaaaattaatgaaatttcataataactacaatgtgtatataataaattatatatataataataactataatgtatcatatatatattagtataaacccattaaaaaaaattcaatgctgatcatgttgttttaaatattttccaatgaaaagataattgacaatattaatattcattatcaactattggcttaaaagtggtataaattgggcctacgcataaggtcccccacccttgctcaaaagaatgatcaatgtaattttaaaagggaaatttaacttactataccacctaattagaaatagtatatatatatatatatttaatattttttccttttaaaaatacctttaaatttcaaaaaaacttctttctttaactctctcactctcaggcgttaaccccaacccatacccctatcgttgaacacacatacccaaaaccccggtcgcaaagcctcgccgtcatcttctctcacgacctctcttgtttttacattttttttctgttggttttccagttttttatgatattttacgatgtatatacaatgatagaataaatctgaggttagagatgaaatttagcaataattatagatacaggccggccttgaaagtatatgggcccaagacgaattaaattttagggccctaaaatatatatatataaaaaaaaaagatcaatagaagagtgttatgggatttaaac

SEQ ID NO: 69178 - DNA, 767 bp, Cannabis sativa
tgtgagatttaatggtacacattaactatctatttacctaataaattcatatgctccctaaacttttgtcccatatatgagatttttgatggtatcattatttatctatttatctacttatctataatctataaatttatataattatgaaatataaaaaggtgatgaacgatctctatgagcttcttctacaattatcttttttttctttctttttttctttttttttttaaaatttttgtatgttttaaatttttgtaagatcttaattatatgtctctttagtaattttttgtgaaaattcttaccttacttgtatttatatcaaattagtattttctattttaaataagtgatttacttattaagtattagtgactattcaaatagttttatttaaaaaaaaatgtttgtgaatgtattttaaggtaaattgcgacataagtttttaaaattttgagtttgtaagaagtataagctcaatgattctttttagtggcataaatatctaatgtaaaattgtaattttttttccaattttgtcagtatagatttcgttttaaatttattaaaaaaaaaattagaagtaattgacactacatgtttctatcttgacccaatgatatagaacatgagccttatatgtgtcatgtttaagataacaacacagtatatactgatgaaactggaaaaaattacagttttacaaatattatatactaatgtcactacaaaaattataaaatttatgtcgcttacaaactcaa

SEQ ID NO: 69179 - DNA, 715 bp, Cannabis sativa
  modified_base (147)..(156): a, c, t, g, unknown or other
caaagatatcattcattgaatagactagtcagctcatctaaaatggacgccattctagcaaccttttatttgatcgaaaagagaatccgacggagtcctgtttaggcgagagtcaaggtcatttctatttcatgagcttctaccatnnnnnnnnnntttgtaagccctactcttagcagccactattggggtggtcgttactaagaataaaagacttacaataatacttatcttttaagattctacggcgttaaatttctaatgaacgaacatctattaggatgaatcccactagaacaagaactatgtagaaccaacaatggagatcgaatgtccctttgattaaagctcattatataacaaatgtatttttagttaatcatttatttttaatctacatattttcataatgaaaattacttaaaaataattaataaaattttgaaaatatttatgtaaaaataaaatttcaaaattatttaaaatataataaaataaatacatgaaaatatctaatttaagttgttctaaaataattaggtttttaacttaaataatttataaaatttaattaaataataaattaagtatcttgaattaatcaacttaatttttaaaaaaaaatattccaacttaagttgatctaaaattaacaaattttcaacttaaatatattttaaaagaatatctgaataactaattttttagaagattc

SEQ ID NO: 69180 - DNA, 1159 bp, Cannabis sativa
caacaaactcctaaatttcttaacaaaaaatcaaaaatatctaaccgctgtaagtctctgttagtgttcttgggccttactttatggcatctggtctgccgtacttactcctttttcttgtattgccagattgctgcagagaccggtcgcctctcaaagactttgattgatcatgggtacgtcatatccgaatttgggggcatggacgaggtcatgaagagtctaagagacttggcagctgagaggaaggctttccgggaggaggcccagcagagggaggcttaggcagagcggaggcaccaggaggcactgaaagccaaggctgaggagttaaaggctaaggatgatgccctgaagacccgggatgaggtcgtgaccaaggcgaggcgagagcttagggaggcccaggaggcagttgaagatctaactgccaagctgaagtccctggaggagctgcaccaggctgacttgaagacaacagccaacctaaccgttgaggtggaggagcttctggatttcaaggattaggctcaaaagaaggtgaaaagagatgagctcctgacccccattacctgtcagcactgcaccaaacgcttcgacgatggcgtctttatggcctggtagactaactgtcaaaaccttaagctcgacttctatcgaaagcctgaggaggttctcgtccgcttctgggagaagaagaagagacttgacgccttgcgggaggagcgtaggggtcctcgccttccaccctgaattgattaagccagtcatttgtcaccattgccattgccattatcattatctctttttatatatatatttagtccttcttcccccttcaaggcaatttatattttttcttaaggggagacatttaaggcccgtccccaggcccttatcttatttttgagcttttctttgggatttgaacactttacattcatgcttgaatacatattctactttttaactttaaacttttggtctgttttacatctgtgcatgtggtatgccttactacccccttgagtgacatgaaaatttgttttaggtcacttagttttacaaattttaatttcgaggttacatatacttgtctggtacaaatttactttacagagcataaacttttattttttcgactattggttatactttc

SEQ ID NO: 69181 - DNA, 1103 bp, Cannabis sativa
attacttggaaaagactattcattaacaaattattctccaatgaatattttgcaacaaaattattggataattttttctcttgctttgaaagattatatctttgatatatatatttaagtatcaagttcttctctaatagattttttcgcttcaaagttattagcaattcttcgtactttaaaaatttatattaatttaatttttatttattttttaattacaaagtatattaaaatgataaattcttttctctctctataaaatttatatatattaacatattataacacaaatatatatatatatatgtatatctaagaaaacttaaaaaaagactacatataagagctcatatgattttttttaattttatttttatacattttcataatgaataattaaatttttattatatttctctccttcaatcatgagctttaaatttttattatcttaactattttgtaattaattacatacattcatattaattttagtgatgtcttttgatttttttaataatttacacaatataactaattcattgaagatgatatattagtatttttttttttaattttaattattttaactttcaataaaaatcacatacctttatattaattttttataatttacatcatttaattaatgtattgaagatgatatatgtattattttttttaattaattttaattatttaactttctaaaaaagtattaatttaaaaaagtttcttttgttattaataaccttaaatgtataatttttttcatgaaaaaaaaaatataacaacccaattaagtatatatactcagatcttaatacttttttatttatacaattaactaaattaatatcacccatacatattcaacttctacctaaatcaataagaaatttattgactactatttatattttttttgtctattgaattcctacagttttttctttctcctaattatttattttctaattaattgatataattaataaatacttttcaacttctaatcatgcaaaatagtatctatataaatagagaacaaaacaaatcaatcttatattaaaattaagtattcttaaccactatttttt

SEQ ID NO: 69182 - DNA, 699 bp, Cannabis sativa
gtgtaactaggttatttatcagaactggttcaggtttaatatttttaaaaactcaaaatttggaacctggttagcattttttatttatttatttttctatgtatatatgttatataattatattatatttttttttttaattgtgaatttgtgagtgtttgttaaattgttaatgtgttagtttatgtaatatgtatatataataataatatattatataattctattatttagtaggttttagtatctttcttgaaccaacatatataatatatatagatgatatgttggttcaacaggatgcaacttgcaagggtttggtagttgttggtgcggcaggaccgactctgagggttggcaaactaggcgtgtgtcttgagccactaaacgttgaggccctaaaattataaaaaaaatattattagtatatagattaaatattaaataataagaaaatataacaaatattgtttggtgtagtggtgaagagtcttactttaaattaagatatcaaatgatcaattatcaacctctattttttttattttttttaaaaaaaaatatagaatgtgtagttatgaaggattgaaacttgaagctagggatgcactaggacgaaaaattggcggggagtgctacccacgttcccatccccgttaaagattctaattctcatccccgcttaattatttcccatca

SEQ ID NO: 69183 - DNA, 1244 bp, Cannabis sativa
ctccaaaaagacaaaaaaaaaaaagcactgtgtactactgacttaaaaactctacaaaaattcctatgaagcttcttcttcttcaaggggaacaagaggaataaagaggtttagtctattgtatactaatttgtattattattcggcgaccaaattgcctaataaaatggactcgtggactaaggatagttaacgcctgaaccacataaaaatcttgtatttattatttaatttattatttcttttctaagctctaaatatttagttttcgaaaatctcggtaaacatctaataaacacttgattattattgaactcttcaatcgaatgatctagtttattaattctattattactctactataaatatagaattgcattcttcgacaatataaagttatatttacatagttcttacttgtagtccattgatataatcaatataattagtttgccctcaattattagttcataattatagttggtcaaaattattatcttacccttataattatctcttgacttcttatgaaccaataattcattatgaacagttaatctataatctaattatagatttggatcccattaataattgtaaagaccgcttaatttaaatttggaaattaggagataattagggtttaattatgaaaattatttattgctatttaaataattatttatgttgatttgaattcagaatgtatttttatgtcatatagtggaatttcataattttgcattttcggtgcccgacaacatggaacgcggtgtatggctcagtagaatcccaatctaatattttagaatagcggggcggtattgttagacattgggaatgtcagtattagtcaggaatttagagtttcccaaaattacacttagtaccctttttatgttgttttagggtggaggggcaaaatggtcattttgccccatatgtattttttcctataaggacttaattagatatagtaagttgttttatgttggctgatattaatttaataaaatgaaataagaggattcatttatttcatcttttattcaaaaatcaaagaagggaaaaaaattacattttcactcctctctctcactcattttcgaaccacttgggaccagctagggttctgatttttgctgcttcaaatctatgttttgcatccattttgagtacaatccaagctctaggtatagctcttgcactctctctttagtttcttgtaatttaaggaagaaaat

SEQ ID NO: 69184 - DNA, 3522 bp, Cannabis sativa
  modified_base (48)..(48): a, c, t, g, unknown or other
gttgagtttgggcagcatggggtgtatctcgtgagatcatgtaactgngtgtggtcttggccatcttccgctgaaagtctctattaaatttattaaacatattaaggatgttgtcgtctaaattttctattacttttacctaaatagtaatactttattttcaactgggtacccatattttaaaaattgttatttatttttttttttataaaggcaacattattatcttaacaccagtttatttatggcatcttattttaagtaagggcttttcagttcatcaactgcttctgcagagtgttttcttgctacttctgagatttgtccatctcatatatcatgtactacttctagttgttgtaataaagagatgtataaatctctaaattgctgtaatcttcatcttgataataaaagtacatgttctcattctagtttgccatctgttcttgttacttacaaacaaaatgatgttaataattggcaccaaaagttaggcgatccatctaaagcaattcttagtaatctgttgtccaaattgtcccactcgggcaatatccaaactctgcaattttgcaatgcatgtcagttaggtaaaagccacaaagtgccattttgtcccacagtcatgcatcaaaaccattagaattaatccacaccgatttatggggaccttcccacataacatcaaaagaagggtatagatactacattatttttgtggatgattttagtaggttctcgtggatatatcctctaatagtcaaatctcagtcctttgatatgttaatttgattcaaaagcatggtggaaaaacaatttgaattacagtgcaagctgatggaggtggtgagtacaagcctttcgcgaaatttctgacagaccaaggaatcttgttcagtcatccttgtcctcacactcatgctcaaaatggaagagtggagagaaagcacatgcatgttactgaaacaggactcactttacttgctcacgcatgtctttatctaacatattggtggcatgcgttctcctgtgcaaccttcacaataaacagactccctactcctgttttggacaatgttagtccttttcaatgcttttttggtcaagaaccagactacaccatcctaaagccattcaggtgtgcttattttcctcatgtaagaccttacaatgctcacaaaatggagatgagatctcaacaatgtttgttcttggaatactcctcttatcacaaaggttacttgtgtgagaataaccaagggagaatgtatattcctaggaatgtcatattcaatgaaggtttattccctagcaagcaaactggtcatcaagattatcaacaggtacatacaaactctcctatctctacatttccttctgctacattctttaccattaacactaatccggtttctaatgtttctacatcaactggaaatgttctaagggaggatcatgctgaacaacagctgtacaccaatgtaatcaggctactactcaaattggaggtccagttgccacaaatagtactgttgcccatcaacaaactcctatccctactcaggatctacctactagtcccattgaaccaattcaaccaatcaattcctctttaaatccaaactctgaacctagtactcaaactatacctcaacaggatccccgaaaaacaacacaccaaatagcatcctcaaacactgaattaaatacccaacactagtctcatttgcccccaaacagtcacacccaaactcatgccatgacaactaggtctctaaatgggataaggaaaccaaaagcttactgtgcaacaaaacatcctttacctgaagcactgttgccaacagaacccaagtcggttaaggaagccctcaaagatcgaagtcgttatcaaggttggccactagagagaaaagagaaagaaaacccaagaaaatcagtacccaatgtcttaaggatggtgtaggtactggggaaggcctcccctaaaattacttggagaggtccccactggacccatcacttgaagggcatcgtcctcatagattaatgccataaagtagtaggtcaggaacccaccagatatccactaaatagtcctacttctagaaatccatcccactcaaagccctagcagctccaaagggataggaaaagacaaaatcagccaaaagcttcctaagactcatatctgttaagttgggatttttatgtctgttacctagaagaatatacacgcacaatcatggttctctattaccgacctaatattcattgtcactcaaaatacactctttaacacgattgcacgcaaaagaactcagaatagagctcaaaaatacaaaatttacctcaacaataaaatcaaaaattgacaagttcaacatcacttacttgtgatgtgatttgaagagggcggtcagtttctgagagtggcctaaaatatgcgtgcccagttgataactcggttgtagcctacttggacgttgaactcctcatctaactgagggtgattcaagttgagatcaaagactggtgcgtctggaaaataacacgcttgaattcaaaacaaacaaccaaaaataaaggcaaagcttttgttctaccactagtaaggatactgaaggtcggtgcaaaaccttttcctatctaagtttctggggaagatgtttaggttcttagagatagagggagtttgtaatcgcagagcggtaaaaaaaaagaagaagaagatgaatgtgcccgcatcaatttatatctaaagatgagttgtagaatttaaaattgacaatctagattaactccataaccggcacaagttgatccaacagctagggaattgaaaagatggcctttaatttctctcgccaaaatcgaagaatttttcatcactaccagtgttgggtccaaagcccattagaaagggttgtcacgtcaccactctactaacagacacatttttccaaggggatgcatctctcaagcgagtgtcacccatgaagtcaagaaatacatatacaacacgcggttaatactaagtgagttcactaaaaacttcgaagccttactattattaaaagccaaacattaaaagtgtgtgtgcatgatcaaaaaatgcccatgtgtcacgattacgctctagtaatttggaagaagactgcaagcttccgcaacttatgaagttcgagaagcttgggggtaaatgttatctgcatttctagatgaaagacacgtggcacataatttaaagtatctggaatctgaaaggttgattagccccgttaggtccagagatgacgaagtcttaatgtactcccaaaagacattcgaaaggtactcgagaaggttagcattgacaacagtcacccaaaagaagtcggaggtcttccatgtagaggaatccaaatagtcccagagacggttatgatttcaggcaggggaacatgttttcctgcgggtttcaccaatgaagggtattaggcgcttcgggaagaagggtaacttaagccctaggttcat

SEQ ID NO: 69185 - DNA, 1293 bp, Cannabis sativa
  modified_base (33)..(42): a, c, t, g, unknown or other
tattgtatatgcaacatctagctattcatcaannnnnnnnnncttagactagtatttttacaataaccaacaaagagtatctattttcaaactcaacaagagtatctatggtcttaaataagcatctagacaatggtacgaaaaactaagtaccacccttaaatctgctggatttcaccaatttctatctgataattctctttttatcaagaacacccccacactcttacttattgtcctcatttacattgatgatatcatagttgctaccaataaccaactagctatcacccacttcaaacaattcctggacaaaaaatttacacttaaagatataagatctttaaggttcttcctcggattagaagtagggagaacaaagaatggaatatccatctcccaaagaccattcactttacaactccttgcagaaataggttaccatggagccaaaccagcttccactccaagggaacctaaccttaaactcagcaaggacaaaggaaagattcttcctgatcctactacctatagaagcttaattggaaagctcatatatctcacgattacacggccagatatttcttatgctgtcaatcatctcagtcaattcttaacatgtttaagagtgcctcatctccaatctactcatcgaatcctacaatatcttaaacgcactcctggacaaggcctcttttttccatccaacaccaccccacatgtttcagcctttgcaaaaactagtttgtctccttcaaatgtacaactttctttttttgcagattggggcacatgccaagacacacgtcgatccatatccagctatagtgtgtttcttagccaggcccttgtatcttggaattcaaaaaacaacaagttgtttctccatcttctgccgaagccgaataccgtgcaaatggccaatgcaacgtctgaagtaacttggttcatagctctactgaaggatttcggcatctccctcaacaggcctgcgactctatactgtgacaacaccgcagctattcacataagtgaaaaccccgtttaccatgaacgcacaaagcatgttaaattgattgccacttcattcgagaaaaaattcagcaagggacactcaagttacttcacgttcaatctcaacaaaacttattggacattttcaccaaggctttacttccttctccttttcaaaacattttatccaagatgaatgtatttaatatatacactccatcttgaagggggctgtcaagattaggaagttaggatgtttgttagttgttagttatgaca

SEQ ID NO: 69186 - DNA, 696 bp, Cannabis sativa
ttttctcaaatttaagctaatataaattgaatttgcgtcttttcttgtgtaagtccatataaattgaattttcattttcttgcggaattgttaaagatactgccgcctacacactacgttcatcaacttgaacatgttatattaaaatgtcttgtcagtttaggccagtctggggaagttagaagactatatcactaatacaataatggactagaatatttgatgtctcgattacctttagctggagcaccttgttgttttcgtattgtttttatctgatattttaagcatcctaatatgtaagatatattatctaatatcataataactatgttattaaactgttttgacatctcatgtatattaaggaattgaatgcaggatgtagaatctttcaatggaacagatgggatgaaactagttggtctatcaccatactggtttgaggttgcagaaggtagtgctgtaaataatactgttgatatgcagtcactatttcttttgactggaccaaatggtgggggtaaatcaagtttacttcgatcaatttgtgctgctgcattgcttggaacatgtggattcatggtgcctgcagagtcagctttaattcctcattttgattcaattatgcttcacatgaaatcttacgatagtccagctgatggaaagagttcatttcaggtatctttacatgct

SEQ ID NO: 69187 - DNA, 1259 bp, Cannabis sativa
atggtggagcctttccctttttatcatcgaagtcagattttccgcccatataacatcaaggagaaacactacacaaactccataatttggttctctaatagccaacgaagaaggaagagccacagaccctgagaagcagaagcttctcatcagtcagcacatgggagaaacacttcaccgccggcgaaatcgttcgcgatatgatcatcgacgtctccgacggtctcgctattccattcaccttggctgctggtttatccggtgccaatgccacatcatccatcatcctcactgccggtatcactgaagttgccgccggcgctatcaactatgggtactatccatttttttcaaatcgattgaattaattaataaattagattcgaatggattgaaatttattgccaaaccgattcattgaacttgttcctgaatttgatgatgatcacattttttcattgcatttttcgattaattaaccaaatgaaaaaagaaagagaaggcgtgtgaattttattgtgatacgattggtgtattggttattgtgctgtgcagatacctacctgatcactatttgattttggttttatccattcttttatattttacaacaaaaaatatttatatctaaaatttttattcattaggtttgattttggactcctgttcagattgtttgattttttttcttgttagattttataacactaaaaaaaattatattccaagatacattttttattttaaaatagattgttcagattttttagtgttttcattaaaatttgttttctaattttgatatttgttgttaaattttaaatttgattttaaaaattcgtacatttgtactttttaattatcaaaacacaagatatcaatttttttaagagaaaactatcagtttgcgaaaaaaaatatcaacactttacacattattttacttataatttcataatcataaattcactattattgtgttaataaatatattttactaacattttttactttaatttttattttttttaaactactattatgtattctacaattatccacctatattaaacattattattttaaaattatatatgacatttaaccaaaaaaaaactaacataaaataaaataatgtatacgtgactttggcacgtaacatttatctagtataaatatattagcaatacataataacaacaaattagagaaatacagttgagaaaatatagagagcttctctctctctctctatctct

SEQ ID NO: 69188 - DNA, 1029 bp, Cannabis sativa
  modified_base (43)..(48): a, c, t, g, unknown or other
caattagaggagaagcttactcagggacaaattcaggtccagnnnnnnaacgatatcctgacgcaggcgctcgggacaccagagcaccctggacgtgtcagggctaatgggtatactagtacttgaaatgttatttatttagttacacaaataaaatcgtagctaatttgcattttatgatttgcaggttcctgaccagggcatctaaattgttcggcaggaagaaaagggaagtctctgatgttgtggctcggcaacagaaggagattgaaaaattaaaagtcgaagtccgatcccttaaacataagagaaacactgccaaacaagaggaagaaggagaggtggctggtgaggcgtatgttccacaaccatacgctcgtgaggatgaggatcaaccacaaacttatgctgagaagtttgtttccctcaatgtgccagctctcctgtacaatttcgatgaccatgcgacccttgatcagcaagtatatctctgttctgacaacatcgacaatattgtggcccaagcgtatttgtacgagcatgttggtaaaatcactgaatggactacgatgattcacatgcctggattttgatttcgaaaatgctgcaagagaatgctgaaatcccaatctcaattgaagggtgcatatatattagggacgtagcaaacatgttccttccttggcctaaacacttaatattaacatccgaggtaacttctcttataaattaattattaatgattagtagagtttaatatcttcaatattcaaccatagtgaagtagtttctgcgaatatatgtgctgtggtgggatggatgaacaaactacttttatatctgtgttatttgtcgttatacaggcatgtttaaaatttttgggggcattcaattacagccattatgttgccaacaattcggtagaatttgaatcaaagttgatgtattatgttttgttttgtttagggtccactcgcttaatcgccttcaagacgtgatgcgtcaaaggagaaagctccgatgctttct

SEQ ID NO: 69189 - DNA, 1630 bp, Cannabis sativa
agggcataaaacccaacactttgggacatcagggctcattttgattagtcgctaggcgacagacttttgtatttgtttagtgaaacttttgtaaatgattttgtaaacggggtcccggaattttatgtgtatgttattttatgtttttaataaaataaacaaaattttaattaatcacaatttttgatatcctcattgattagcaacgagctgcagagtaagttaaaaatcacgctaacacgtctaaaatagttaaggtgttatatctaggcttaaaactcactcctgttcagcctttgcctttcctttacctacacatggaagtagcaactgtgagtcaacaaactcagtaagaaaaacatataacaaataatatattaccaacttgtatctaggcgcccatacacctatcaacaaggctaataagataagtaagaacattctttactaaggtacgaccaatgtatcatatgcactacataccactatcgtacgagtgttggtagggtttgtctcgtacctcgagtaccactaagtgttataccatatacactaagttaccaacccgtactagtgttggtaacaccgcacactactctttaaatatcgtacattgtaccaatgcactcagtactactaccatactagtgttggtagtgtaagaatcaccataagcatgcatatatatcacacatacacataatcacatatataacatgttctacgctattcttaccttgtttccgaattcatgtgattggccaacctaaatggaaaacctcgtggtggatggatgccctagtcacatttacgtaaacgggtaaataacacgccaaaaccttaattcgagaaacccaaactcccttctaagggttttgttgttggtaattgttacaaaaacaccctaattatcaagaaaataaccaactaaggctctgaaaaataaaatgaatcgacaaatcaaacaattcagaaaactggcctctgatatggttaaccggtttgcaccaagtaacccaaataagcttaaaacttgtgcgattcgtgtccaaaccatgccaaaccttccagaacacctgtaccaacctcatatgatgttttccaagcaataacagtaagaaatatacacaaaatttaaacatgccattaatgacccaagtttgagttttcaaactcaaacttgttcattcaccacacgaaaacaccctaaccagctactagaactcaattccaactcaacaagaacttagaaacggattcacaaaccattctaaccctaacaaccaataattctaaaaaaatacataccaaggtcaaacttgcaactcaagaaatcttcaaattaggaggttgatggcttacctcaagttatcactcaatcctccacttagaaaaagctcttgaattctgctaaaatgaagaacctagcagctgaaccctaagttctagcttggttcgaagagagagaaagggaaacagggatgaatttttgtttttctttgattttcttaatttccttctaaaagattaatcccaacatcaatacttatctggataaaagagagatggccagctgcctgttgggttttgtgcccgaaataaaacacattacaatctgattagttatcaa

SEQ ID NO: 69190 - DNA, 564 bp, Cannabis sativa
aggatccttatgcagattgttctgatagatctccatatgcttcttagccagcagatgaacattttgaatattagaataaccttctttattaattcgcttaaaaacctgcttcaaggacttcattttcgacacaacctggtacattttagttccagaaattgattgattccactcatgttcgactagcttcttgaattgcgggtggcttcgccacattttgaaatacttaaaaggcgttttccctgtaacaattgtcgggtaaacacttagtatagcaggggagtggtcaaaaagcccttcatttaggaataatacttcgactttttgaaatagatccatccatgcccaattagccatcactctatttattttggaacaaattctatctcctccttgttgcttattactccaagtaaagaaattacctgtgtattttacatcttcaatttggcaaaaatccacacattgagggaattcagaccctcactctatcaccaattctctcatccttttctagaatatcattaaaatcacccaagattagccaaggatcattcgtcattt

SEQ ID NO: 69191 - DNA, 555 bp, Cannabis sativa
aagaccatttttgtttctttttgtggagacttgatgagaattatgaaattctattttcaaattaattgttaataagtgaagtaattcgtgttttcaacaatatttatttgtttaataagacttaatatttttaaataatgtagttatttaggattcttgaaataaattctaacaaatatatatagtagttaaaaagatttgtatttattatttgtcaaatttaacaacaatattttatatcaaatttagccaatgatacactatttaacaagaattaattttctcaaaaacactaaaatctaacatttcactactattttgacttttattgtacatacacttacatgtggttgtagaactcgaagttggatattttttttaagagttaaagtaagagcattgttatgggatattaatgtgtttatcactattataaagtagtgccttataattaattagtaattttttataataaaataaatagaacccgatattaaattagaaatcataaagttgcttgagtagcatttttagcatttgtgttaaagtaaagga

SEQ ID NO: 69192 - DNA, 643 bp, Cannabis sativa
tattttgactccattatataaacttgattaattagctatttttattagccattattattgggtcaatgtttctaaaattgggtttaagttggattaatgtattacattacttcataatgtatagctatttgcgttcttatgttcatatcttccgaatatgaagatttacctctaaataatattttctattattcattttgtagatatatatattattaaagcttagcttcccatttttgtgtatgtgtcatgctcttaattttgtccacatttagaatttttactttttttttaaaagaaaacgaaaaatttcattaaaagacccaaattaaaatataatttatttttatttaataagcataattttttaagaatataaattagaaaaaaaaaagtgttgtaaaagaaattaggtgtaaataaatttatcctaacataaaagattaaaataactctaaataattatttaatatgcatttagaattgaattgtgcgaattaaattagtttagatattttatgaacactctaaccagggccggtcctgacttttagtgggccattaaaaaaaaattattttggacccttatttagaaaaaagatatggtatttttcaaaatcagtaaaaaaaaatagtataattt

SEQ ID NO: 69193 - DNA, 954 bp, Cannabis sativa
attcagcagtaggagtatttagacctaactgggaaggccactatcaagttatagagataactagtgagggagcctacaagatgggaaggtacaacgagaacatggagcttgttatcctaccatgatgctggaatggagagcacttttgcaaatacaatcagtaaccagcttacaaaacgctattctaaagtagcaattctacctactcaacattagagtacaaaacagctagtacccacaacctttttttcatggtctcccaccgttattcagtggtggcctctactatgcaaggcaatcaagggtagccatttgacatctagaagctaaatctatgtaatgtaagcttgtagattcaatttatgtaagttgcgtagcaacaaagactaattaatgattaaaaaacaatttttatgttctatttattatgtgtaaaccacttgctcacaagattatcttctgaaagttattctttcagttccacatgcatacaatgggtagcatcccaagaaagaacaaggcatggtctgtgaaaattggtggatagcaagtgaccaagaactagactacatggtcactttgggggaacccataccatacaatgcatcaaacaagcataaagaacttatgcaaagaaattttaatgcttagaataagctcttaaagctgcccctaagtcgtacagacatacttcagattgacataataaatctagaccttcacatgtcaaggacataaaaagatagtcatgattaaagaccgcctggtcgatcacacaatccatgataaaaagcaacaaggctaaacaatagtaatgttcaaaaaaaaaaaaaggtgtgtaggccaaagatacgaacatcaaggccctaggattgaaaatgagtagtgttctaaaaaggccacaggccacatggaacatgaaaataagtaatgttctaaaaagtaaaaggccac

SEQ ID NO: 69194 - DNA, 520 bp, Cannabis sativa
gctcttccatggacttcagcctggcaaacaagtcttcaactgcctccttagcctccctcagcttgcgcctcgccttagccgcggcctcatctcgggtcttcagctcctccgccttggctgccagtgcctcctgatgcttcctctctgcctgagcctccctctattgggccttttcccggaacgctttcttctcagtcgccaaatctctcagactctcgatggcctcgtccatgacgtacccatgatcaattaaagtctttgagaggcgaccggtctcctctacagcgatgtggcaaaaaaaaaaagagttaagtataagagatcgtatgtcagagtaaagcacaaaagaaaagaagaaaccattaataaagacttaccacgatcatagcagcgctgatatcctgaacctgatagatcgagttcgtggaagcgcaggctgcgtatcgtttggttggaagttaggtcaggttggagaaaaaatggctcgtcaactcagaggcgaaaggagcaagagtaggac

SEQ ID NO: 69195 - DNA, 834 bp, Cannabis sativa
  modified_base (266)..(271): a, c, t, g, unknown or other
  modified_base (418)..(434): a, c, t, g, unknown or other
  modified_base (687)..(687): a, c, t, g, unknown or other
  modified_base (794)..(798): a, c, t, g, unknown or other
catagggtataattaaattctatacctacgatttttaccaaaaaaccgcctataaatgtcaatttcaaaccaaatgagtattttcgcaccctttagcttctctttttataaaagagataattacaaagacactattttttgtaaaaaaatattacatttttacgtctaaagaattttttttacatttttacagtttttcatagaaataacatgaaaacaacaaggaaactacataaaagtgacatgaaaataacatttaaataacnnnnnnataataacaaaaaataacatacatataacaaaaaatcaacaacaaattaacaagataacaacataaaaagaccgtattttttgtaaataagatcaaaaaaaccgtaaaaatatttaaaattttgtgaaaccgtatttttgtaatttnnnnnnnnnnnnnnnnnatttgtgaaattatcccattaaaatgggttgaaaaaaacaatctctaaaagtccatattgtagtactgagtaaaaactttaacttattttatatataaaaatacatccttttcaaagtgtttggatattattaaaaaaaaaaatctgtgtgagcttataattaagtggaccccacttaggactgaccgtgagttaaaagtgagttagatttgggaataattacataaagcaccattttttgtaaaatatttanatttttacgttcaaataatatttttttaacatttttacggtatttcaactaataacacgaaaacaacataaaatcaataagaaaataacataaaagtaacatgaaannnnnatcaaaataacaacaaaaaaataacaaaaaataaca

SEQ ID NO: 69196 - DNA, 1169 bp, Cannabis sativa
gggcataaaacccaacacaaatatatgtcaaggccgattaaaatcagagggccgcctagggaatttgcaagtcatcattggggtcccacacatagctaaagattcaagtaaagcccgggaaaggtatgcccgaaccttacagcacgagcaaaaagaagtggtcctggccgtcgaagaaaggaaaccaaaaataacacgggtaggggaacccaccataacgttcaatgacgatgatgatgtcaaggttaacttcccgcacaataatccgtttgtcgtggaagtacatatagccagcaaaatagtggcccaaactatgatagataatggagcctccgtaaatatcttgttcaaaacactgtatgaaaaaattggactccaactcaaagatctaaccctttgtcttcaacccgtatacgatttctctggccagagttttcacacctttagggaaaattcgcctacccctcactattgggcaagctccaaagagcataactataatggcaaaattttttgtattgaatgttccatcagcctttaatgtcatgttgggctgaccagccttatatgacctaaaagctgttacatcgatatttccttcgtgacttaagtttgcaacgaagaatggggttgggtgcctgagaggaaatcaagaagttgcacgggattgttacaacctttccttaaccgaggctaaaaatgaagaatcatccagtcgaagtttggacaagggaaagtaaattgccatatagggaaccgcccaaggcggcgacgaagatgtggatccccgacttggggaaacaaatacaaatgttgggctagtggaagaactagaaaagattggaattgacccaaatgttccgaccaggaaactcaaaattggaaaaggtttgctgcacgaagtaaaatcagcattgataaaatttctaagagcagacctggacatttttgcattgtcacgtgcggacatggtcggaattgattgatctataatttcacacgccctgaatattgatcctaatttacgtcccgttcaataaaaaataagactattagataaagaacggcgcctagccttaaaagaagaggtaaaaaagctgcgcaacaacaatttcataattgaatctttctacccggcctgggttgctaaccctgtactagtgcccaag

SEQ ID NO: 69197 - DNA, 569 bp, Cannabis sativa
atagaatttcaaatttccctttttggaaaattaaaaaagtcaaccttatgactttgaccaagacttataaatatcaaatgagtaacaacatcattcttgagggcaacatagcacttttagaggactcgaaaacatcaaccaaccatttgatgtcgggactcacactcaagtgtgcccaaactagggttcatgggcccgcgcaagcattttcacatttgaaacctcaatccgccaaggaaaataatgactttactcatttcagcatgaaatgacttaagacttgagactatgcataaagtcaatatgtcatcaaacccttaaggaacaaggcatatgcgcccactgcaatttgtaaatggcagtgctcttcaattttaaagagcactgccacagggaaatggcaatgcccttcaattttgaagagcactgccacaaaggaatggcagtggtcacttcgtacaaaccatgaaaggaaaattgtccaaatgtgttccgccaacattaagaagtgcaaaacaagtgaaagaaactatttcccacctaggaccaaccctagccgaccactacca

SEQ ID NO: 69198 - DNA, 717 bp, Cannabis sativa
gatgaggatggagaaggaaaccgatctaacacagttcatgatctttgtaatccacttatgatcaaatcccagagaaatcatcattgcttctaagaaattccattcgaccctatcataagccttggacatatctaacttgactgccatttttcttccattcccgaagcaacctttcctcgtacaatgaagactttcaaattcaataatagcattgtcttggataattctaccaccaataaaggcactttgatttgctgaaattacggtattcaagcattgtttcattcggttagcaagaaacttcgaaaccaccttataaaccacattacatagactgatcgggcaaaactcggacatttttgttggcttaggaaccttcggtatgagacaaatcagagtttcatttatagggctgcaatcgacattgttgttcaaaatgtcaagacaagcattaattacctccgtacccacggtatcccaacttttatggaaaaatagacccgagagaccatctttgccaagggccttcaacgggtgaatttggaacatagctgattttacttcgtcacatgtaaaaggctccaacaacctggaattgtcatcagtactcaatcggtttggaacacatctactgagaatctcttgaatagcaactcctctattagctttagtaaaaagctgtttgagcctattcaacaatttccaactatccattct

SEQ ID NO: 69199 - DNA, 624 bp, Cannabis sativa
gccttagagacaaaaagcaacattctgaatgtcatcctatctaattttgaccccaagacaacctcagaatgatgcaatgtttgtatacttagtctacaccattactagatttagggatgtcctgatcatgaacttaaaaaaagctagaattgctaactaagatttgcatgcctgatagttattctgaaatgattaggagtggaccaccctatggtcattaagataagaaaatatttgctttaacagatactacttttctaagaaaatgactaaatctaaaaacaaagtagcgaagtagatgagatactatttgattcaaacccaaagtgttccatcatcttatactatataagatggtcccatagcctctgttgcattgacataagtcatcataactgaagaggacaatacgactgaagtatttagacagaaagtcaaaatactccatcgtagagggagggaatctaagaacccaccttgttatgacttggatgatgctagtggttagcattcattgttagtttaaacaaaaaatggattgtcctaataaggaactaagactcgaagccaagagaactatgcttcaaccattcacatggattaaccaaaactattcaaatataa

SEQ ID NO: 69200 - DNA, 2371 bp, Cannabis sativa
  modified_base (619)..(619): a, c, t, g, unknown or other
atttcttccattgattattctgattctaattacagtttaataaacgtgctattaatgacattccttacaggattggtgagagaagttctccctttcttttcttccttatttaataaagttctccattttctaattttaataatttaagtaaacaaatataagggaatgattaccttactattgattcccataacttattagtaaacatgtcatgaaggtaatgaattttaattattttattttattttttaatattaaatatataatgacaattttgtcctttaaaatatatattacaaaataactaccatataatatagtttaactcaaaaaggtaatttagtcaatttaaggatttcattacgtttcctaataaaataaacaagataaatcacaactattccatttctaaaaaaatttagtaaacaacatattacaaatattgatttcgattatttttcatttattccgtaacatttctccattaatttattctgattctgaatactgtatagtaaacatgccataaaccccaaaacccaattcccattccatttcccggcccattccccgcccaattcccattcccatttgcattcgcattcctattcccattccnattcccattccctggcccattcctattctcattctcattcccattcctcggcccattcccattcccattcgcattcccatttccattcccattcacattcctattcacattctcattcacattcccgctcccatttccatttccattaccatccccatcccctttcccatatccattcccattcccatttcctggcccattcccattcccattcccattcccattcacattcccattcccattcccattcccattccctgacccattcccattccccagcccattcccattcccatttgcaatcgcattcccattctcattcctgttcccattcccactcccatttgtttccgtggcccattcccattcccattcccactcattcccattccccagcccatttccattcccattcccaattccattcccactcattcccattcccatccccattcccattcctattcccattgccattgccattcccattccttagcccattccaattcccatttccattccctagcccatttccattccaattcccaaagcacaaaaccccaaatgccaaaacccaaaaaccccaaaccccaaaccccaattcctattccccggcccattcccattcccattccctagcccattcccattcccatttgcaatcgcatttctatttccattcccattccctggcccattcccattcgcattcgcattcgcattcccattccccggtccattcccattcccattccctgacttattcccattcctattcctattcctattcccattcccattctcattcccctaatagggttttggggttttggcgtttggggttttagggtttggggaatgggaacaggctgggaataggaatgagaatgggaatgggcatgggaattgggaattggaatgggctggggaatgagaatgggctggggaatgggaatgggaatagaaatgagaatggtaatgggccggaaaatgggaatgagaatgtgaatgtgaatgtgaatgggaatacgaatgggaatgggaatgggaatgggaataggaatgggaatgagaatgacaatgcgaatgagaatgggaatcggtcaaggaatggaaatcagaatgcaaatgggaatgggaatggggatgggaatgggccagggaatgggaatgtggatggggatgggaatgggaatggcgatagggatggggatgggaatgggaacgggaataggaatgggaatgggaatgggaatgggccagagaatggtaatgggaataggccagagaatggtaatgggaatgggtcagggaatgagaatggaaataggaatgacaatgggctggggaatgagaatgagaataacaatgtgaatgaaaatgggaatgggaatgggaatggggaaaaaatgggaatgggaatgggctgggatttgggttttgaggttttgggtttggagttcgggatttagggtttagggttggggtttaggggttataggttagggttaaagggtaggggtaggagtaggggtttggggtcagggttcagaattattaataattaataaaattacatacagaaagaaagtgaaaaaaaattaacatttacactttcataaattgttatcagtgttttttaactaatgacacgtgtcatcactaaaagcaacctatgaattatcaagctatgggcccacaattggcctaaattaaaatttatggaggaaattttgttgggttttatgccct

SEQ ID NO: 69201 - DNA, 1082 bp, Cannabis sativa
atttaacaaaacacaaggtccaaaatagtatttacactagtttgtggcttggaattttattaacatcgccccactttttttctttttttttttttctaaaacaatgtgaaatttgcctcaaatatctatttttgtaatataaatattctcatctggcaaactagttactatcttagaggtatcagtgactatattaagtaactagttattaaaagtaaccagtgacaatcattaaagttaccaagtaatgtgccacattaggctaattcaacttttttttttaaaaaaaatagaactctcattaatcaacaataaagatccttactaatttattggtgaacaatacattgttcaattacatccaaagataaatgagaaaaaatttatatggttaatatagattattccttaataccaattttatttaatcagtgaattaataattactttttttaataggaaagaattcaaacttttttttttttatttcccatgcatgacaaaagcatttacattaacaacaacaacatgttgtatgcttgttttcgatatttaaacgtgcatgtattgtttggttaattaaattatacatgatgttaacattataataccccaatttttttatttttttttacaattttgtgtaaaatatcttcttgagatagagattacatgcattttactaaaatgatttttttttatcaatatatgaaaataataaaattacaaataataataaaaccaattactattattataatagtaacttttatttatttaatgatgaaggatatacattacaaattttaattattaaaacaacaacattgagcataattccccttgaattgaaatgtacattttcctccatttttgtagcctttctcaatgcaataggcattgcaatcgaattccttactataacaataatcaatgcaatttgttggcaaatttattgcacttccaaactctgccattcatttacccattatattaataaacattgtagtgttagatatataaatatgaaataaaaaaaaatgacaagatgtgtatatatacagaacattttatgattacta

SEQ ID NO: 69202 - DNA, 586 bp, Cannabis sativa
aaggtgaaggaagttggtgccattgctaagaagggtatggaagaaagtggttcatcatggcaagcattggactctctcatcaatgaagcattgtcctctaagagtaagaatgattttcaatgcatgatgatgcctaattgctgattgtaagtaacatgggaaaatatgaactatatatatatatagatatattatataccatgttctcatgcatgcattatttgtatacagtatatcactatctcagtacttttaaaattatatgaatctaataaacactcacgtcagtgtttctagctttctaactttgattatctaattaaattatgcaatacattatacaacaaatctatttatcaatagaccacacaatattttctttctttcataagtaaattttgatcataaaaaattgtgcgttggtccttcttcatttagattaaaaatattttctaaatgtcaaaatagataagaaatctattaaaaaaacttaaggggtctactcttccataaaaacaatgtttgcttagtttcaactccatctatcagtgaactatgcacatataatagaatcctttcattacct

SEQ ID NO: 69203 - DNA, 1014 bp, Cannabis sativa
tgtaagaaaataaaactgaaacttcaagcctaaattagactatgttctgatcagattttagaaaaagtcaaaacataaaagttctagatctctctttcatctattcggcacatcttgaatcgtccaattccaagcaatatcaagagagttatggccaaaatactatcagtcattgtagcaggaaatttctgaaaaaaaaaagaaagataaaaagatagcgaaaaaaaaaagataaagctgcgatttttatcttgtttaagtttaaattttaaatctttttagtatctttgttagcctatagaaacacattatgattactgtttttagtacgtttccagagcttaaaaaaactcaaaaactcttgattagaagcaatgaaggagtacgaattttggagagcaaaatcaatattgaaggctttctcaccaggttttcagcattcttttcttctctattttcttcttctattccaaattaatatgtgtgaaattactacgatgaacatgagtagctaacagttcattagggtctagatgaatattgtttgactttgattttagggtctagatggatgtacacaagatcaaaatacgttgattaaaagatctctgtactcttatttccttcaccaagtttttaacctagtagattttctaacaaagtttttaataagtcaattattttggacatccaatgagaagtattataaaatattattaatagatattcaaatcaatcatatcaaccatcaccataaatgtttgattgtatttctttttatttcaatgatttttagttttttattctttgagttatatttttgtaaaattaaggattcatcccattaaataaactagttaaaaattatcattcacttctttttctctttttatcatcttcttctttattttatattattcttgttgcccctgattttatccaaaatacgtggaccaaccggatgatgacacgtagattgaaagggtttaacgtttaaataattcagctaagtct

SEQ ID NO: 69204 - DNA, 621 bp, Cannabis sativa
  modified_base (535)..(537): a, c, t, g, unknown or other
caacttaaatcctgggtccgccatgcaattatgattaaagttgatcacttatctctccacagccaccatacttcatatctagtccttgttattattaaatgaccaattatcctttatctaacaactcatcaaatcgcatcaaataaaaaaaaaacaacttcatcaaatcaaataatgtattcactgatatggattaataacccctagccagtagctatataactggggacatattatgacgcgaaacagttgaaccgataatgtgtatccatacaattatattcaagtgcaattgcagtcttacaatttctctattttagagcaactttttttacactacctcgtatattagatttttttattatttttttatattctatcttttaatatattttatttattttaaacatgcaatataaatactcaatatttataattggtgcccctacaatatttatggatgaaaaattatttagtgttaagtgtaaaccactataactacttgcactggcggacccaatgaaggaccagtgtnnncttaagcccatgctgaaaaaaaatatttcttttaattcttaactaaaaaaaatcttttagttattttaattgcccacaacaaat

SEQ ID NO: 69205 - DNA, 873 bp, Cannabis sativa
acacttagagatggtctctaccaaattggttcagcatcagcaagctctcatggtctcaaacgttcccaaaagctgttttctggtgtctctttacagtcttgtagtcagtctagtgtgtctaatgttgttttcctaaaagatacctggcatagacgcctaggtcatctatcttctaatgttttaaatcaagtgttaagatcatctaatgtacctgttgttatcaatgaaaatcacagtttctatgatgctcgccaatttggcaaatcacactttttaccatttcctggatcttctagtcgtgccactaatgtcttagatttaattcacacagacctgtggggtgctgcccctactgcctcacacactaactacaggtattacatatactttttagatgatcacagccgatacacttggctatttccacttaagcaaaaatccgatgccttggctgcctttgttcagtttaaaaatctagttgaaaaccagtttgaaagaaaaattaaacaattgagaacagattggggtggtgagttccaatcgttcactcagttggttcatgaacatggcattttctttcatcactcttgccctcatacctctgaacaaaacagtagggcagagcgtaaacatcgtcacattgtagaaatgggtcttactctccttgctcaagcatccatgccattaaagtattggtcagacgcttttcaaacagcagtgtatttaattaaccgattaccaactcccattctcaaagggaagtcaccttttgaagttctattttcaaaagttcctgactacaagtttctcaaggtgtttggcacatcttgtttcccatgcataagaccatatcaaagccacaagtttcagttt

SEQ ID NO: 69206 - DNA, 589 bp, Cannabis sativa
aaaatattttaccttaataattaagccaatcctatgcttttagatcattaaaccgaaatattttaacgtaataattaaatttataactgggtgggaaaggaaaggataaaggaaacgagaaaagatgacaattctaacttctaaatcagttgaaaggtttagttgaggattaaaatgtagattaatttgattaattgcaagacacaagcaaaggtactctaaataagtacataaaccaataaaccttaatagcatatgaagtgaaccaaaatcaaacctttcttgccacatccatcccgctaaggtcgtcgcgcggatctgaatgatgacaccagttaaaagatcaaacaacataaccttgataacacaattttaagatccaattctttcaaaaaaaaatgagtgacatatagtgaaggtaaataaccaccttgatcctaaactgtaaaattccaaatcgataatcatataaacaagtaaactttaatttctaattcaaattgatgtaaagaattaaaatctttttttccatcattgaggcgatgaaagcatgtgtgagcatttcttgcacacaaagaaacctcgttga

SEQ ID NO: 69207 - DNA, 871 bp, Cannabis sativa
gacggagggtgttgatgtgtgtatgggggatgctcttgctactgtttcaaaaaacatcactttggtgggcttggccgagcgagcacgccagacattatgagtactctaaattagaattgtcgtgggcttgggaacctaggggctattcaattccttaaagatatgatttatcaaaagatcgcccatgtttatttttctctatgagacgttatgtttgaaagctcggctggagcttctagcatcacaacttggatatgagggtcttttttcgattgatgctcaggggacgggtggtttagcaatattatggaaggataaggaggatgctgagatggtcgggtattcacaaaatcatatagatatggtggtaaggcatgatagctctcatatctggcaccttacggggttatatggagaacctaattggtcgttgcggggcaatacttggaatcttatgagggttttgaaggaagaaaatgatctcccgtggtgtgttattggggacttgaataatgttcttggccaagatgataaaaaaggtggtaatccttatcctaattggcttatagatggttttcaacaaactatctctgattgtagtcttgtggatcttgagctgtgggtcatccgtttatttgggagaagagtaggggcacaaacagttggatcgaagtgaggctggatagagcgctagctaccccttcttggttgagtttgtttccgaatgcacggttgattaacatggtcttttccacatcggatcattgtcctctattttaagatccatcatttcagttctagtcagcttctaggagggtgtttcggtttgagaatgcttggctgcattattctaattgttatgctattatcc

SEQ ID NO: 69208 - DNA, 591 bp, Cannabis sativa
gacacgtggacacatcatcatcacagacagaagccagcttttgcagtcaagtggcattttgaaatatcactatttcatttttcaattttcacatgtccaaattaagagagtggtgcaagcttccaccatagacaacattctggaagcttgggggtaaatattatccgtgtttctagcattggacaggtggactccaaattaacattcaagacccaccagtgggaccctcattaaagacaaaatgggtcaagctcatttggaggttaccttcgagaaacttgtcatggttctgcactcgtaaagtcttttgccttcaacaaacctagcccaaaagacatgttcggcctcacgagaccgaagagacaagacaccacgttcccgaaagacccttccaatttcattttatattcctgctcacaaataaagaaacgccagttgtctgataacaacagtgcttcgaatctagattaaaggaaaaacttcgtacaataaatatcatgcaattcactacaacaaatatagttattagaggcagaacaatctgctggtaaaaataaaaagctccgttggtaaaagttattatcgacagag

SEQ ID NO: 69209 - DNA, 2026 bp, Cannabis sativa
  modified_base (181)..(191): a, c, t, g, unknown or other
tcggatatggctgagagtattttagagatattcatggatgatttctctatttacggggactcatttggggtttgtttggagaatttggaaaaggtgttagcaagatgtgaagaaaccaacttggtgctaaattgggagaaatgtcacttcatagttcaagagggtattgttttgggtcacnnnnnnnnnnnaaggggatagaagttgacaaggcaaagctggaagtcattgagaaaaaaactatagctatatcgtcttctccagctccgacctcacgcaattgattcctcttaaacactcgctatcctgatcattgctaaatcatctgcaagttctctgacccaaagttcatctccttcgtttgaaaaatcacagatctaaacgaaaaccaaaaggaccaatcttagatctgaaccaattcaaaattcaaaccatcctcgtttagaccatccaaaattttggggaatccgtcgttgatgaggttcatcgccgaaagggttgtttggccttggagggactttgtaaagtcttcttcttccttctcgcgtcatttccattagttttccccctctgccttgtaagcttaaatggcggatcggagatcccgcttcatcgctaatggaaaacatggccaccatccaaagacccgtcgtccttgtcgttgtctccgattgtggttgaaggcctcatggtagacacagttcaaaggaaaggacaagaagcgaaagatggttaatcatatatgtttgtatatatataggtctagattttttactacagatctaactttaattttgtccaaattttgtggtggatttttaatttttttgacagaaggtaaatattaggttcttgactatggctttgagtatattttttttttattgatttttagggtatttttaatagaaggtagagggcttctatgagcttgggcttcgtccgacgtggtatggtggtggtggtggtcatggcagtgatgtagtggtagtggtggcagtagtgtggttagaagaatgagagtgaagaacatttgaagaaaaatatatggaaaaagagaaatagagttggggaagaagaagaataatgaaaatggaaaaaataaaataaaataagtaatttaatcagttttttaaataatttattttggattttttaaccttaaattgggtaacttgcgaaaattgtcacctatttttttgaagttaggaatttatctacatccaactaatttttcgagaatctataccgcaattttccgttttaatttaaatataacagattgagacattttgtgccataagagaaatgataaatgtaaaagctttcgctccaatgttggcatatttaaaatgcaccgatttgaaaaacactatccgacatatcaaactataattatttttgttttcaagcattcttttgtaactattcatttaagatggtggtgtaggattttgtaaacccaactaaagctattggaatgttatattcctataatttcagcccaatagatatctgccaaaatggagggttaacatcttgtttccttctctttcatgctatatatcagtccaactagatgagaagaatcgacaatgtaaaaattattggcataaaaaaccttagtgatggcaaattcatcagaaggaactgacctaataaggacgacactatatggagggcgtacattatgggcagtagtgaaaagatgacttaccaaaaaacaaatgaaatgaaatgaactgaaccaccatcactcattcatacgccctcccctcgcatgaagataagattattaacgagcttcttacacgtggcatcctcataattgtggttgatgataattattttctatgcatatgctattggtctaatattaacgtaatatcttcatcaaagtaaaccaacggtcaagattagaagaaatccgagcagaaggaattgtgtccataagatgtatgatatgttattggatcattatatatagaggggggtaaggttcccatatgcgcagagcaagggagca

SEQ ID NO: 69210 - DNA, 547 bp, Cannabis sativa
  modified_base (35)..(43): a, c, t, g, unknown or other
ttcctttatatatattgattattattattattatnnnnnnnnntattattattattattatccaaaaatatctatctatctatctaattttaatgtttatggtgtatttagagtgatgatgtgatattttaacaagtgagtaattattgtggttttttctaaattttccaactttttttttttgtaaaatatatatagatatatatcttttttaattattatctgcaattaataattaagtgattgttatctcaaaaaaaaataataattaagtaattgttatatagtatagataaatcatgtaactgttattctcattcatttattactaatgaaacagtaatctgtataaatatttcagttttaaaaatgattaagaggtagaatatttaacaaatataattacacattatttttagaagtttaaaaaatatataattgtacagtttatatattgattgttatacatatatcatgtaactcttattttaatacatatattatcaattcacaataaaattaatacgcatacataatacatatatat

SEQ ID NO: 69211 - DNA, 1023 bp, Cannabis sativa
  modified_base (137)..(139): a, c, t, g, unknown or other
attaaacttttacttctatttgattaaataaaagataggaaaaaacaatgaagtataagaaaaatagttggaagcaacgattcgagaaaaataaaatgttatgttatatgggcacctagatacaagtcggtattatnnnatatgttatatgcttttcttacttgttttactttaataaatattatagaaaatcactaaccaactataaagcgacactttattgtggtgttaggaaccataggtgcctcaatgctctgatgtaagagacccaactcactggggagaacttataaaagaatggtatgcctatacaaatggacccgggctagacggttggggctagatggtcggggatggacgatcagggctaaaatgagaagaataatcaagaagaactgagtaaagaaagaagaagaggaaaaaaacgaaaaaaaaaaaaaaaaatcttttataattttaatgtttattttaaatgaaaaggaaaaaagagttttaaattttattttataatttttctattgatgagtgctaattataacctcgtattacaaccttttagtcaacttctacacccgaaatcacatgtcaaaatatattttttttaattttttttcataacaatattcgttatagttacaatatcatctctgtaaatttttaaaattttttaaatagtttacaatgccgaaaatagagtttctgatattctaatataccacgtgcgttaaaaaaactttaaatgtattttcgatactgtaaattattcaaaaaaatttaaaaaatttcaaaaataatgttctaagtataacgaacactgtcataaaaaaaaaaatttaaaaatattccaacatgtattttcgagcacgaaagttgactaagaggttgtaataggaggtttacaatacactcctcttttcaacttatttttgtgttttaatttttaattatttttataaatttaaataactaaaattacatagaccacttattattgacataacactaattagaagtccttgtgtt

SEQ ID NO: 69212 - DNA, 1401 bp, Cannabis sativa
actctctacctatttcggtataaaaaaatagtctattatataaaaagcagtgttcaaacagttcacacacgtataaaataaaatagttacgaatgcaacagaatatttaaaccttatttttatagtgttaaatttttttaaattttttaaaattttataaaatgtcatataaaaatagataaaaatacattagtacatccttttgtagaatttacttatattatatatataattgtttgaccattagcttcacatgtaattaacaatctatatatatctctacacctaaaattcctccacacccaaaatatatcacataatatcataaaactttctccatttccaaaccccaaacaaccaaaatgaccaaatcaccaaaaatggagatcatggaagatggaagaggagaaggaggttcctaccaaccactaccacacaccggagaagacgattctcgcttaaaccaactcggttacaaacaagaactccgccgcggcctttcgtaattaatttcattaattttctcactctgacattttcacaaacactttccgatctgaaaaagataaacttattttgtgtttttttcgacagggcgatatcgaatttttcggtaacattctcaatcgtatcggttttgactggtcttaacacgacttacagtatgggactcacctatggagggccattaacaatggtgtatggttggccaatagtgggagttatgactttgattgttggttcttccatggctgagatttgctctgcttatccaacttccggtggtctttacttttggagtgctaaactcgccggagcacggtggggaccttttgcttcttggctcactggttggttagtttttctttctttcataattattataaaattaaattaagtgaaagtaaatgattattaattaaatatgttattattttgaaatggagaattaattaattagtggaatgatgagtagttaattagtgttaaagggtagcaataattaaataattatgaaaaattcatgtacctttgtttcggtattcgagagaattcttaatttaatttttgtttatggttgtgtatcttatttaagatattttataaaatttagaaaaatttaacatattgaaaacaagatttcaataatttgttgtgcgtgtgactcttttattttatacacgtgtaaaatataatatatttttttttaaaaaaaaaatagaataacataagatatttgaacattgccttttatattgtaaattatttcaaatttctaaaaattttgctagatatattaaataatcataatataaacaactataaaaagaattagactaatttttttttttctgaactccataaaagataaaaagtgcatcgatgcacacattttagagg

SEQ ID NO: 69213 - DNA, 2545 bp, Cannabis sativa
aagggcatcattaagagatcgacgaagcgatcttttagtggtccaatcacgggagcccgcaggtaagctctgaacccagttaagcttattttcgagttctttaatgactgtgtccatcttgccatattgagttctattccaatgcaaaagagcgaccctagtagcacccaccctcctaaaagcgcgggcaggggccaaagggtggaagactgaattccaggcctggtcaaccaccaagttacttcgattgtctcttgtccacccttcttcaaacttgaaacctcttttaaccttcccttccataccattagtcattaggcataaaggtctatgatctgagttgcacgtctgagaggagcagagaacagttttgggaaacagattgagccaggcagcattaacaattcctttatctagggcagacttcacatggctcctaccagccctgtgattatcccacgtcaactgatcaccctgaatgagcaagttaatcaaacctcgagactcaacgaggctggaaatgaatggtatgaattggtccgtccctgaggaaccttgtcgttccgaatgactcaacacgaaattagtatcccccagaattaaccaagggccgccaaacttatctcccaacttcatgatatccagccaaaattgtttcttcgcatggaaataggggggaccatacacacaggataaaagccagggatgggacggggggtccgagtaaacaattcctgaaatatgatttcgagagcaagcaatacattcaaagctaaaaccatacttccagagcaaaataataccaccagcagttccaacaggcggcacaaagatgttaaagtaaaaatgcattgatttaagtaaacgtaccaggggagccgcgtcaacttttagttcagtgagaaagacaaaatccggagaccgcgctctgataagggactttagttcacgaactgtagaggtctgccctaaccctctacagttccaagcaatacctctcatggctcctgtggaggagagacctcattctcctccataggggtacaaaagtggaccgattcgctagaatcagcatcatcaatcagaaatgagccaatcaacgggttcttcaaaataccttcagggcaaaacaacaaacaggaagtgccctcagaaggatcctccacaccaatcttattcgccttcttattttcctcagtatcccacgggaaatccctgacaactctcgggtgccgacgaataatgttatgtggtctagagcaaagagaggcagaaggctcaaaaaatttctgttttttgaaaggagtagttctctcatttgtttctgacgaaggcttgataccaatgtctcctcccaataatttgatctcatataattcaaaattctcaaactgtttaagctcacgcaacaaagtctcctgagcttgaaagaaagaagtaagagctttcttttcatccaatcccgacatcacatcttggccctcaaccaattccttagaaagaccatcgggtcccaaagcctcaagagacacgtggcccacttgggtgtaattaggaaacccacttatcctattaaaattacctcccatttgaataggcccacggtcaggaatttgttgcccaccaatgatcatcacactccttcttaaatcataatttgagagagtaggccccactgaagtaaaattgttaatgtttgtactctctagcccacaactaatcagcccagtagagacgtgtgaagggccatctccataaacttcaagtgacatcagcccaattctcttttgatttgagcagtttggcccaagcagagaattaatcaacccaataccatttcgcacgtgctgcgtctcgtgcaacgactcgttgaccgcctcaaggaatggagcttgatttgaatttgaattttttgcgtcgttcgaggaaccatcaaatgtcctcctcaaagctatatcaggaaaacaagcatcaccttttccattttcgaatatcacagcctgaactccattaccattaccagaaatcttgggcgcaccaccaccatgttttgacttaggcacccacgctgccgacttcggaattcccagagatgcaggagatcgatgggtcgctttcttgcccattctcgagataccacctacagtggcaaccgtacgactggaacggtcaatcctagtcatcccacctgcattgataatctgggaagggccgattgacggtggctgggaagaaatagctccggtcattgtcgtaggaatcacatcaggggagagcaagtcattctgggtttcgaacagaatcgtcttggtcttacgcgacgctcgctcatgaaccagagccttcttcttcatgaaatagtcggggtaggaagaccccacaatcatccaaaggccgaagaaagggaaggcaatcccatcggcgttcgagatcatgtcaggggaaacctggagcgcatccaacctgaaaatggccaaggcgtccacagtgatagcagaagacaccgatcttctcacatttgaatggtatccactgtttgatgcct

SEQ ID NO: 69214 - DNA, 1069 bp, Cannabis sativa
tgttgtatccaggaggatacccatatatcttgtagcacttctaaattgtgtgtccatgcatattgcaatgcgtacaaaagggcctgccacgtttttgtcctggattcttagaaggttctggttttcccgaacttctttctccttgaaaagcaaaggccatgttggagttcggatccatggtgacactttgtcctcctctttgattttcttcctatgtgactaaatgaaacaccctattaatctcaggtaaaggatccataacaagtatattacctctcacttgtgaatacagatcaaatagacccatgaggaaggacatgatgtattccatgttgtggtgttcttgcaatttctttactcccccacatgtgcatccattacatgtgcaatttggcctgaaattagatagttgttcccacacagttttgagtttggtgaagtacatacttacagtctgagtttcttgcttgagattcatcaaaatctttctgaggttgtaaatatgatcaccatttctttgttggaatctaactctaagatcgttccaaattgctgctgcagactcgtcgtacaagatgctaggggaaatctcctttgaaactgaattgatgatccaagaaatgactattattgttgcgaacccaggcattgtagagaatgtgatcagaaacagaaggtttgggtatggtgccattcaagaaccctaatttgtttttgacagagattgccaattccattgcacgactccaagcaatataattttcctgtccagtgagcaattgggaaacaagaatatttccaaggttgtctccgtgatgcaaataatagggatcggatgggtcttcgataggatttctcgatctcattatctgtccatttattctgacttcaggaacttgaacttggttattgccatggttgaactgagctggtggaccatcttcatgctctgtttcttgattgttagacatggtgcgatcgaaatgtatgaaaacagggatttaaaggagcctcagaaagaaaaaaaaatagaagagcaatagaagtgtcgattgaagagatgaattct

SEQ ID NO: 69215 - DNA, 885 bp, Cannabis sativa
tataataaataattaaatatgattttagtacaaaaaaaaaaatgattatagtattttaatcaaaacagcttttctaaaagttgagttggagtaactttagctttaatttagctgtagcttctctaaaaattcttttaaaagttattttttttactacttattaccaaacacatttttatcacagcttttttaaaaaatagcttttagcttttccaaaagctgtaccaaacgggcccttagtaggttgcctttgaatttttgaagcatcttggttccaatggccaaagcttgatgcctttagactttttagttttcgaaattgcttgttgaatcttaaaagtgtggaactgcaaattctttttcttagatgtcaatattttaaaagtttctttcgtggcgcttgtaaattttggtgagttaatcttacacggagggaccattagcttgttcccgaatcgccatataggaatcgtagagcttaactcccttccacatgtttcctgattagttgccttaagcaaaatgctataacaatttttctatcatttagatttagtgagggaaggggctaagtttttcgcggggaacaagactggacatgtattaatgcttagactgtgcttttcaaatacatactaataaagttggcttagcattacaataggtttttctacaatttgtgataagagctgctggaaacacgagggacttcaggcaaagcttctttttcccactttttgtagaaaacctatcaatacggtcaagaccgaaacaagaatgcaataaatttcaggtgatgttcccttcttagggaaaagactgaaaacatattggttgtgcattactatccttgtttagtagtagggctttatccatttatggtac

SEQ ID NO: 69216 - DNA, 1236 bp, Cannabis sativa
attggcttcgattccttgggcattaacggtaaagcccacaaacttacccaaggcaactctaaaggagcattttaggggattgagtttcatgttgtatttcctaaggattttaaagcattcgtctaggtcatatctatgcctcccagccttcttggatttgatgagcatgttatccacgtatacttcaatattttgtctgatctagtccttgaacattttatttaccaatctttggtatgtagctccgacattcttgagaccaaatgacatgactttataacagtataaacccatatctgttcgaaaacttgtatgttcttggtctggtggatgtatcttaattttattgtacctcgaataggcgtctatgaggtcagtgaagttaatctattctcgaaagtggaaagcagtcttttgtgcacgccttattgaggtcggtgaagtcaatgcatacttaccattttttgttcggcttgggcactagtacagggttagcaacccaggccgggtagaaagattcaattatgaaattgttgttgcgcagcttttctacctcttcttttaaggctaggccccgttctttatctaatagtcttcttttttgttgaatgggccggaaattaggatcaatattcagggcgtgttaaattatagatcgatcgattccgaccatgtccgcacgtgacaatgcaaaaatgtccaggtctgctcttagaaattttatcaatgctgattttacttcaagcagcaaaccttttccaattttgagtttcctggtgggaacatttgggtcaattccaatcttttctagttcatccactagcccaacatttgtatttgtttccctaagtcggggatccacatcttcgcccccgccttgggcggttccctatttggcaatttcctttcccttgtccaaactccgactggatgattcttcctttttagccttggttagggaaaggttgtaacaatcccgtgcaacttcttgatttcctctcagggacccaaccccattcttcgttgcaaacttaagtcacgaaggaaatattgatgtcacatcttttaggtcatataaggctggtcagcccaacatgacattaaaggctgatggaacattcaatacaaaaaaattttccattatagtcatgctctttggagctttcccaacaatgaggggtaggcgaattttccctaaaggtgcgaaaactgtggccagagaaatcgtatacgggt

SEQ ID NO: 69217 - DNA, 1071 bp, Cannabis sativa
acttcccaaactctgagcggtcagtcgtccaatcccaagaataggttccacctgtgggccaagcggtaggcggccagaccttatctattaatttgtcaggaggggttatacctaataactccacctagactagtggttctggccaagtgctcgaccaagcaaattagtcactaagataacctagtgcatctgtatttaatagacttggaatagctcatgatctcagagatgatataaacaaaaaaagagggttagacgaacaatatgttccaccaaccactctgcccggggcccgcgcttaagatccagctcaaagagatcctgacgtgacatcgatcggccaagaggccgaacaagttcatccatccgtgccggcacaattggatgaactgaaaaacatgttccaaggcctggccggttaaaatctcaatgatctcgagttggatcgagcacgtggatcccattttactccagagatcaatgttctagagttgccccacaagttcaagatgccgaccgggaagatgtataccgggagagaagatccaaagatcccttatcacatcacaaatattttgaaatgcaaatagacttacaaggagtatgaggagatgtgtgttgcagagtttttcctgccacactctcagaagctgacaaacaatggtacttcaagttgacactggaaaggtttaactcttggaaggctttctcctctgaattccatgcacaattctcttcttctcgctaactcccattgcatttagaggacctagtcaaagtaaggcaaggggagcctttccgagcttatatcagtagattcatgtcggaggcgacgaaagtggcatggttaatcgaagaagggaaattaagcgcaatactaggggcatcaaagctctcagagaactttggaaggacatcaagagagatggaccaatagattctatgagtgacttcctcaatcgcgtagatgattttatcaagcttgaagaggccatttagcgagcaaaagtcgagcttaaactgagccaatcaccaatcacaagatcactattctggaacatccgctcaaca

SEQ ID NO: 69218 - DNA, 1230 bp, Cannabis sativa
ctgcattgattactctgttttggagatcgtgcagagccaagaagcacctgttacacaaatcagtaattgaagttggccaagtaacttgaccaagccaagagcaaatatgatcaatcatctatttcgagaacaaacaatcaaacattacatggtcatgagattcatccttcagctcacaaacagggcatttgatgtcttgaataggcatgattctattcagcttgtcacgggttagaagttgcaaattaagaagttgctaatagacaaacttgtgttttggaatcataagtctgtcccaaacccagccaacatagtcaattctattctctatcacctgttgattatagaatcttgtagcactaaatttcccaccttcgacagcaaggttcagctgagtttcatttgtagccaccctgagattcagtaatttcttaaaataccagcttgtatcaggttttgagggatagctccagatggattgacctttcaggtagattgagttcacctatttcacccataggttatcttgtttgcttgatatagcccaaagaaacttggccattaaagccttgttccacttctttccttctcgaaaaccaatttcacctaactttttgggaaggcaaactttttcccaagaagctagatgcaatttgcttctgttccccttcttccccataagaagtcccgacaactcttgtctatggcaacagttatcttttgaggaattaaaatgatactcatccagtaattccttataccagagtggatcaattaaggaatcaaaacctccacttgactaatctttgttttgcagatgacctcattttatttagcaaaggcaacttgaaatcagtgagaattgttcaagaagcctttactaaattttgtaatgttacaaggttatctacaaataaagctaagtctcagatcttttttggtagaatcaaagatgaagttaaattgaagattctcgacttggtccaaatagaggagggttcttttcctctaaagtatctaggggtgaatcttcgtcctacaaaatagaaggcttcggactgtggtgtgatccttgataagattagcaattcttttatcgattataaaaatcagtgaaaaattcatattagatcatagtaataatagttattacctgatgtcatttcagaacgaaaaagaaaaaaaaacattttaatggtttatgtatagtgaataggattgaagattagt

SEQ ID NO: 69219 - DNA, 639 bp, Cannabis sativa
ccgttacgaaactccgcttcaaacccttccttctatttataagctttaaaggtgtcgtcttcacaaattttacactcttcttcaaccatcttcagcagttttgtttacttattttctttaaaattgataatttttaatgtattaggagcttctgataatacccattttatttaattggttttgttgctttatgatttttaatttcttatactgtgaatgaattcgttgatgtaaaaatttcaactttctgtgaaaaaaacgaactttatatatgttaaggaattgggtgatatgagatttgtaaagaaaaacaaaaattaattatcaatgttatgtttagttttatgttcaaaagagtacagttgaatgcatttgtgtattctatctatttatatttgtgtaatgctaggtactcagcctacgatttctcgccggagttggtcgacgtcacacaagggggtcgggggtggtcgccggggttggtcgacgtcgcacaagggggtcggagagggcttggagttcggctggaagttctgtaaaaaaagaagaagaaagaagaagaagaaaaaaaaagaaaaggaaaaagtaaaaaaaataattttaattttttttttctaatttttaattttttttaatatt

SEQ ID NO: 69220 - DNA, 1004 bp, Cannabis sativa
gtataggatttggagttttaatgaccaaacagacaacaaaggataggatcaataaaagtatgaggatgcttgaaatgaacttgtgcaaaaaattgtttataaatttctgataagaaaataatcatgaaaattatatcttgtggtatagtgtatcaataattgaagaaagttagtggtaggtaactcaaatcaagtactaagccagttgttggaaatgacttctccaaaataaccaaataatcagtagaagaaaataacaaagcaaacaaatttcacaatgtatggactaggcaaactaacttacaattttgacatggtccactacttgtggaaatgaaaaaaacctactacaaaaatagagtacaacttaagaaaacacaagtgaggaaaaggagcaataacaatgttacaccttttgcatatgaaaacccttcaaaaactttcactagcttaaagctaaatagggtaaaaaagaacatgtacattagttggagcttgaagccaaagacatatgccctttttataaacaaataaacaagtgttttttaaatggtaacattaattcttcagctaaaaagaaaaaaaaaaatattaattgctcctgcaaattctaaaccaacctcgtggagtttcaatgtagcaggaaaataattataaaagaagagaaaaaaataacagtcaaggtatgggaatttttatgtaatattttctacttttatgaaaatatccaagaaagtttttgaaaacaacatagtcgaaaattgttaagaaaaaaaaaaaacatagttgaaaattttatggatcggatctaaaattaagaagaacctcatattggttcaaagtaattatagttgatttataattgtggtgaggttaatttctcgttgttttgtaattgcttttctatttttcgttgagaaaaatatatttttataattttaaactttacaaacgtattttataaataaaaattttaaatcgtaaaattataaataaaacattaa

SEQ ID NO: 69221 - DNA, 628 bp, Cannabis sativa
  modified_base (556)..(569): a, c, t, g, unknown or other
caatcttcttgttttatatagacaatatgtctatttgacccatagattgtccttcttgtagctattgcacacacatgtttaataagtgttgctgtgttttaatccgaaacattcaaaaaaacccaatcctttagctttctttggtttacagagactttctcaagccacacatccagacccgttatgctactttgtcctttccaaaggaaacttcgacaaatattttttcttttagagacaatcctctttggtaatatcaatatctagctccaataagtatggaatgttaggaacattgaattgatcaacataattttaatatttggtatcaaaataatgttgggctttgtgcctaaataaaactctatttcaatgtaatttttttattctattatcaataaagaaatagatttaatttcattacttgtttaatgtgttatttggtgcatgtaatcatttatttatttaaatgatttataaattcatccaaatccttatcacactgttatttggaagcgctaatcatacatgcagaatctatagcttctatctggannnnnnnnnnnnnngatgatttctttcgagcttgacttaatagagataaatgatagagcactcattttagtga

SEQ ID NO: 69222 - DNA, 957 bp, Cannabis sativa
ggtcatcgatgtctaagccgttaagaaatgcaaatggaattccttgtgcttgagtggccacacgagtggccagcccaccttgaggcccaactacgagcaatcccatatatgcatcagcaatgtacagatcaccgctcattctgttgaattttagtcctaagggtcgtccacaactgtgctctgtttgatggtgatcatgtggcccttcacatcttgatctgactccatcaaacaaagtatacataaaagggtaattaaaaagcaagatagaagtattagttataatttcaaccaatcatttccaaactaaaaatcccaatttgttataacaattatagcttttcttttatttgttatcaatcacgtgtgttggaattgttgtgaaagtgaaaccaattagtacgacacttatttatagtatattaactttgttgtacttttccttcagatcggttaaatttgggtagtgggattaaattttggatcaaaaaaattatgacattatagatgtagaaaaataaatgagttattatgacattagattagattaatttccaaaatatcagttggcttaaattatctcaatagttttatagtaaataataccaaataatctacagatggaaaggtaatcgtctccgtattaatttggaaacaaatggatatgtgtgtagaatgtactatggttaaattttaaattttgtgcaaaactagtggctattggatagcttatgtaccaattagtaataactttggtagctataaaagttcagtacttaaaagttatgactggacagttgagtagggaagagatatattttgaagatgaaagaatatgatttgtcattccagttttttttttttttttttttttttttttggggtatttttttttttttttcttcatgttagtcgtaatttaaatattacagctcattgattggctataagcatata

SEQ ID NO: 69223 - DNA, 515 bp, Cannabis sativa
ttctctctgaacttctctctaaaaatcttactatacaattaaatgtctcaagtctcaacttttagttgatcaggttaaaagtctaaatatataaaggtggcaaagagagttgatgagctaaaataaattgtaacataattaacaaattctgttacaaccattgagctgaatcttaagtcttgaacttattaaagggactgttgcaactagcaaatctttaaatgcaataaaaatccaaatagatgagtccatcaaaagctcatagaaatagtgaccaatcctccacacctaataaaataaattcttcataaataattggttattagggtgatgagagttgcaatagcactagactaaatgcattttaccacttgaggctagctcaaatggtcataagtgggtgtgttgagtattgaaggttctgggttcgagtatcagattaaacatgttgtaatatataaacgcttaaataaaaaaaaaatacatttttggtttttcttttcttttcttttttt

SEQ ID NO: 69224 - DNA, 870 bp, Cannabis sativa
ttagagtttggctctagtggaaattttttggggtcccaccttacatttttgccacttgtgaattgaagacatcagcatacaacagttttgattaaatgtagagatatgtgacatatgtctgtgaagttagtgatgaatgcctatttggattttttgttctcttaagcttggaaattcaggatgtggacaacatgggttcctgaacaactttcgtcatgttccaaaaataatgcttgaataatatgagagagaagccaagttgaaactgtttcaatcttcaatggtcactatggatatcaaatacatcatgagtactagaatcaagaatctcttatctactaattaaatcattaaagctgaagaaagccattaaaattgcatatgaataccatcaaaaactggctgcagttcatagccactcatcataacaaaatgacattttttttaatgttatgactgaaaactttcatgctattattttcatttttttaaaccgcctaatctgaataacttgcttaaattaaattgagataagctgacaaaaaatacaaatcgaaaaattcgatgaaaatataatctgtctgatctttatattgggtggattgaaaataatatcaaccccactattcaactcttactaatccaaccaacacaatcaaaagggtttttatgtatatacatatttatatatatatatcatatactttatatgaatttttaaaacatataaagttaaaattaatatgtatcttttatgtgttgaattgaactgtaagtgtaagggttgttcactaagtatccgatccaatccaatctgcacgatccaattcaatccaatctgcaaaatgcggatatccgcaattgtgcgga

SEQ ID NO: 69225 - DNA, 898 bp, Cannabis sativa
  modified_base (46)..(83): a, c, t, g, unknown or other
  modified_base (528)..(533): a, c, t, g, unknown or other
  modified_base (755)..(762): a, c, t, g, unknown or other
atcatgtgaaccatgcaacattgaatgttatttctgatctatattnnnnnnnnnnnnnnnnnnnnnnnnnnnnnnnnnnnnnnagggcataaaacccaacatcaataacttttttaataccatatgacatgaagactctaagttttataagaatgaagaagcaaaaaagaaggaagttttagaggtagatttaatagggaaggagaagatagacgattcttttgggaagaagggtgatgaaagagatgccactaaactagaagaagagatgggatttcaggagatagaagaggtcaaaaaggaaggtgacagttatggaaggaaggtcgggatagctcaggaagaaaagtcgtagttaacggtagatagggtggctccaatgtctacgtttctggtggctcatgaaattaacggtcaagcttctgccctagccgcagagcatttaatgaagttggctgttgaagcaagctttgaggaggatggtgttgggaatattttaccaagatatagatttactaacaagtatgnnnnnntaacatcctaaatatgaatatctttaaaacaatgaaattaaatacataagagtttagaaaaccgtacattagttccagcgaaaaaatatcactccttccgcatagatctctaacccttgttcctttttgtcacagagttttatcaagatatgagcttgaatctcattttctccttcgggttggttaccaatgtcttacccactatgattgagtacttgactnnnnnnnngtgggcatggcactctatcactataggctcgagttaggagtgtaaatgggtcgggtcggatctaatccatctatgatccgacctgatccagatcatgtaaggatctgccccgcgctgccctgctagatcagatact

SEQ ID NO: 69226 - DNA, 1798 bp, Cannabis sativa
agttaaaaacaagcaaatacagaggatttgtaaaatgttatttctcagctcaataaaacagagctgctatgctttgtatttatacacagaatattacacatgagggaaaatatggtcgttagcctttgtacagctgtcagcattttacaaaaaggtacaaggaatattctaacaataaaggtcaccaatgattgataaaatcttcatagggattgctgcaataaccaaaagttgttatgctgatattggatagtcctgtgacacctggtgcccaatttctatttctcaacagcccctctcaaacgaaagggggatgatctgaccccgagtttgcttgtgagaaattggaatcgagaatgtgaaagacccttggtaaggcaatcagctatttgatcatgtgagggaatgtagttgacttccagttgtttctgcagtaccttgtcacgaacataatgcacatctatctcgatgtgctttgttcgagcatgaaaaacggggttcgctgccaaggctcctgcaccagcattgtcacaccaagccactgaagtgttacacagtggaaagttaagttccttgagcaatgattcaatccacgagatttcagcagctagatgagctagagcacgatattcggactccgtgctcgatcttgacacaactgcttgcttctttgaggaccatgacacaagtgtttcacctaggaacacacagtaccctgctacggaccttctgtcatcagggcaacatgcccaatcagcatcggaaaatcctgtgatgttgagcctactgcagcaactaatgtgaagcccaaaattcatggttcctttgagatatctcagaattctttttgcactactccagtgagctgtcgtaggtgatttgagaaattgacttagcttattgacagtataagctatgtctgggcgtgtatggcagaggtactgcaatgctccaattaggcttctatacttggtttgatcatacaggagttctccatcagttgctgaaatcggttttcctgctgtcattggagttgggcatggttttatgttgctcatctcgaatctttccagcaagtcctgaatatatcgaatttgtgtcaaatagagaccagtttggtccctgaatacctctattccaaggaaaaagtgcaacggtcccatgtctttgagagagaacttagtgttgagtcgagtgatgaaaccatttagagtactcgaaatattacctgtgataataatatcatctacgtatattaacaccagtacgatttctttggcagttttgagaaagaacagagacgagtccgcttttgaatgcttgaatccccaactcagtaatgtgtttttcaattggtcaaaccatgctcttggagcttgtttaagtccatacaaagacttgttgagtttgcaaacataatgctcttttcctttttccacgaagccttgtggttgtgtcatatagacatcttcttcaagaatgccatttagaaaggcattgttgatgtcaagttgtttgattttccaacctcttgaaacagcaattgtcaatattattctgatggttgatgctttaataactggactgaaagtttctttgtagtcaactccgggtctttgatgaaagcctttggcgacaagcctggctttgcatctttgatgtgaaccatcagagttaaatttgtgtctgtagacccacttgttcccaataagattgtactcgtctgaaggtagtaccagcacccaagttttcttggcttttaatgctgctatttcagtgcccattgcattgttccaca

SEQ ID NO: 69227 - DNA, 2269 bp, Cannabis sativa
  modified_base (1632)..(1633): a, c, t, g, unknown or other
cctccactaccaaagatatcatactcttccaagtcctctaacgaggcaggcaactcgcttaagtccaaatcatctgcaatcccagctaagagctcctcttcatcatcgggaagcaaatttccaatcgcatgagttttaccatcttctagtaaagcatcatcttcgatattttggtcaagtttctctataccagacgagatatcatcaacagacgtatagctacccccaatatcattcaagttcactgcaagtgtatgcaaatagataagaaaacaactactagacaacaattcaaaagttaaataaacaaaatacattcatacacttaggatgtggaagaacaggtaatgagctcgaaaacaaggtagcatcactcgaggcacgataagcattagttccccaggcaccgcgacccatttctttaggaatgtttcctcctggaatctctgttgggcctacaagacacagtaacaaacattaggacattccagtctaagtttggccaaaagtataatttgttcaagaaatgaaaatgaacctgaagaggaatgatttgtaaagggattcatttatttcggtttgctgattcgaagaggataatcaaaaggaacataaagagttaaatcttcactgtaattaacagaaacaatatacattagagaaaattacacaaagcaacaaaggtttaatccaaactaaataaatatcattcccttcaatagcttatgagcaattacatcatcacattgatatgatactaaatataaagactcaatttttagcatcataagaactaaagattttaaaatattattaaatggtcaaaaaaaagatcaagaactgaattccaataattaaattttactttctacaacataaacccatatcacaatcggcattaaaatcctcactaaagcaaacttttctacaattctgagaaaaaccaaaaaagaaaaagggaacatttttatctgttgtaaaagacagaaattcatttctaaacaaataaaagtcaaacaattgtgatgaatttatatatagctattcagtactaaaatccaacccaaaaaaagtcttttttgttgcaatcatacttgaaaaaagaaaaagaaaaaaatggatatatatatatgaactaaattcacagtcataaaggaaatatatcatatattatattaatatatttatatatatgcttagacaaaaaagacactaaactaaactccaataaacaagaaaagaagaagaaaaagaagaaaagtcaaaactgttctgaggattaacaactgctatacacaaaaagaatacccaaatgctcaaattagttaataagaaaatcattcgaaaatcccaaatcaaagttctctactttttgatcgaagttgccacacccaatcactgaaattagtcagttgaaaaactatgtgtttaagttcacaaaccgatcaaactccataatcgccgaatcataataaataaataaaataaatagaaaaattacctgaaaaaagcagacaaaccctaaaaagcgaaattatcaagagagaagatttgtcactcttattctaccatttacagagagagagagacgtacggaaccgaaattacagggaagagagagagagagagagnnagagagagagagagtgtgtgtgtatgtgtgtcactttctctctcctcttcttctgatttttgtagagagagaaaaagttgatgatgatgatgattggacgaaagaaactctcaaaagagaacagagaatgatttgagagagaaacagaaacagagtttgaagctcttccctttttctcttatatatatatatatctatgtatatgtgtatatgtattatgtatatgcatatatgtatgtatgtatgatcatatgaggtaataatatttaattttggttatatataaatatttaaatttatattttaaaggtaataatagtttttttttttttttataaagtttcattgctattataatcaactatcgtttacaacaacagagaaaataagagatagaatttctcctctccaacaagtgtccacatccaactcaagagcatattttgctaaaccatgagcagcttggttagcatttctcttaacatgagaaacaacaatgccggggaaaaatgaaagaagacaacggacatctaaaattaaatcaaaaaaagcagataaatctacggatgcatgattgattgctgatgaaatacgaagagcatcagtctcaacataatcaattttcagagagagttg

SEQ ID NO: 69228 - DNA, 2415 bp, Cannabis sativa
acgccacacgtgaaacgatgtatggaaattcgccacagatgcaagaaagatgcaagaattggttccttcatcgatgatcgcagccacaagaggaggagctgatccttcttcttccattgagtgaattccggatttggggcacctgtaaccagagtcgccggaggggagacatcaaagaacaagattggatctaaatcatgaccaatcacggttgggacaacttgggacttccaggagatgaagttgttacgatcgagtttaagggtgagggaagcagagagagattttgagaaaggattccaagggttcatagcttgagcagtagcagcggaagtaagagcttgaggatcgaaggttgcagactccattgacgttagtcagaagacgatgataccatgtagaaatggatgagctaaacagagagaaaaagatcaatgaaagaaaacaagccttactcaaacagagtaggcaaagcctttgtttatatcaactgaatattacaaaagagttccaagaagagaacaacagaactaactgaaaaactacttaacagaattagttaataacagaaaatgtaactaactgacaggaggatcaaaaaggttgttaacagaattagaatgggaatagaatggaacaaaatttaaaatgcataaaaaattaattaaaaaaataatttaattttttcaaattttgcattggaatggtctttccttctattttaaaatagaatagtcattctatcagaatggtattccaatggtttgaaatgtaactaaacaaaagaatggaatgaaaattgttttctttccaatacattcaatttcattactaaccaaacgccacctataatgcttaagaatttcatcctcaattgtagaagcgcttcatcaatcatgaatcattaacatcaaacattaaccctccattaatttatattatatataaaaaaaaacaaaaaaaaaactttaaattaaaaattttgctatataattatatttcatacataaagataaagatatgcttacaagttttgtgattttttttaatgaatcagctgattgtatattaaaaaaaattaccacatttacaacctaacaacactcaataaaggcctaatatcaaactttatttacgtgtgcactattagaaaaaatatttacgatcaataagtttagaaaagtattatcaaacaaatacatactatttgtaacaaattaacatctgccatgttattaaaagtctgcacctcataacaattcttactcgttgtcaataatttaataatgaattatttcgttatagaccatttataaaagataataaagaaacaaattttgaatataattaattaatgggatatttgcagcgaaattctcctaacatttataattgttatacatatgaatatgaccctaataaaaaaaaatagtaaaagtatcttattttacaattttgttagaattgtactattttttgactattaagtagtgctaattaaacttattaagtacaagcttaaatatacatatatttctttagcttaattaatatgtggtccaataatatattgccacatatttttcagcaaacatttaatggtcaaaaaaggatatacaactgcaacaaaattgtaagataaaatatttttatctatattcttttattatgatcatatgtataataattataagggtaaatagttgtataagtatccaaagttttaggtttgtaagcggcataaacccaatgattttttttagtgccataagtacccaatgtttataaaactgtaattttcttttagtttcatcagtacagactctgttattgtcttaaacaggacacatataagatgcaaattttagattatttggtctggacaaaaatatgtaatatcaattacttccaaaaatttttttaataaatttaaaacggagcctgtactgacgaaaatagaaaaaaattacagttttacaaacattgagtacttatggcactaaaaaaaatcattaagtttatgccacttacaaactcaaaacattgggtacttataccgctatttaccctaattataaatattaaaagtttcaccacaaatatcccaaaattaattaaataaaccatgaatcacgcataggtaccattacattcaaaattatttcattttaatattatatatatgatgtgatttttcttttgcttaaatatatatcatgtgattcatgattcaattaataattattattattattattttataatattaatcacttttggtgtcaagttaaggcatcttttcttggagatgcctatatatttattaaaataaaaattattgggtactatatgatacgaatttatatcgttgcttataagaagactagcaaaaattacgtgcgaggcacgtatact

SEQ ID NO: 69229 - DNA, 1658 bp, Cannabis sativa
taatccaatggcttaaaaaaatgtaatcatgatggttacaataaaaatgtaaccattgaaacctcttccataatagtattatagtgaggatttgaaattttaaagttatgaggtggtaaacagtttttggtacaaaaataaatatatacataattttttaaaaaaattaaagttgttacgaaaagatagatattttaatttttaattaatattaatttattatagtcattaatatgcttaacaaaaaagtataataaatatgctaaatatatatatgctattatcaaaaaaaaaaaaaaaaagttaaactaccaatagctattccgatatattgtacaaatattatattcaaaataagacataaatatattaacacaaaacacagaaagataaaaaataaaaacttttgtgagagtatattttctagttagaaattaaagtggggagtgcacatgagaataactataaatatatataaaaaatcaaacattttgccttaccccttttaaatttattagcttaatttcgttatttttgaaactatttgattatagtactctatccttgacacaccaaagcaatttacaataataatttttgaggatcaaaaattttgattctatatgtcatctatcatggaagaaaaatatacgatttttatgaacttaagaaaataaaatatattttttggtcatcgagtcgtttttctattctaattcaaaatgtcaatacctatcaaaataaataaataagtatatgtttaaataatactataagatactaaaaaaataaacataaaactaatatataaactttaaaatactcatcataggcaaaagaataaacatgaaactaaaatataattactaatatataaattttaaaatattcatggataaaaatatactcataaatattacaaaatatatgatgatttaaaagtagagatagaagctagagttaatgccacaaaaagattgggaggaaaaaagagcatcaagagagatgattatatatttacataggtttaaaattgtgagtaataaataataaaattattttatggctatagataaattaaatgggagatgattatatatataggtttaggttgagggtggtttatggctaaatttttataaatttgatatatatatttaaaatgattaatcaaaattaaatttataaattatatatttataaatatttatagatatatatttgattaaaattttaaattacaactattatcatctttttgaatattttttttaattaattaattaattaatattaataaatttaataaaaaaattaaaaaaaatgaaaaaattaaggaaagaataggtagaggcttttaaagtgattttagagtgacatgttaccactttatacttctcctttatatatatagatagataataaatttaataaaagtatatgtaactaataaatattttaagaacaaaataatatttttattaacaaatcacccacaccatcctttcaattctccttttaatatcaaataaaagattaaaaattattatttccttcctacataccttcccaaaaagaaatgctaaaaagcacgagtgatgccaagcaccctcatacgtgttaatattgctattggtctaattaagtatcgggtccca

SEQ ID NO: 69230 - DNA, 4663 bp, Cannabis sativa
gttgagaaaccgttagaaaccagctcagaaggagagagttgcagcagagttagttagattgttagcaattagttataaccatttgcattctgttatttccttcagttgcttatttttcttctgtttactctgctataaatacctctgtattgtaactctttccattaatcaatagagagcttccttcattccaaatctccttttccattcttcacttggtatcagattccagtcatccatggcgactcacgcttcttcagcttccaactctgttcctgctcatgtcaccacaaatgcctctggttctcgtctcgttgcctctcccttcacttccacactcaactcgatcgtctctgtcaaactcgatcgagtcaactacatctcttggcgtgcccaactggttccggcgattcgtggctacgatcttcagggatacgtctttggtactactcctccaccacccgaaacagtccaaatcacagatgagaatggcgaacagattctcatccctaatccagaactcacggcatggaatcgcgaagatcagcttctcctcagctggattctttctacgctgactccgccgatcctcagccaagttgttcgttgccgtaccagtcacgaagtttggagagctcttgagacactattttcgtcacgaagcagggcacggatcatggatctgaagaatcaacttcaatcgtttaggaaaggagccttaacgatttcggaatactgcgctcgcatggaaagcatctccgacactctgcttcttgcagatgcttgcgtaccagaagacgatctgatcatgagtatcctcaatggcctcccagctgaatatgatggagtcatcaacagcatccttagtcaaggaaacatgaatgttcaagaagttcagtctctcctgttgagtcaagaaaatagactccatcgctggcacaccactactataatcgaggttcctccttcggccaatcatgctcagatcagtcatcgaggccgtggctccaactcaaataggagtcgtggagctcacagaggccgtggacgcgctcgcggatcttcaaaaggcactggatctaagatcgtttgccagatctgcaccaaaccaggccatagtgctgttgattgttggtatcgtcatgaagaggactctactcctccctctcagccatcaaatggagacaataccaacaccaaggctgccttccttgctacaccagaaactgttatcgatccagcttggtatgcggatactggggctacagatcacatcacagctgatgtcaacaatctcaatcttcacaatgactatcacggttctgagaaactcatggtagctaatggtgagcttcttcctatatctcatactggcactgtattcttgaactcgtcccctcacaatacacctattactttacatgatgttttgtgtgttcctaatatcaagaaaagcttaataagcatttctagacttactgcagataataacatttttgttgaatttcattctaatgtctgctatatcaaggacgaagtgacaggtcagcctctggtggaaggacagcttaaggatgggctctacactctctatcccagtcaagataaccctccctatactaagtcatctaaggttcaatccgtcaactgtgtttcagctactagtcaaagtcgtcaacctagtttgtctcaatgttttagtactgttcgtaccaatttctgtaagtggcaccagcgtttgggtcaccctagtagtaaggttgttactcagttaatccatgtactccctggttgtaatacaaaaatgaataaagctgaattttgttcttcttgtgcctatggtaaaagccatgttcaaccatttaaacttgcagagactaaaactactcaccctctccatcttattcactcggatctatggggtccttcccctattttatccaagtctggctatagatattatgttacattccttgatgactatacccggtacacatggatttttccattacgcaccaaagatgagaccctatctgtgtttcaaaattttcaaaaacaagttgaaaagtatttttgtcagtctattaagttgtttcaaagtgattggggtggggagtataggccgttctctaaacttctcctttctaaaggaatcttacaccgcaaaccatgtccccacatccatcaacaaaatggtagaattgaacgtaaacatcgccatattgtcgaaagtggtcttacacttctcgcacaagccgcaatgccacttcatttttggtgggaggcatttctcacagccacataccttctaaatcgaatgccaacacctgttttgaaaggtaaaagtccctttcaatgtttgttcaattctactcccgactacaccttcttacgagtttttggttgtgcgtgttatcctcacctacggccatataactcacaaaaacttcaatttcgttccacgaaatgcttgtttattgggtatagtcctgaacataaaggctattgttgccttcatccatctggccgaacttacatcacacgtaattgtctctttgatgagaatgagtttccctactcaacactctttcctgagtcaaccaactctagtacagacggtttcgagtataacaatggtttcacctacactccttttgtatatgagtctattgtcaactctagagtcaactctgagcccactccagcagctgctccttccacacaacatcctactccagcagttccccttcagacacagcaatgtcatgataatcatgcttcagcaaggcctataccagctgctataatggcacctataccgactgtaactacttcagattcatctccaacagcagctcattccaatgagtctcttcctactgtttctactgctgtttcgaatgactcaacgcagcctactgctatggccaatgttgtacctgctgctggtgttgtttctggtgctcctacagctgcaacaacagctgctgttccctcccattatcggccagcagctgcttctatccatggtatgcaaactcgtgttaaatctggtattattaagcctcgtgttcttgcagccacaaagcatccatttgttgttaacagaggcaagtctgaacctactagtgtcgctcaagcgttacttgatccgaagtggaactcagctatgaataaggagtttcgggccttagttcgtaatcatacttgggatttggtgcctcccgattctctttacaatgttgttggaaacaaatgggtgttcaaagagaaactcaatgccgatgggactgttcaaagacaaaaagcacgcttagtggccaagggatttcatcaaactccgggtcttgatttttctgagacatatagtcccgtcattaaaccagcaactgtgcgtattttcatcgctgtagctgtccatttcggctgggacattcaacaacttgatgttgataatgcctttctcaatggcatcttaaaagagacggtatatatgacacaacctgaaggttttgttgacccccaatatcctcattatgtttgccacttaaagaaggctctttacggtcttaaacaggcacctcgggcctggtttgaaaggctcaacacctctcttttgcagtggggatttacaccttccaaagctgatgtttctttgttcatttatcacaagaactctcagctaatttttcttcttgtttacgtggacgatatccttgtaactggctcacatctgtctctgatttccaagcttgtggctgacttgaatcatacgtttgctctcaaacaacttggttcacttcattattttttgggcattgaggcttatagagattcaactggcatctatctctctcaatccaagtatgtggctgatcttctcaacaggcttaaactaacaggaaccaagccttgttcgacacctgctgcacctcggcaaaccttgtctcgcagtgagggggaaccaatggatgatcctagtttgtatcgcagtacaatcggtgctcttcaatacttaactctcactagacccgatattgcttatattgtgtctaagcttagccagtttcttcattgtcccactacaacacactggcaagcatgtaagcgggttcttaaatatctaaagggtactgccacacatggagttagcttcaaaagaggatcatctcgaacgctggcactgcaaggtttttccgatgcagattgggctagttgcccagatgacagaaggtccacgggtgcctactgtgtgtatcttggttcaagcttggtatcttggagttctaaaaaacaaacggtggtagcaaggtccagcaccgaatcggaatacagggctcttgcccatgtcacagctgagataatgtggctcaaagctcttattcaagagatgcatataccggttcacaacacaccaattatctggtgtgacaacttgggtgctgcatctttagctgccaacccagtgcaccacgcacgaactaaacacattgaaatagatgtgcattttgttcgtgacatggttctgcagaagctcatagacattcggtatgttccaacacttgagcaaattgctgatgttctgaccaaaggtgtttcagttgctcggtttctcaggttcaaagacaagcttcaagttgttgattccccttttcgcttgagg

SEQ ID NO: 69231 - DNA, 1678 bp, Cannabis sativa
atatctatttatcaaagtatatttactgaaataaaaatttgaagattcaaagttgattcatggaatttaatttcttttcataacagttcattcggtcaaaattaacattgaaactgaaatggcaacaaggtgtccggccaaaaataaatcaaatataactaaaaaagaaaggactgaaagactacagcacttctcgtgtatccaaatggtaactaaatgggtgagtagaccaatatgtactttttttcttcctttcttatgggaccggctaaactcatctctatatatcaattaaaaaaaggtttacttggcattttgaaaacaaagcctttaatttagtagaacgataaaaaaaataaagtaagataaataaatgaaaaataaataaagtaaacgatacctaccccaacattccgaaagagaaaagaaaaacgtcataaaagggtgtattttaagtgttgttttcttgcttcaaatttctcaattttaaatttgagtcatgtatttggcatttaaagtgtgaattaataaatggcaatagtccaaataggttgcattcctcattcaaatgcactaaataaagaaagaaaactttaaagtagtgcttagcggtttcgttattggttggtgccttgtgatgatatcatagactagtcctagtggattatttaatttcattaataaaagaagaaaattatgacaataataagtaatcctctttttttatcattattattattattatttcttttttggttgacttagttttttctggacctaataaatgtgttgattaagagctatttatagcatcaatttggcagtaagattggcggcctccatgtttcaaattagctcttctaaagttaaatttgaagaaaagtagtggcaaaaacatgaaaaggggttaaagttaaattgttatgttattcctttccttttaggcctaagcatattttaatttttataagaaatattggctgttaaattatttgaactacactgttaggagtgtttagtaatgtctttgtttttttgattttttaattacaaaaagaaaataaaatttgtgtttttaatttttgttttaaaaacaaatgtattctataaacacttgagacggtggtccgggtccagaactagaactggggcaaggtttggatcaaagtctaaaatattgattaagaaaaaaaattatttaaaaaaagttgaagttaatatttttttcaaaattttaaaattttgattctcaattataaaataaaaagtaaaaataattttgtaaaacatatttttagaaaatattttcctttttttaattaaaaaaataaaaaaacttattaaagtgttattaaacacacccttaatgaaacttaaccccacaaactatttttatagtagtaaaatcttccaaactcacatatggtctttaccttaatgttaaatttgcaaaggtaagtgctaagctgccaggtctatcattacacaatggtacacattctatgttttgatttgtccacataattttaattatttttatcattataaaattaattaaaattattaagagaaatttagattaataaaaataaataaataaattctttttctttttcctcttcgttctcattctccaacaaactcaaacccattcagcacaacaaaaaaaaaaaaaaaa

SEQ ID NO: 69232 - DNA, 3132 bp, Cannabis sativa
gagtgcatcacagaataatcaagaggaatattgaacaatgagaagaaaacttgttatagacttatgttgtaacttgtttaagagtctcaactttactgtctgcattcttaaacactacttattaatgtttgcattatgattaccaatagagcaaaaaggataagccttacaagatgcttgaaccatttcttcccatcaaggccatctgtgttgaggaaggctctttcagcgagcatcagccgatcatttaatgcccgcttctgcagggtgactagttcactagtactactctcttgctctctcaggatctgcagttgcacaaaaactaatacaataacataacctatatgaaagagaatttccaaggtattaataacaatgataaagaacataatgataatccttcttgtgaagattgacctgcactttaatgtcaatttctttggcttcggcagcaaattcttggattgatgtagttagaggagacaaatatccaatattactgtctaaaaatttgcttaaaacctctgtgtgcccctgcaaaaaattgacatagttcatttatctttttattatatggaaatgaagtttaaaattcagcatttaaactcagatgaagatggcgaaaatcaaagctacacagtaaaaaaccaatatacatgacagttgatctgatctaaaattgctctccaaaactagcagcacgtgagaagagaaaattgtaggcctgtgtataccttcagctgctctgcataagatcgatagttgaatggtagaattgaatcatcagcaaggcgaagggctagaagaccccaaactccagcaactgagacagtttacaatagaggaagtacgataaaaaggcaagtcaagtactaacttgaaaccacgatatacttatggcaagtaaaagcttaccagctacatggcgctggaacaaagggtctccataatttgtcatccactcataagaatcaaaggctgtgtgatatacaggaaaatctgaagaaagaagattaacaagcattgaaaaaattgtacccagaataaaatttttcatggaagtgtttctaagtatgatttattttggtaagtgcgaaaaaccaaaagaagaagccttttcttttcaaaacacctgcaattatactgaaaccccaaatgcaacaccctaaaagccttatacacttgaatacacattaccacgcacttgtaactatccctgtactcgatttgacgtagcaatgtttgtttgcctaccaaaattttaagtctgatatatttacctcttccgtagtataagtctatagatggaattccagcatggtgaacaaatgcagcaaagtccgaatctactcttccaagtctggtaatctgcattacagagtggtatcttaaacactcagaagcatagcacttacaatatgcacatgcaaaaagagaataagtttacttataaaccaagaaaagtatttcctcatttcaagtcagagatgccatagtcaactacttcaaagattaagtaattacttaggacaagttttaaacgacagaattatattatagattataatcagtaatatgtattatcaaatcattatacccatgtcaagtcggcgatgccattgtatgttagcagaaaacgaaaacacttttgtatgttataatgaaaattaaagaccatgtcgaacttacaacattctgattatctctgtctgcccagttttgatataaggtggaaccatcgaaatcaggatccttgacctgaaatcaaattgatagcaattaattacaaaaaagaaccaactaaagagtttcattattatgacttttgattctctatttaccttcttcaagacttcaaggaggagattatctagttgaggagtagccccagcatggaacccaggtccttgaacagcacaatctacattaaggtatgcaacagcattggaccccagatttccaagattttgttcaacccactcagtagatccaatctacacaagattacataaatttgaatcagatcatcagttttccagacaactttaccgctgatgatgaaggtggagaatttacctaccatcccaaactcttctgcatcccaactgcagaggacaatcgttcttcgtggggtccatcccaaatccctcatgcgagcgaatcgacgagcaatgtcgagcaaggctgcagtcccgctgttcggatcaacagctccatatgtccatgcatctctatggttaccaagcaacacataccggtcaggctcttctaatccttttatcacagcaaacacatcatgaattgttgccacctttttctctccctaccaattaaaagacaaagacaattaaattaagtctctaaactgaattaaacattcttataactgattataactgtattttccaaattcaactaacaacacagcaaaaaataaaaaattactcaagccattaaaaactaaaaagtgattttttttatagaacaatagctacaattagcaatatcacatggagaatgaaacgacaaatgccgtcttccgttaagagatttgacttggacctttttatttttttatacaaagaacaaataaatccaaaggacaaaaatgtataccatggagaaaaacacaaaaaaaaaagtcaaagatcctcaataagacttgttcttttctttttccacaaaacgttgactaaaattctcagctgagaagagagtgaaaaactccaacctggtaattgaagtccaccattgtcggaccaggtccaacacgtctgaccttcgatggcaccgacttccattgagccggaaccggagctcctcccagcgaacccaatatggtttccgcggcctcagaagacagaggcatagatggaatcttcgggaaccttctagaaatatcgacgtcgtctactctcaaactctcgccgccattgactccggcccacccggggctcagtgggtccccaacgccactcatcaccgtgcctctctcgaaccctttcctaaaccggtccccaccgccaccttctgtgtacaatagaacggccgccgcaccgtgcgccgccgctttctcaatcaccgcgaatctcgggagattccctctcctcgccaaaactacgcacccgc

SEQ ID NO: 69233 - DNA, 821 bp, Cannabis sativa
ttttataggataaacacatatatagagggtgacttttaacattatatatatgcatgattattcattaattaaattagagagagtgtttccaaatcatgttttaaaaattatatactaattcgagactacactagtattatcatgtattatgtatataatatataatgcgtgtacagcatatattagatcgaaatacggccatgtaatattagctgtatatgagtttcataatcatcacaaacctgtaggacgacaggccaagaaacggtcaagcagctgcaacagatgctgagccttagagaagacttgttcagttttcatctccctaaccggcgtggccctcacgcacacggccaactggttagtgggaaccacagcctgatcataattatcatcatcctcatccatcccaaacacgctcctcctcccccggcggctctgcatccgatactcgagccgctcgtccaggtagagcgcgtaggtcctaacgaaagccgagtaatcccacgaggaagagctcgagctgtcgcgaaaatccgacatgttgaggaagcgcgtgccgcgacgcgttgagaagaatatctcctgctcgtaggctgggtctccatctgagagaaggcggtggatgaggacaagggtcttgagagctacggtccagttcttggtcttgttgaggcggcgggctagggtgttgacgcaggcgctaataaaggcgcgtgagtagcacgtcaggctgaggatctccctgatgtgcttctcctcggggggctgctcgacgtggcgggtggccttcacgatcgccacgtcgaggtcggccagtg

SEQ ID NO: 69234 - DNA, 909 bp, Cannabis sativa
ttaaatctacacatcctcattaataaacaacaatataactaattaaaggcatcatcattcattcagtactggacagtttagataatggatatggccacatgttacatatctcatttgttattattttattcctattttggtatactcaaaatctgaattttaatggatataataaaaattgaagacattcatttgtggtgtaataactgcaactttaatctttgtcgcaacaataattcgatcacatacaatgatcaaattcctctcacctttctttttaccttaagagaaaactcaaatcttttttaatttaataaagcaaaggcacaaatcttaatatataataagctaccatgtgggtaacttgagtttggatttggtagatataatataatgatgatgatcatatgtaagcgacaaatatatagttttgtaatattaattaaccaatgtagtacataattgggtcgggcaacttgaaggtcctaaggcctgtgttttgtgcctaatacaatttttaaaattgttaaatacttttatatcatatttacttgagtaaaagcttgtcccaagtgtggtataactactacaaaagtcagaattcgtgacggtcttaaaaacgttttttttttaggaccgtcgctaaaaaaattaactaactgtttaaagctgtcggaaaaaattaatattcccaacggtttataatagtaattataggaataggcgacggttttgattgtaattcggaaaatatattgggcccttataggcgacagtttaaaaccgtcgagtataaaagcccaataaaaaaattgttacctacttcttaccacatttcccacatgcccacctacttcttttctatttcccacatgcctacctatttcttctccatttcccacaccctaa

SEQ ID NO: 69235 - DNA, 4836 bp, Cannabis sativa
gttattgcttttcctaatatttggggatattttctgtactatagaatattaatttgattcctcttgtcccctgatttctctgtatttaaagggctgttctttcctttactgtatactgaaaaactgagcatttaatagaaatacaaagtctgccttcattctatacttttctttcctttttaattttatccttttctttcctttttaacttggtatcagagcggatttgacgcttgtctatggctactcctggcgattcttcatccaccacagtcggcaatgaagctgctcaaaatgctcctcatgtttcagtccaaaatgtcccagttgcagcaacctctatccctacctttcaaagccttaccccactgtccataaaactcgaccgtggcaactattccttctggaaatctcaactcattcctgctctacgtgctcacgatctggaaggatatgctcttggctcaaaagtctgtccaccacagtttgtggacaatactgtcggaggtccaataccaggagaacctcgacaactcaatcttggttatgcaatctggagacgagtagatcaagcaatcatgagttggatgttaaactccatctctgagaccatgttcggtcatgtcgttagatgcacaacatctttcgaagtctggaatacccttgaaaaactcttcaccactcagtccaaagctagaatcctccaactacggtttcagctacaatctctaaagaaaggaaatctttctattcatgattatgttttaaaaatgactggtttagctgagaatctttcctctgcaggtcaactaatctctgataatgatttgatactctacatccttggaggacttggacatgactatgatcctgtagtcataaatctcacatccaggcctgactacccatcactgcaggaggttcagtttctccttcaaagtcaagaaatgcgactggaacaactcaatgctcctatcctaaacgatgttaatcccccaagcgcaaactttgctgctcaaaatcgcaggcctcctaattttggtggttcaactggtcccaataccaatcaaggtcgtggctattcccctcgtggtcgtgcccgtggtcgaggcggtagaggcaacaatcgtcctgtctgccaactttgtaaccgtgttggtcatgttgtctccaaatgctaccacaggttcgacattcactttcaggctcctacaccaggttccaaccagtctaacccaaaccagcaagcatcaggacaaggtcaacatgccttttactcctcttccattgatgctcaacaagacaatgcatggtacatagacagtggagcaaccaatcacatcaccccagatggtcaaaacctgaaacacaaaactgaacacaaaggtaacacgcaactgctgataggtaatgggcagcctcttcttatcactgaaattggccatcatgttttaaatctgcctaaatctagtctgttactaaataatatcttttgtgttcctcaaatgaccaaaaatctcttgtctatatctcaattgactcatgataatgctgtgtatattgaattttattctgattattgtgttattaaggatctggtcacgaagagggaactagctcggggagtgcttaatcatggtctttatcaactttggctacctaagtcttcatctgtttcttccaatccaccacaaaatcagtaccagtgtctttcagtttcaaagaagagtcttaactcagttgtgtcaaagaacagtcctagcttagtttccttttgtaagagtcagtcaaaagagtctgcttatacagctgctcaatctttgttaactcagtctgctaacaccaaagaccaaaatgtttggcatatgagacttggacatccaagcttaagtgtaatgaaaaatatgttaattaatgaaaaagtttcttttagcactctaccaacattctgtgatgcttgtcatattggtaaatctaagcacaaacactatcgttcatcaccaaaaacagccagccaacctcttgaaataattcattctgatgtttggggtccctcaccaattttatccaaagatggttttaggtactatgttcatttcatagatgaatattctaattttacatggatttatcctctaaaacttaaagcagatgtcaaagaaacattcatacattttcacaaatttgttgagaggaaatttgattgtaaaattaaaactcttcactcggattggggaggtgaatatcgcagtcttgtgcctttcttaaactccttagggattcatttcagtcatccatgtcctcatacacaccctcaaaatggtaaatccgaaagaaaacatcgtcatatagttgaaatggggctcacacttcttaatcaagcttccatgccattgcactactggtgggaagcattccacactgctgcctttctcattaatcatctcacaacacccacactcaacaataaatcccccactgaagtccttttcaaagttcaaccaaaacttgattttcttaaagtttttggttgcgctacatttccccacttgcgtgcctataatcaacataagttggattttagatccaccaaatgtgtcttcattggttatagtcccaatcacaagggatacaaatgcttgcacccctcaggtcgtgtctatattgtgcaaagtgtaacatttaatgaaaatgattttccctttgctgctggttttcaagtgtcaaattttaaaaattctgagataaatgtttgctctaactctattcaatacagccagtggtttccttctatgtcacatctcttgcaggaaaatgaagacacaggtaccactagagttgacactgatcatgattcagcacctcccacgttatctccttcaacaccagcgtctctttctggctcttcaaatcataataatcagaatgccattcaaacctcagcaacatcatactctacactgcctcttgaaattaatcatcttgtctctatttcaccatccaaagcctcctccaccagtccaccacataacacacctccatttcatcctcccaaacaacctggtcactccatgattactaggtccaaagctagaatttttaaaccaaaattatatcttgcagccactacttcatccagccacttcaccataccagaatcacttgaacaagctctcaaatcacctcattggaatgctgccatgaatcatgaatactttgctctccaaaagaacaacacatggaagcttgttccccgtcaatcctacatgcacattgttgataataaatgggtttaccgcatcaaatacaactccgatggttctgtcaactgttttaaagctcgcctagttgctaaaggatttcaacaacagcctggtatagactgttttgaaacctttagtcctgtggtgaaaccatctacaattcgtgttgttctctctcttgctgttacatttggttgggacatccaacaaatcgacatcaacaatgcttttttgaatggcacccttgacgaagaagtttttatggaacaacctgccggcttcattgatccaaaccagcctaccgctgtctgcaagctcaacaaggctctctatggccttaaacaagctccacgtgcttggttcgacaaattaaaaggctctctccttgctctcggtttcaaaaactccacagttgattcttctcttttcttctacaacaacaatgatgccttactgttttttctcgtctatgttgacgacattctcctcactggaaatcacgcttcacaggttgctgccctcattacaaagttataagaccagttcgctctaaaaactctcggctccgtagcatatttcctttgctttgagatcagtagggggcctggtactcttcacttatctcaaaccaaatacacaattgatcttctacaaaaaaccaatatgctaaatgccaaatcatgtcctactcctatgaaccaaagcaacaagttaagcttgcaagatagtgctgagtttgaacatccttctatttatcgaagtgtcataggagctcttcaatatcttactctcagtcgacccgacatagcctactcggtcaacaaactaagccaatttcttcaagcgcccactcaaaaccattggagtgcttgtaagaaaattttgagatatcttgctggttccattggagaaggaatttcatttactcaagctccaaaacttgtaatcgaaggattttgtgactctgattgggcaagttctttggatgatagaaagtcaacaaccggctactgtatatattttggcaacaatttggtaagttggtgctcccgaaagcaaaatacagtagctcgctccagtactgaagccgagtacagagctcttgctcaggcctgcactgatgtcgtgtggctgcagtctcttctcgctgaaattgggtttaattgtactgaaacagctgttctctggtgcgataattcaggtgcacgacaactcgcatccaatcctgtttttcattccagaacaaagcacatcgaaatcgatgtgcattacattcgtgaaaaggtgttgaacaaggaagtagaagtgagatatatacctacccaagaacaagttgctgacatactaaccaagtctctcagcatctctcaatatcactaccttaaaaacaagttggctgtctcacactctccacagcacaacttgagggagcgtgttgaaaatgaaaatgaaaatatatccacatcagaagatatttttcattccagcaaaagataaggattacatccttgtgacagctagcacagaaaaggaatatcagtacaaaaccgttattgcttttcctaatatttgg

SEQ ID NO: 69236 - DNA, 2200 bp, Cannabis sativa
atcttcataataaataaatatgaatggcatccgagcgacctctcagtgtgactatgtacgtacgtatgaataggagctataattccaagctcattctcattttcagaactatgctcgttttttgttaccacgctttatctggagagcagctctaacaacacctccccttgtaatgattccaaccttttggaaatttaacatgaaatcagaaaccaaatcagagatgataattggtcaatgcaatgcttccaacaattacagatatgatagtaagaagaaaaagatacacttaccagccggccatcaccatctacaacgggcaatcgacgatattttgtttcgagtagcaacctgagaaatgaaacaaacaaaatgatttgaatgacttattgtcaaagataagatgaactttcattcacatgatctgaatagaaagtcattggtggtaactgttgactgttgaaaagctagaaagaatgttagacattaacaaataacttctaaacaaaagcacaacatagacacaaaaacaaaaggctacaacttagaaagtaggaaatcagaaaagacttctcaaatctactaaatagttaataaggaaaaccattaccttgcagcatcttcaaggttggtcgtttcatgaacaacgagtggagcagaagtcatcaagtcaccaacaactttcccattagtcttgctaagcagcccttgtagctccttgaacgtctgccaaatgatccagaattagaatgtgatgactcgacaagacttaacatattgttatccttttcctaacttaagcatctatctagttaagatttttggtcattttacagtttgataaaaggtattgttcatccttgaaatggaaatcgttatatgcctaattgtaagtcctcgacttaatcagtcgtaggatagggcaagttttggtattatgaagaaaaaacgagtaatgatgtgttcacagacaaacttgatacatatttagcaaaacaaattcaaccaaatatattcatttaagatatatgcacatattattactcaatttacatatataaaaacattaaagacaaggaaattttcaaataattggaaacttgaactgccttggaccgacagtttttgtcaacaaattatttagtaaaagcatgtttggtacggggcattatattgcatgtactgtatggtattttattaattaaattgtattatttggcatacttttatataataatatacactactataatttggcatgccaaagtgtttttcagcttaatcaaattggcccttacaatctcatcttatcatgctatgccaagaaagtaaactcaatcaatcctcatgatgttatctctgtgactgatatacttcaactgcttgaaaatttcattttattttaagttttggtgggtggttttgaaaagcaacctcatatggtttcttaataacttatttccttgcaaaattgaaaaattgaagtgccggttataaaatgaatgtaaacagtgaaaaggagcagctaacttactttccaagaactatcaacattggggaacagcgaattcgtgtcacaattacaaccacctaaataaaaagtataagaaaataaaatcacaatgagtttcataactgagaacatagctccacacaacataaaaagagcatatatagagtagcaacatggatatggaatcaactcgaaccatgcttattataacacattaaacagcttcccgattattattttcttcattacctgatatggaatctagtgctaataagtcataatccgaaacaacaccgacctgaatttaaaacaaagccacaatttaatgcactcattcaagcaaatgaagaaatacacaaataaaaattgactgtattatctaataataaatacgagtagattgttatcatatcaatcagcccagatcaaacaatggctgaatagtcaaatttgagcatgtgagtcataaatataacccattctagatctctccaccattttctaaaactactaatgattcacaagaatgtaatggaaccataaagtcaagcacttctttttccaactctgtttctagaccattggtattatgtggagcatattacagcaataaaaaataatttgaaaaataatctctcccaattatttgaaattaagtaaaagttaccagtttccaatcatcgtcaa

SEQ ID NO: 69237 - DNA, 1147 bp, Cannabis sativa
tatttgggtgggacctctctaataaatattacatccctactcgttttgttgtcatttttgacttttccatactctttataaacatcttatattattaacaaaatttatttttgcaccagtaaaatcaaaaatataaaaatgacgaatgaaaatgtacaataatcgaagtcatacacaaaagcctaaatatttacttaatttaaaactcttatagcttacttcatagaatatcaataactctctcatatctgatgtaagtgttgtgttggaccccatatatgtaaagtacaaatataaacaattaatagatcaagaatagtccaacagaatcaactacatgacagactaaaatgccaaagttaagagaccttaggcttcaacaatttcttatttttcaacccaatataaatgacgaagctgttaatgctcttgtaatgcttcatctttgagactttgatgcatgtatacaattataaacaaagtatatgcatatgcatatacaaaaagaacttagaaaaatatctacattgccctgtggtgtgtgatggttatctacatcacattcaatttaaaatcattgaagagagtctaatattcattttataaagtgttttacatgcattttataaactactttagatttatgttttaattgataatattcattttagaattatgtttgttttctatttattttcaaatttaaatggtaaaattcataatgtgaattaaaaatgagaaaagacatgttaaatgagatgaatatgatgaattatcatggaatttggagttctaagatataagtggtgaaaaattctaagtttgatgctcaacacgctttgtttgtgattgaaaattaagtctgaagttcaagcaaattttcgactttgatgcattcactttgaggaaaaatgttgttaataaaagctctagacctctctttactttaatttgaatcgtccaattccgagtaatattgaaagagttatgaccaaaatagtatcagtcctcgcaccaggaagctcgctaccaaaagtgcttcaagcgtcgcggcactacaaggtagtgttgcggcccacatattctaaactaccaaaaaattaagtttttttttaatcttttattttttgctatataaaggctattt

SEQ ID NO: 69238 - DNA, 903 bp, Cannabis sativa
  modified_base (836)..(836): a, c, t, g, unknown or other
gagagagagagagagaaggaagagtattgttgtcatgttggggtttttttcatgggtatgaagcatcaaatttttctgttataattggaatttggatcatagtcatagcaacattgcatttgcatgtgatttgtaatacactcacgttgttagctagctcagctatcctatatgtacgttaaataaatatatattattattactgattaaaatatacaacatatatataaaaaatgtgattctatttaaggcttaattagctaagtttaattaattatccacaaaacgtgatctctgccctaagtagcttgttaatgaagtaataaaagaagaaagagagtagggcatattttgttcccatccccaattattgtcggcacaacacttattaacccattaatatacacacagtcggtgaggcccttttttgactgtaaaatgttttaaaaagaaggtataaaattgataaagacaagtgttaattaatcatttaacttgaattcttctttcttttactaatataactaaaaatgtgttcagatctgattttatttcattcatttattttttgtgaaaaggtttaatttctttactttattctttaaaagggaaatactattttggaccttgtattttgcaaaagttactaattgaattttttgttttattaaataacaaaaaagacgatgtattttccaaaatggtaaaaataagaccatgagcttaatttttgataactttttttttaatataaccaacttgaagacaattcctaacacaaacagatacagaaaatgtcaacagtttatcataacacctttagatcggattattantaaattttattttgacaaaaattagttcagtgtcttatttgtatcattttaaaaaatacaaggtcca

SEQ ID NO: 69239 - DNA, 630 bp, Cannabis sativa
aaaaaaaataaactagcaattttctctatctagaaaaatattttttagaacacagacatcaaatcaaacagcacttgataaattatgaagcctaaagacaagagagtagaccggaaaaagattatgaagatcaagtactctattcctttcattattgggaaaaagtcgcctaactattggagtttgggccagaatagtttggtggtgtgtatatgttggtatataataaatacatgccagaaatcaatatagaaatgcagattgtaagaaccactattttctgtagtgacaaattatgtctagttgcattctagttgtgtttgggattcgtagtgttttgtctggagttcgtactattagtgttagtccacgtcagcaaagatattttgggttttaattgttcagatggtaacaaatgtctttttcgggttttttggtttagctgggtttaaatacaacttctgggtattatgttgaggaacctttttgattggagattacggattacatttctttcttcttgtttcgtctatatgttccatggcaggtgatctttgagcttggaggtattaatccaaagttgcagatcagattttgagttcagaatgaagggattttagtattatcttt

SEQ ID NO: 69240 - DNA, 809 bp, Cannabis sativa
aaatctcttcactttccttccatctccaacatagcctcttcaaacatcagcagcttagttagcatttgaggaagtgtttagcattatcaacaccaagcatacaaaatcctattgatataagaagagaagagaaaaaagatatcataaaaagtttgcaagtgaagaaatatgttgttgtactaaactaaatctcatgtttatatgtagtagtcattgatagagtatgcaagagagaaatgtgaagtgaatggtgtataagatttcacacatggtactctataattttaatactaaactgaatctatatgtccaacttggtctagtcataagacaatgaataaaattatctctattctcatttctttaacagagataaaagttactatagctaatataataccaaaagtgatagatagaagttatacactatatattataattaaaagtgataaccacactcaatagctgataaatgagatttcacaaattctaaattctgctcatccgttctgtaatgcatttatctcattgtagcgcgtgaggatagtcaatcttgaacgataaaataaaaaatagaaaacaataatcttgtattgaatgtatttaaaataacaacgtatcaaaagaatcattcatgtttacctgagtctttaagaaacttgcgggatttaacttggtcgtaaaactttaggcatacttcataacgaatatcaacattgtatgccattagattcgacacttgtactcggtgattttagacttgaatgagaactaacatcaagcactgaatactacacataataaaaaaa

SEQ ID NO: 69241 - DNA, 902 bp, Cannabis sativa
gttttggatatgaatttactaaattacccctaagaaattcgttttggtgaggtttggggtgtaggttaaaatagtcattgtgtgtacagggtgtacaaacgtgtggtggcggacacgtatgaaattaaatggatatatgtggggaccatattcccctttaaacgacggcggtggttggctttgtcgtccacgtggcagcagatccggtgggtagcttgtcacaccagctttgtgcggccgacacgtagacttttgaagtggatgactgagggaaatatttgggtggagccgattccaattttattctattactaattttatttttatttttaatagaaaaaaaatcattatctgtgttaagaaaattctagtggcatcaaaaaatgaatgaatatatcacactttagtcctacttttaatttttagatagttttaatattgttttttttttgaaaaaaatagttttaatattgatttttttttttaattatgtgagtgttttgtttttaataaaaaataaaattttatggttataagtataatttaatagtgctatattttttctcgtaaaaagaaggtctaagttcgaatcctcctttcccaaagttataaaaaaataaaagaagactttattaatttaactcaaaataaatagacatcttagtaaaaatatgatatggaggaaaataagaagcacttactcaaaaataaaccaccaccttattaatatatcgtttaacaaaaacataataaaatattttcaaggaatgacactctctaatcacacatccaaaataagaatgggtaaatattattttagactttgtattttacaaaagttaccgattggactctgtgttttgttaaatgataaaattgactatatattttccaaaatagta

SEQ ID NO: 69242 - DNA, 703 bp, Cannabis sativa
tatatcatcgaatatggattgtgctagtattgttactgttgcatattgtagtttaggtgttttattaaatgactcaaagaaaaaactatagctgatttttcataattgtgtcttcttatatgcttctcatgtttattttattctttttgttaaatttaatatgaatttgggattttaatattgttgcagccagagatagaggcaccaacgtagatataatggattacttttgacaatggaatttttatgtactaaattgttctatatattgtatgttcatgagaattgaattttggtaaagggattttgtgtgttgtccaagtgtgaatgaatgaatgagtgattagtgattagggattttgataaagggattttgtgtgttgtccaagtgtgaatgaatgagtgattagggaattggaaaatgccaacttgttatgattgtgcttttgttatatcaaaattgatttagatatatggtctttatggtgtggatatattgtaacaattactatgtcaatataaatagtattaaataatcttttagatgttgtgtcattgaaaatcagtttttagcatttggtaaacataactaattataaatatgacatccatttgagatttgtatatttagtgaaatttgaaccctattggaatggattttctattcttttattcttcggtttagtgatggagtaaacattga

SEQ ID NO: 69243 - DNA, 2215 bp, Cannabis sativa
  modified_base (854)..(854): a, c, t, g, unknown or other
ttttttttttttttttttccctcacaagtgcatacttcatcattcttttgctaatttcaagttcaactagttagtatatgacataagaatgattgatgactagtcttcaaaatgactttgttttctccaattttttagcggaattgttttttcaaatgtagatcgagacatatttcattatctacaatgatcattcaagatggttcactttttgtgcacagagattatataaatatatatatccacctaaatttgatagattcttatacttcaatattcaattttttttttagtattaaataatcaaacttgattttttttttcacgcctaaactaaccaagttgctcctaacaaaagaaaaaaaaaaaaagaaaagaaaaaaaattaacctatacagttagaaatttgaaacaaaattgattttaaatgatgaaaaataactaaaattacataatatatgagtatatataaatatataatgaaccttaattagtgatttcaaaaccattgtgagaaatgctaaatggcatttttagtgtctaacacttattgatgcaactcaatatcgagtcctacttgttttactttaataaacattatagaaaataattatgcaattataggaccacacttcatcgtggtgctacgcaccatgattcctcgtaacaatgttccttaactgttaataaatttaaagtatcatcaatttacctccattaaatgttaacatgaactttttatgtgtacataagtatacacatgacatgtttctattggttaaaacaacatatttgtttaaaatagtagaaaattattataaacttcaattttttttttctatttcttttttttnttttttggttttttttttcttcttcttcttctccaaagccctaattaggtctctacccacaaacaccatctcagaccaccactgcccaaccatgacgccaatctctgatactttatttgtcgggtttcatgccctaattaaaacctaatttaacttaatattatttttaatcagtaaagttcaaattttttttttgactttattaatcgcttcattcacgtgattattttgattatatgtttaatatataaattttattaaatctagaatatatagttttacataattatagtgacgtcatcatagtagaaaataattaatatattttttttgaatatttaagtctcattatttatcagtgtactaaacttacactaacgtaatagttatcaataatgtttatttacactttagtaagtggtatgtcttttcgaaagtattagcaaaataaactagaagttggatgtatatggtttactcgggaagggactgatataggaaagtagaatatttaccataatcttaccgttataactattcttagaagtttatcatagattaatttgatatgaattctaagatgattaagctttaagctaattctgctatttgagttttttgattttttcattacaagcttaccgtaaagtctagccaatacttgcattttgtgaactctgtagtgtaattgagtgggagtgttaataattaaaattaatatttacaacttctatttgctacaagaaaaaccgtttactgttcttttagccaaccaatacggagtcataatatatgagattttgaaccaaaaatcttaataaatgcaagtaaaagacaccaaaatttaaagaggtttggcccaattgttggtaataacttacttcccttatgttttattgatcttggttgcaagtcaagaataagatcttaaatgcatgaaataaaagtgcagagtttttgcttatgaacaatgaatgatgatccacttctaaagtcatgtatgatcccttatgtaggcaaaagggttttgtgcgtctctcttcaggagacacgacctagggtttactgaaccctaaccgcatgttgaaacatctcaatcgttcccttaatttttgatattggttgaggtcaaattcttatggtgatattttgctatttttgagagtttataaccacctttaagctttggacatgagtggatatttgcctgttacacataaggagagatggggccgatcctaaaatttagtgtgttgtaagaaaagaattatttttgggctctcatttaaaaaaatagtatttttaaaatcagtaaaaaaaattatgtgttgtcgagcaaattttgacaacaccagttttgt

SEQ ID NO: 69244 - DNA, 2463 bp, Cannabis sativa
  modified_base (2390)..(2400): a, c, t, g, unknown or other
gtatccaaatgggggttcagtgtaggcacaaacgcaggattctcatggccaaagccaagtcggccaccatcgcctttgccccacatccaaagcttgccatccacaaccaacgacgagtggaagagcccacacgaaatgcccacctccatcagattcctgctctcttcgttaactggtaccgataatcggcccggggagggggagagagaaaaagatgaggagggaacaagaaggttagctacaggagttgggtagagacgtatttcctcgatgccgccgccgagctgaccggaggctcctctgccccacgaaagaatttgaaggtgtgtggtggcagtggtgacggcgtcgttttggtgttcgatggtttcgggtttgtagagttgtgggactttgcgattgctggtagtggtagagaatggagaagagatgcggcgagtgaggaagcggcttgaagagagctgacgtcggagatacgacatcgtatgactgttgcagtttcagattcaagcgggtgtttatatttgaaggcggcggcgctgttcacgggaatatgaaaatctctccttcttcccaccgaaaacaaaaacgtaatttccgcttctggccctcaacttatgataaatgcaattttgtctatggattttgaaattttgacccatcagttctatttgtaaatccctaaatcaaagtgtaatttttatccatttgtcaaaactctattatgaaattaaatctgttttaggtattagtagtacttagtacctctacacatattgtcttgcaattggttaataatacttttttaaaagttattacatttaactatataagacttaatacttagttagactaatgataatattgacacataagagagtgctagacaacactggtatctttcattatttctcatttattttagtagcaatgaacaaatttatttagaagaaataataatgtcatacaactaaaaatactgagaatccctaacaaaagatgggatctcatctaactaaacaagttctctatccacctaaagagcatgccgaattaatctatctgcaacctcgtttaagggcggatccacacagaggccagggacagttgccccttaaaaaaatctcctaaaatttagagaatgtttcttacaaattaagtgtaataataaattttgactcaaacattgactctctcttcttgtcttttagctagggtattgatgttggctttggtcgcgccctgatcaagaggaatttttcctaatggcttagtatgtgcgagagggagtgattactgatggaggatggactcatggaaaactttattcggctacgacgacactcttgtatctagccctttaggttgtgatgcaggcatagaggctctcatcttcagtggtcaatggaaggctttgtgtgtagcattccaacacttcaggctgccatcagctttgtggttgggcttagggtctaattggattcggttgcaaaatcaaatatttttcttggagtcacaatctcgaggtggcattgttctttcgaactagagtgttgtttggttttagagcatctactatcgttatttgtttgtgttatatttattagtttaatatttatgtttgatttgggtgtttggtcaaataataatattttatcatattgtctttcaagaactcaagaattttagcttcgtgtcaatttttgtatgatcttttctcaagttttaatctgttcgtggtaaatgatcgcttggtcgtcttgctgtctttttaagtgttgctacaagagcactgctcatttgagtgcaatgtttgatttcttgtgttgtctacctcacatggaatgattcatttagttgtattttcctcctttgttactataacggttgcagtgtggacctcgtagcagtccttgtgtcatgaatgtgcccttgcatcttttgtttgcattgtttccgaccttgaatgctttcttgatctcttaaatgcataaagttatgcgagtgtggaggtctacggcttttaaacactcaaattttttatttaaacaaatgacgatcatggatgcattgagcttcttaccgaaagtttgaaaaaattgcattttgcggcgttcccaaacaaataccatgatcttgcaagttatgtaaaagatgatttactaatttatgttaagagtatagatttgtataaagtttaggggattttctagtatatacctaaactacaaattaattttacatatgttaacaaattatatagcttgtcactttatcaaagaaaaactcaaattataaagtaatatgtctggaatggaatgatccctaaattctgaatctatcatttttatccgttttcaaaagtaatttttgttaggttttgtgccctnnnnnnnnnnnatttcaatataatcagatttactgattaataaaagatcagaaatcgttttatgttgcatggtt

SEQ ID NO: 69245 - DNA, 1639 bp, Cannabis sativa
  modified_base (321)..(323): a, c, t, g, unknown or other
  modified_base (982)..(991): a, c, t, g, unknown or other
ataaaatattcatttatcagaatcaataatattattttatttccttaattagaaatattctaatagtcagtactagaacttttgtcgccccaaaatgaaaaactgccaacaaaactaacgcattgggaagagttttatttttgccagtacattaacgcattaggaaaaggaaaatttttacttttgatatattaatatttgaatttttccaatacaattttacgcttatagttgtcacataataaggttttccttgcgcattattttgcgccgattaaattttgtaattttttattggagttttttttatttttacacttnnnaatagttttttttttttttttgtatttttacggaattctacatataaattcttattgcaactagcagagcaacctaaatcgcaaccaaaaatcatataacaacccatatagaaaccattggagaaaccattttagaaaaccaaacctttaattttaaaaaaaaaaatagtatatgaggtaattcccttttttaatttaatattatttaattttaaaattttatcaattatttttaaattaaagaaaataaaaattaaaacaaaaaaaagaaacatgaaagctaaattataaatcattacacgataaaatataattttaaattattctaattatacatgcctaatataattataattgtctaaaaattagtaaataaacatatatttatatatcaacactacaaatctttttacttttagtcacaacaaaacttataaaaaacttatgactaatcataacttattattttcacgttgtgactaaaaagtttgtggctaaaagtattagttacaaaaatcacaatttgtaatgactaaatgtgtttttagtcacatttcttattgtgactaaaactaaattagtaataacttgtatctaaatactatgttttagtcacaagtaattttttgatgtgaacaaaagtcacatttagtcacaannnnnnnnnnttgtgactaaaaaattatcattaaaagtggtctttttttgtagtgcaatataagcataattttcttaactaaaataaaataaatactactacatatcagttatatcatcatcaatatcatcattgtcatgaccatcattatcttccacctctgcccagttagatccagcatcatcaaactacaatattggccagaggtctatctgaaatctcaaaatactcgcattcaatttctacaccaacgttatgtacgtatcattattaggagtatgttcaattttaatatttttaaattttatatttattttctttaaaattttaaaactttaaatattaattttttaaaaaataaaatataaataagtggtttcctttttatttataaaattttaaaaatacatataacaaaaataaaaactaaaaatataactaagtatacatacaatattgtacataacaattacctaatataagaaaaagcatttaagagtataacaaaaaaaaatggtaattatttatatatttgaatattatttttaaccatgcaaattatttttatttttaatttttttttaataaattatacaattttattagaaatttttacatcaaaaatccaatttactcaatttattacaaaaaaacccct

SEQ ID NO: 69246 - DNA, 1030 bp, Cannabis sativa
tcagagtgatttttgttctgttctaaatgttgggtagatagcatttttttttatgttcttcccctgattataaatactcattacattattacatttctccaagtagtgatacaagtagtgacttgtttccatcaccaacgccacttccatccaaagctttctactatcagagttcctggaaaaactcatccatctttccatcattgtgaaaaatttgcatttcctcctcctcctccagctaacccaaaaaggattggaccacgtcgtgagtacccttctttaattttttagtgacattttatacttttatttaattgcctttttctttaactttctgtgacatttctacttgttcgcaactgtaacctgatatacatttgtacattggtttaacaacttcttgtggttgatataatatagcaacatcaattgacatattatacatcctacaaacggtattgattatgttgctacttatctttcagcatgtccagtttgttatcttcccgtggagcaggctgtagatatgatgccaagcttcccatcagtatcaccggtagttcagaatttgacttatatgcatgacgagaatccaactagtactgagctttttggaggctctgaatttggtggatatcctacactaaagcagagagaggattcttttgatataaaggagtctatgacagtgcactgtgggtaagttttagtctctttgttcgttttgcttggatacttatcaaatatagcttggacttcaacaaatttctaatgatatgtcaaacctttatatttcctgtgctttggttatcatttattctcagatttgtcaaaggaagtaaacctggttatcagactggttttgacattgatgaagctgaccttaaggagttggagcagtttcatgaggtcattgttgcatcagctatatttggtacgtacgtctgagcttagaacattgcaaaattatattgcttttaagcttggatttttgcattttctcatggttacaactcacacctttgctagg

SEQ ID NO: 69247 - DNA, 699 bp, Cannabis sativa
aattaaagcgaaatgtaaatgcaggttcaatacaaaaaaggatcagaatttgcatgttagaccaagtcctacctggacaaccttatctgtggttgtggagataagtaattaatattcattctagttctctttaataattttctcatatctgaagactgaattgtgaatatcacctttcactttttgaaccaacttttataccctcaattattttgtagaattgatgcctttaacttaaagatgtagtgattctatctacttattaatgtaaaaggtaaaaggagaacattgttattaggcattattggtgtcgattacattttagagatacaactcgttagtgatattctttaaaaaattattacattaaattatatgaaacttgatagttaattgcaccaataactatatgacatataggcgaatgttaaacattaatagtatattttagcattgctccaaaaatatagttaaaatcttaaccctaaggtaacttaggcaattgcttaaggtcttacaaaattaaaaaactacattttatgggtaacatacattgtttttttatataatatgtgtgatatacattataaaatatatttcatatatttttagaaaaaaaattcttattcaattaatttgaacattaatattcactactataattgtcaacattataattcaattaattttttttttttt

SEQ ID NO: 69248 - DNA, 2118 bp, Cannabis sativa
ttaagtattaacttttagagttgacacgtacattgaatataaagattcataattttagagaattaaattctttttctttatcgaggaaaatcagggaattaaattctttgagagtcttcaaaacgagggcaaaaattaagttatattaaatctcagaaaattggctgcgtgtgattaaaagcttaattataatatatatatccttattccttaataatgtcctaaaatgctagtatataattcattagttggtaaaactagcattgtcctcataaaataattatttggcaattgactttgataagtgataactataataaccaattagactaactaatcagataaaaatctttaaatctaaccatctcaatagttcaaggagaatttttaacggccaaacaagttcaatgggcacgatttagtacatgtcaaagttcgggagaaaaaaatcctaattaatctttttttttttttccaaataataatgtgactaactatatcaaatatactaacaatatacattattaaaaaatatatacactaacaatatatattgttaaaagaaatatattagtataaaatatatattgtaaaaagaaatatatatataataatatagattatagaatatagatgcttaacaaccctaatgatttgttaggcattagtgttggagatgccaaaaattatacggcacttgtgggtgggtagcaaaaagccaccactataatatatatatacacacgtgtgtgacctctaatcaacccctatattctttaattcttttcttaagaaaaaaaaaacaatagagatttgctttctaattaattatttttagtggaattttactgtacacattaatgtggtgctttgaagtaacagtaatgaatattctgtaaaccatatatctatttttcctttttcttttgaaaaatagaataaaatctgatgttgctcatttctcatatgatttgacactaagttttagcaatatattgagtcaagtttacacttaagtacttaagaggaaaaaaatttaattaaatggtaatagacagagaataatgtagtggaaattagatcatattgttaaaatattatatttcattaaactgatcaaagtgtaaataagaagactaatgtgaattaaagctctaatctataaaatacaaatataatgataatcacatgttcgaaaatgtaaaccatacagcccttaaatgcagtgacggattcaaaaatttcactttgtagagatatatttatcattaaaaaatatttatacttatattataattactcttactagatttatttaattttatggggacttgttagtggggttataaccccacattaataattaataaaagtgggtccgcttaaatgtaatgtatacttcaaattagtttaagtggccaacgtattaaaatcgatatagaaaatcatgagatcaaattgtatgtaactcaaaaaaaatataatataaaggcacttttacaaaaatatatttaacttcaaaataataaagaagggggatcgaattttttaatcaatgtgttattggtattattttccttaagattttttttttcttaatttatataagataaatattatttttaaccttgtagtttacagaagttatggataggaggacactcttaaatgataaatcaaaacttagattactcttaaatgattaatcaaaactttaattttttaaaaataaaatagttcgatgaactcaatatttgttaattttatactttcaacacaattaacttaaagtaaatttttaacatcaagagaaacaaaaatataaatagtgtggtcataacaatttaaagttagattattagtaagatttatttaaaaaaaaaaaattagattttgaatactagcttgtactatttaaaaaaaaatacagaatctaaatttttatttaacaaaataataaaagtttaattagtaatttttgtaaaataattagtctaaaataatattttttcattgataaattaatcttaaaatcttacctttcgaaaactatagcaatagtatttttttgaaaagaaaaaagtaataactgttataaatattaataattatgtggat

SEQ ID NO: 69249 - DNA, 1495 bp, Cannabis sativa
tcccaacgacaggtaagtgtcgttattgatagtaccatttttaatgaggactttttggcgttggtaatagtggcgttggtataaaccattattgttgtagtgtaatccatgtccgtccttggctggaggggatcgcgtgcacaggacttgttgggaggcgtaagacgaggaggaaacatgcataaccatgttgctcccaagacaacgtggaacactttctatgacacatccattcaaacttatttttttggttagttaactatttaattttgacacatgtttaaagaacatataaagagcatcatcatacttcatagttcatatccaaaagttgggacatagatagatagtgctatatatatacacttaacaaatgagaattaatcagattctccactaggtgttagctttaatatgttgattagtgctatagtaggattgtagcatggatatatctttatatagtacatatccatttatatattatatatcttcattatttattataaattgggcacgtgagtaattactttttaggaaatggagtcgaaggatacaaagcattataatttatcacagttcgtttaagagcgcgcgcggcggtagctctagttggattgagttagctgcaacgatggttccacttttattaattcacatattttaataattgagatatgacaatatagaattttattttataatttatgttttattgccactaggttcctgttataagcttatcatcaccaagtatatatgaaaataattaaactaatgttgatcacttaagaatctgcaattttactatgtgacttatgattataaaagataaattgcttaattatcttcacacgagaattaactcaataataatgtcttgggtaggattcataatgcacattattaattagtacttcaataatctcttaaaataaacttagaaaaacatgttgagagaaaaccacactaaaatattatttagtaaaatttttctcatgcttacaatcaaggcggaaccagagctaaattttaagggggccaaaaatatatttatacatacagttaaatctaatttaatatgagtacttaattaaaaaaaaaaaaacatgctggctagtattattcggtttaaaaatgatacctagctattgggtaagtaatttaatcatgtttcctaataagaaaaaaggatttttattaacttttacttttcataaaaacaaaataagagaaacattaaaaatcactattagtacctaacacctttcttgatgtctattggtgtaattaagtatagagtctcttattacttaaaaatataacttttagggaatatcgctaaccaatcgtgtggcatcacctataaaaggtgctggtcatcacaagtgcccaatagcaatgccttaaaaataataataataacgtggactgttgtttaagaaaaaatattcactacaacaaatatagttattaccggcgggtttattgccgg

SEQ ID NO: 69250 - DNA, 673 bp, Cannabis sativa
accaaagtaaatatatgtatatataagaggtttttttaagggaaggatcaaagtttttattcatcaaataatcaaaggataaaatttattataaagcttaacgtaaaagtaaatgatcaaatcccaacaaagtcaagtaaaatgacaagaaggccaatagaaagaggcacatacgtccatcataatcataatcattgagaagtaccattccaccctagatcaaaagtaacgaaatagaacaagtatatacaaactcacaaatgtccataattgggccaaaaaatcaaatcaaagaaacaaaataaaataacaaagttgaaatcagtaatgaatcttcaaaaaacagcaattaaaaataaaagtatatccatagaccctaaatcagcgggagaggaagagccatatagccacaagtaaggtttcaaagatagagaaagaagctggaacatctaccacagcctatccccaggccacaaacgaaaggggaggggaccaaaactagaagaatcggtcgggcaaggttgacagacatcactggagacccatcggggcttccctcgggtcccacacaacaaacatgcctatacttattgtagaccacgaagcgcaacgtcgcgtgatcacctcccaccaacacactacaaaaaattgctatttttagtgacaatttttt

SEQ ID NO: 69251 - DNA, 669 bp, Cannabis sativa
ttgttgtttttatatttttgtgaaataatcccaagtattatttatacaatcaatttctttttttacaattttacaaatataatttcttcatttttacaattttttactattaaattacaatttgatgaattcctacctaaacaacatgaaaataacttaaaaataatgtaaaaataacaagaaaatacaataacgttaaaggttgtctgtgttttttgttaaagaaggaagtacaacatatttttgtaatgttttggttaaatatgaaataatccagttttaagctaattttcgaatcccataggcctattaggcccaaaaccaaatctggcccagctacaacgaaccctaagattttggacaaggtgaaatatctgcgagtgacccacctctctatataaattgcgtttcgtcttaatttatcggcttctctttctctctctgtcactcgaagcctgtaccaagcattttatctttaacgtcgaaaccctaattcgcaactgcttcgggttttgggcgtattgcatagttagtccatggcagaggaggaagttgcagctgcctcggtcagtcctgcatcgttggatcataaacggaagctcgaagagctggaacccgaagctccggaacaggccgagctgaactccgacgaacaggcccattcaaacg

SEQ ID NO: 69252 - DNA, 1340 bp, Cannabis sativa
tattattcttgagattctacaataaagaaaatcattacagtattattaaggctcaaaactctataaagttctattttatatatttatatgagaaaaggaatggcagctttccttttggggattttctataatctctcattaaagtgtgtagcgctgtgtttgttttctttatggcaaaaaatgacttattctcacttggatttattgcaagtgtctttcaaattaaagattcttcgattaggttataagtcaacgacatgtcgcattcatttccttcttttatgaaacatggaaaaataatagggttcaacttggttttgaattatacatgatgtcaattttttttttgttttttattttttttaaaaggttcattttattggagttgtaatttccatatgtttagttttacaaaatgaaaggttatactatttgttgtgtggtgtagtagtaggagtcttttcgtgtttgagtcaagattttgaatttcattataacctctcttagaaagtattatatttgacattttaggagattagcttgctgattatgtcatctttaatgtgatgagaattttctaattttattttcgatcactcaatcaaaggatcataagatataagtttcctgtaactaacatattgtctctaaaacaatttaaaaatgaaaaaaatgagaaagggtgatttccttataatagcccattaattgtagagaaaataaaaaacaatataatttggttataataatagcttgcttgacattatgagatagacatttatatgtgttcctttatttgttttctcatgccggtataaaccaagtagaaaaaagcaatataggcttaagacaaagcttaccaagtccacaaaaaatgattacttttgacttagaacatacatgtttaatatttatatatatagtgagtcaataaacttgctcattacaataataatatttatcaatatatgtatacacacacgttgactcattatcattatttagtttaataattattacataaattggattttcaactctttaatatataaattatataataaggtatttttagtgttttaagtacctgttctcttgttcttgtcatctatagatgaattcacaacaaacccaatttctttgtcgctctattcgttgacgaaatcacttactaagttaagaactcataagactacttactactttgacgtgggaagttaactatcttttgttatatggagagatcttaattatatatattaatattcttcttatattaaacttaattaaacactagtttgagtgaccacacctaccctacaaattaaaaaaaaaaaaaa

SEQ ID NO: 69253 - DNA, 520 bp, Cannabis sativa
gaagaaaaacgtcacatatataacaagaatagcacaagtacaaggaaagggaaaattaaggacaagggaaaatgaacaaaatgagagagtcaatgaataaaaggggaaacagcagaagttaaataaatacatcgatggtggtactctgtgtttggcacgatgtgggtcatggatattgaccccaccttatatggaatctggttggagatataggtttctaggtcaagtctatagatgatcggttacacttcctacaatatatatgtgtacacacgcacatataatacaaaattataaaaagaagaagcagttttattctatacatctgtaacttataaatatatatgtgtaaagatacaaggcaaggcaggcctctcccctccaatttccatataaatatataagtatgaacacaagacacatatacatatgcacctgtgttttagaagcaattaaaggtcaacttctctgcttacgcctttattcttttcagaaacaaagtccatctctctctctctct

SEQ ID NO: 69254 - DNA, 2293 bp, Cannabis sativa
atataattattatattatattaatacccgatataaagattttactgcactaaacaaacattttagtccaagccaatctaattttagtacagtccaatccaattgtaacaatacaacgcactccaatacaataccaaacaaccttttaccgatttacagtgaaattttttcttcccatttgaaagaaacaaaattacactgcactcgtggtggtgactagtgactactgtatctctataagagacatcatcatgtgaaagtttgtcgtttctctgctgctgggaatacaccacgcgctaacctctagagtagcggctgttctccacttttctttttctcactcactccaatcacttctacactccaaaatggtcttatttataattaattaactttaatgtcctcataagcaaaaccacaaaaataaaacaacactaacaaattacaaaaatttgaaaaaggcatagtacacgtggagatcaaacgtctcttagtctgacaacgctttaaagaaagaaatgaaaaatattaccaaactcatgacacgtggcttcacgttaaccgcttatgtctttattaaattattttttttccaactttaattaaaaaaaataattactgtcgtctcgtcgttgctatttcattttctgtttggtggaggaactaagactattacgaattttccattgctttcccaacaattgacggcctaatctcaagtttccactgtatatgtttatgtttataatataaaatattatatatatatatattaattcattgtcttaagaaagaaaaaagggaaaagagaaaaacgtcgtagcgggtggcgcacgatagtcgtaaagagttgaggtggtgtcgtataaaccttcataaacaaaactgtagtacttttaatacagtaccttttctccagaaatttcttagctcacctcctccaagatctggtccatgatcggcgctgtaacaagaggtcagcatattagaattcgtttttaatgtcttctcctttttgttgattgattcatatatattattgcttatgttatcgtcttgttttttggattttcatttcgaaatctttttgaactaaaataggtagaagaatataagtagtgttgcatttgatttgaaatcgttagtgagctggttgctgatcctgtctttttttttttttggagagagagagtatttggagttagctactgtcacccaagaacaccgactctcgccattgaaacttgtttattgtgtatttagagatctagtaacgttaggtatattaccgaacttagatatttgagatgaaacaaaagtgatgctgattttatggccataatatctgaaacaaagccagaataatggagaaatcagtttaaaattaattagcagattttttttcttctcaatttaataaactaacattacttgatattttatacttgctagtacagtgtaattactatgatgttggaaggcaggtgatcttattgtaacttggtgatatctttgggtttggaaatgggaaattgattttttttttattctttaatgggtgcagtaaaatagtgaaacattgaggtttccaaatctgggagtgagttaggcttgattgtggtatgtgggcacgccaacgtgaaacttcctcgatgtacaagcgtacgacgtcgagagattattctgattctcttgatgtggaatcaagagattatatgaatactatggaggaagctaaatctggtatatgcatccctttgatcatatagagttcatttattgttggtttacatagtgatcatctggttagccatggatttgcattagctttatttaatcattatgtcatttcaactgctatttcccaattgctccatttttaatattcctggtttgagatttcttcgtggatttgaatttgtttttcctttcagcttttatttgttctcatttgattaagaatagtattcatgattgagacactgctatttcttttagctcttttacaggacgatgtgggtatagaaacttcaaatccttcatggaagctttcttttccacatgttgtggtggcaaccatatcttcattcttatttggctatcatcttgggttggtttcttcgttttgaacttgcacttcccttcatttataagaaatggattatattgactcttttcatgcttatattgcgcagagtagtaaatgaaccacttgaaagcatctctgttgaccttggtttcagtggtaatacattggcagaaggtgagctacattattcatcctcttcgtcccc

SEQ ID NO: 69255 - DNA, 1330 bp, Cannabis sativa
cttctcttaaatttggtaattgggcctgaagcttgtccaatggccgggcccattgtaaccatagaatactgaacaaagccctagactctgaatataccatctgaaacttgtatgtcggaggaagaagatgaagagagagtcagtaatggaggacagagaaggaagtagaaagcggaagagggcggggcgttgcagacgtaaaactgataataacccttctcatctgaataaacaaatttctgaagctcacccagccaatgttcctcaaccaaaacaggattcttctaaactcaaaacatcacacaaagcctctaaaaccttgagttttctcgacaaagtctgtacttttcttcattgaacacaatattactaaattaaattgattttttaattattattttgatattaattatttttgttattactactttttcaatgacttacagatgaaagcgcgattggcaggtggtcatttcagaatgcttaacgaaaagctctatacttgcacgtaattaattacttactcactctttcatatctaatttctatgccttttgaattatacaaaaaaaaaatattggccttttgtgctgagattgggttagcttcaaaattttgcttagatgaacctaatagttgctgaattatcatatccttgttggcaacaaactgactatgattaatatatatatacttttttgttacaatagtggaaaggaggcacttgaatacttcaaagaagaaccagaattgtttgatatggtaagactaaaatgattcaagaaaaaaataagagctttatcttttttgtatgctaattcatgtttgtttgtatgaagcactaagctaaggattttgaactgtaaaactatgtgggaagttaacactagtgtttataaagtaattattgagcttttttctcttaccccaacatgtgctttattcctttgttttgtataatttctcttcaatatcactatattattgtttgattcttttaggaaaatttccataaacaacaactggggtgataaagtttttgtttgatgattgacatatcttacttacttacctgtccagtatcatgcaggataccaagagcaaatgtcacattggcctgagctacctgttaatataattataaagtggttaaaagattacggttcttctctggttgtcgcagattttgggtgtggtgagtaactttattatttcattttcattgcacagtactacttttgaaaattatatagctttctggttttctcctttgattagttatggtgacaagtttttccacattactataatcttaggggatgctcgcctt

SEQ ID NO: 69256 - DNA, 1062 bp, Cannabis sativa
gatttgctatataatcttagttgtattgggctttctcataataggtttcagttaactagtaaacttacacttttgcttcgatttaacttcacataaatgctaaatcccattaattgtagatcaccaactatatgagctaacacgacaaagaactatccaacaatctatattttcataaaaacaattaaaaggttaatgtaagcttaaataaaagtttaacaataacaataaaatttacacctttttcttttttagagggttttctttgttaatttgttaggcatgaagggtgtgcttcagttcttatgttttgttgtttgggttttgagcatgttattcgttttttttttgtaagtgtaaaagtcactcttttagtagagtacatatatcaagcaattaagattgaaggatgcaaaagaatgagaaatggagttttgttagttcacccctagtcttctctatagagtataatattataaataaccactaaaattctaatttctggtgttatgaatagggtaatattcagagcttgactgctactgatctggacagatatggagctcatgcatggcttctttctcctccttgtcagccatacactcgacaaggttacacatttcttcttcaatcttcaactctttctttctgttacatataaactattttgtagaagtgtactgtaattaatacatgtttttagtaatgacttttgagctacttcttcttaggtctccaaaagcaatccaatgatcctcgtgcattttcattcctcaatattctcgaattgattcgagatacttcacaacctccaaccatgttatttgtagagaatgttgttgggtttgaggtttgttcataaaactttgctcagctcaattctaataagacttatggactcatctttcaatggcaaaattatttttctgattgcagacatctgatacacattcgaaaatgatagagatattggtaaaagctgattttgtcacacaagagtttatattgactcctttacaattcggtgtgccttattcgaggccacgctatttttgtctggta

SEQ ID NO: 69257 - DNA, 842 bp, Cannabis sativa
tcttatttaatacttccagacctttcaagctgacatgtcccaaccttctatgccatagagagattgaatttgttatctcctttgaggcaactgaaaccaggttgcttgaggtaaccccttgcagtacataaactcccttgatcacagaccctttcattatcactattgacccctttaggacctttggagatccaccttcaaccctgatagagcacccttctttgtctaatattgctacaggaataaaatttcttttaatgtttggaacatgtctcacctgatggattttcataatggttccttctgctaattgtaattgaactgatccaatgccaactattgagcacgatctgttatccccaagtctcacagttcgtgcattgatttccttgtaatcaagaaattgttctttatttggacaaatgtgaaatgaacatccagaatcaatcacccagttagttttcacagaacctttggtcaccaccattacattagcatttcatatccattttccaaagccacgtctgcacttccataccttttgtgatcttctttcttaagttctagacagtcctttttcagatgagaagtcttatgacagatgtaacaccttttcttgtattttgattgagactttcctttgttcaaacttccatggttcttgttctctctttgatcatatcttccttgagataccagtaggccatctgcaaagttatcctccttcagttcttgtttctttttcaactctttggacatcaaagtactctatacttcctccaatgtcagagatgttaggttttaagccctaaataaaactccatttcaatgtaatctatttt

SEQ ID NO: 69258 - DNA, 2767 bp, Cannabis sativa
  modified_base (554)..(554): a, c, t, g, unknown or other
ttgtctggggatgctttacctatggtagttccatctttggttttggatgatttgatttaataaaattcatcattattcaaaaaaaataaataaataaataagaggggttttttttagtatggtgattccaacaaattaatcattcccttttccctgaaaatattaaaatcttctgtctaatgatatttaattaatcatgatatctctctttgtttcgctacactaatactcaaattctcttatctacattcagtgaagtattgtaataaaatagtgtaactaggatcataattaacatatcacgtcatattattgtcgaatgacacatttattattgggaaatcaaattatcctatatactatttttttaactttttttttcttaaatttacggtttggatttctaatgtggttgcagcgctagttgcagtgctagttacagtaggagtttctatacaattttttgttgcaatttaagttacagcgctagttacaataggattttctatgtggaataccgtaaaaatgcaacaaaaaaaaactattttaaagtntaaaaataaaaaagttcctttattattctcatttatatgaattacataacatcaacttaaatgaaggaaaaaagaaaagcacacaagtagaatcctcatggccaggcacaagatgtgatgaggaccttaataataaggctggatatgtcttgattattcctagtgtaataataggccgtagtagcaatagtggcaagcaataactaagtacaagcaataatagtatatataatatacttgtactttaattggaaaaatgaaagaaagaaagacaacaaacccaatagccttttcaaattaggtccccattttttgaaagataatattggtgaatcaaggtggatgatgatgatgatgatgatgatcaatcaaggcagcaacggaacatggtgtacctctccatgaggcggccacactcagagcatgaaacagtgtcaggcatggctccagtggcaggcaatatgaggcttgtgcagtgatgtggggcctcaagatggacctggttgaggtactcacccatagcaggtacaaatcctagcacttcctccctcatcttccaccgaccatgttcggctaggaccttgagaaagtgttccccattgctcttaaccatttcaccaacacctttgctgatcacagcccacccttggtcacttgagccgtagctcaacatagcaatgatccccaacaatatggggtccttctttgcatcctcaggcttggttagttgacccttggaatgccacatgctctctagcctcatccaaaaataccaaatcagattccaatcaagtgttctgctcaatccctctttgttgattacatcaattacactctttattgttctttccttgggtttgctccttcctacgtaaagcaattccaaggtaattccagattctatagcaacatcttttgcaattcttgtgaactttctgatccagtttatgtcttctcctccatacaagcatatgtgtctgttgtcttggagctaaatatacaaacatagaaagaatgtcatgtttggaagatatgcatatgattttattagttattagtgaaaaagaaatcgtacccagatggccatatttgggtcaagattgtcagcaacgagctcaatggaccatctcatgtcatcccaaagtagtttttcttgggtgattgagaaagggaaggcaaggcttccccaaatgcacatcatgtggatagcattatggtgtgcgatttttccttgtgtgtccattattacaagcatgggtttcttagcaaagttccacttctccttgacatacctggtgaccaccgatgacaccacagaatggtggtggatggagtgccattccatttggtctctcagtgtctcaaacaacacctgtttttcatcagtccaatagtctgaaatcggcacccaaaccacctcgtactgactctgggcccttgttgcactctgcctcttttcatggtacatttgttgtaagattgagtattccgtaccacgtggcaactcagggtcgagatctgtaatgaatagtgctaccaccttcctcctgtactcttcagtagtaacctgttttgtttcaacacatataatatatgatacatattataacaggctatatatataagttaagtgatttatgtttttggaaaatacaaacccttctcttgctgaagcaatcgtacagtggtggctggccatcattgtagtagaacaaagccgaaagaggctttgtgttatcaatgtgagtaactgtgaaaatgcgtacaagggcttcaaaagtttcatcttctctcctcttctctgaaatttacatgattaaatatatacaatcagttatatgtgtagtgatgatgaaaatgtatagttctccaaaaaaggcataattctactcacggatgactttatgacatcgttcaattagatccacaagatgtccttttatgttgttaagcttatgagccaaagatgacagctcccatggctcagttaagtacctgagacaagtaaaatagattgtcagtacagggacacttgattaatttaaaaaaataattgtaacttactctattcccatgccagtgagggccaaaatttgagtagctgcaacaattatgctccggatggtccagtacacagctgtggggatgtgagaagcagcagctaaaatttcaggggaatcagcagtgaagtactcacttctaggaatatcata

SEQ ID NO: 69259 - DNA, 2207 bp, Cannabis sativa
atgaacatacattaaataaatttatttttctttgagtacgtaagatcacattacattgtatataacgtaataaaattaactgaaaatttgaatagtaattttcacatttacttaaaattaaagacgagttttaagataaattttataataaaaaagcttaattttagttttttatttcttaattttatcctctcatattttctttaaaaaaaatccaaaaatataatcttttttttaaaaagctaaattatgatcttttgtccactgaacgcaggtcatcatattgagtgaaccattataaatgtggtttgttctctattatccattaatacccactgttgacaattcatggagttgaattaggcacatacataatacatttatatattatatataaatatttatattgaaagtaattatttctatttgacagcataaataggaactagggacacctcgaaaaccatattgccaaaatggatatgtcactatccgaaatgttgttgttgttgagtttttattaattacataacataacatgcatttgcagatgaatctatggctatggaaattaattaagtcaacaaggttgactaattaatttccccttcaacatgtgattcagcaatagtgaattagtaatatgatttggatagaaaaaatcctaaagtgataagatatactgagttttttctttgtaggaattaaataaggtgtcccattaatatgaaataacatgtgcatgatacaagagtatatatatatttatgtatatatatgagtcatccttgatccaaatctcttctctatttaaacttaattaattaaggccaacttattagttaagtcatggtgaccactaactgcctctctaggaacaaagttaagtgcaactaaggaaagtgagaccaaaaaagtttaggctaagttttaaaattggattttgataagaaaataaaaatgtaacaaaaaataacgtgaaagataattaattactatggaaagaattgtttgaaaaaacataatttctcataacaaacatgactaatttttttttttaagagagtttttcttgctgaataaaatttcaaattctagatataatcatgtcagactctaaacctaaacagactagacgtgtataattaaggtccacttagtcataggcctaaaaacaattccctttattacatgtttgttttactaattttgaaaattatacattttatttttaaatatagggtcaatttttttttattatgatttattaaattttaaaatcgacctcgacataatttattattacaaattaatattgaagaacccttgagctatgcaaaacattgtggagagagcttgcgctattccataaaaagtgtttgtaataatgaagtcaaaccctatgttgttgttttttttagtagatagatcaacattcaattttaacaaactagaatagtgtgaccattatgaactaataatgctatatatttttgcggctcataaaaaatcttgtaattaaagtgggttttaattgcttaatttgttggattttgtttttgacttttgttttgtggtatgtgtttttttgaagaaatatataaaattggctcaactccacatatataaatttatttttggaataattatatatctttatttttgaagaaatataagtcattaattagctgtactgaattccttagaatattgcttgtaattcatgcataatcttctttgctgacaatgacccactccactccactccatctgaataataatatatattagaatagacacaaattaaaatgttttattttttttattcgcagtgtttaatattttttataggtaatattttacaattaattaataatatttttaaaaattattttcttaaattatataaaaattaatatttaattacaccaataataataataatataatactgattattttattacaattcttaatgatcaaataaataaaaaaaaaacgttttggtgagatagtgtccactgagggatgaggtatgttttagtagacggccacatgtgaaaagttgactaactaaattccacagtggacattggaatagtacttggtcaactctacacctatatatatatattcataattcatacatattattttctattctaattaaactattttcaaaataaataaatatactctcatactgt

SEQ ID NO: 69260 - DNA, 1501 bp, Cannabis sativa
taaaataattccaacaataacaacatctccctagacgatgacagggcatcaaatcttgaactagatctagggttttgggacataggaaataaatttcagaaactctttctcatctaattttgccttcttcccttccctatcagcatttgaagcagacctctttctattgaagaccaacccttcaccctagttctcatcattttcagtgatgacaataatttatgtctatggtggaggaacctgctgcaattgctccatctaaagggcaggagatgcgaaagtcccctaggcacgaacctttggagaaacctctaacaccttggttaggggtgatgtctctttgttccatgaccgggaagaggctctagtattattttttcctttggcaggcttcgtagcttccctaacctcctcagtgtggatttctatgctatttaaaaagtcgtttagaatgtctatttgaatgatctgggggttctctgcaagcaaaacacaaaattcagacacatggaagcaatggtaaatgcatgcaaatcaataacaataaaccaaacaagactctagataaaaccattgacactattgtaattttgattcccttaagcaaagaatgagatatcctctcagcctaagaagctaccgtactggaagaaacttgaacacttcatcaagatgaaaagatctactctaacacattgggaaggctaaagaaaatgatttggagttcctactatttcatctaccctatcataataatgaatcatggggtatctgagatggtcgagttctaagaaatagggatcaaatcctccctgatcaatcttttcttactcttctagatgtggagcacaaaatagatggaaggaagagttacatcttttggatgtgctagcacctagagcacctccatctagaatggctggcttgaaatagatttctagctccgtctcttcatccattggttctagatgtaatcaggtctaatcttccagccagcgtttatcttttttatggctttctttatctcattcgtgtgatttttgcaatgacttttgtaacatcaatagattcattatggactttgaaagcaatgtaggcatcaaagctttgatgagggatgatcaggctaacttgcctaaggttttgcagtgtttaccaaaccttctactttcaaagcctccagggaaagacctctatacaaagtctccttttctagaagaaaatgaatgattgatgaatgggagacaatgtctaaaaaaaaataagaaaaagaagctccaattagactctatcgaaagatgaaggaaattcgaaagaaagaagaaaaagtggtgtcaatcgccagcaatgttagtccaatgattgagttcaaattcttttcagagggaagccaatggtgaagaaccagtagtcttgcaagtcatgggtgtattttaaggtgttggttgggcagatcaccttagattgtttcaccaacttgtagaagtcgatcttactctag

SEQ ID NO: 69261 - DNA, 521 bp, Cannabis sativa
atatttttatttttaatatacatccattttactaattttattttgctcttgcccccattaaaaaaaaattaattgtcttgtaaattttacataccaatattgataatatattatataattgacattttaacgatttaattagctttgtccttttcaccagctctagatttttgagtgtggagagtgcaattcattgaaattcaactttcacctaattctaatcttatgtttctaatgttagttatcaaaaaacaaatgtttctaatgttgagtaggaagatctttctaccaataatatcaattaattaaattccatattgttgaaactaatcactaagtaacaaaagttttcattattattatgtgttacaatgtgagcggttaagattttaacttttgcttaatgcatccaatcccattattattttttttttttttttaagaaaacggaataattcgagacacagaacttaaaaagtttcaagatacaaaaaagtctcaaaaattagataatattaaat

SEQ ID NO: 69262 - DNA, 596 bp, Cannabis sativa
ttggggcaatatggtggttgagaagattgtgagaatgcactccgactatacccttgtcaattttagagatgaggcaacccgtgatctaattcttgaagctggggtaattcactttgataaaaaaccagtggtgcttcgaccatggcctattgaaatggatattgcccgtatagtgaactctatacctgtttggattcgactaaatgggttggggcttcaatattggggaagaaataatctcagtgttttggttagcacaattggcaaacctgtgatgattgataaagttacccaagagcgatctatggtgaagtttgcacatgctcttgtagaaattgaaatctcatatgagcctccaaagactatttccttcaatattgaaagcaaaatagttggtagagcagtcagttgagtatgagtggctcccaactaaatgctcggcctgtgctaatttgggacatattgttgctagctgcaataaagagaacaaagtcatctagaagaagaaacaaggtgctaaaaaagaaaaagagagagacaacccacaatctaatacagccaaagacaatgtgttggattttgtgccctaaataaaa

SEQ ID NO: 69263 - DNA, 1239 bp, Cannabis sativa
  modified_base (236)..(248): a, c, t, g, unknown or other
tgtaaagctcttacccccgccattagctccacccaccaatccctgttccaaacacaatgaaatctaatctgtaaatatatgttttgtatttatacatgtgtgaatacagagaaagtctcccaattcgccatttcccacgaaagaaagaaaagctttattctttgagtatatgtaactcttaacttataaccccacaaattaaagttttatttttttatttattattatttattatnnnnnnnnnnnnnattattattattattttgagagaaagagagaaccctcgaataaaaattggttctttactatattagcgaagagtatgggaactgagttgtgtaaagtcttcatcttttttaaggttttgagcacatagtgtgacactgatgctcattcccttcatcttctcagttcgttcatcttggaccattctctcccttgtcacagccgccagagccatgagctccatttcgaaccaccgtgcctttcagcttcgagttgacccactcactggcaactcagagtgggttgtgatcgaagaagatcaggaccaaggaactgaaattttcaaaaactcagaacatcccatgttagctatgacctcgtacttggatatgcttaatgactttcctaggaatcgagcctatgctgaggccattaacaagactataacagcaccttgccatgtccttgatattgggtaattacttatataagtgtatatatatatgatctgaatgttcttactatttgattgtgattatggtattgtgtagagctggaactggtttgttgtcaatgatggctgccagggcaatgggttctgaggcctcaatgcaacatgggaaggttacagcttgtgagtcttaccttccaatggtaaagataatgagaagagttatgagacttaatggtatggaaaagaagataaatttattcaacaaacgctctgatgaacttaaagttggtgttgatatatcttcaccagcagatgttttagtgagtggagactttatcataatttgtatatgttttacttagaattgcttgagttgtgtgttaacaatgaatttgtgtgtaggtaagtgagatacttgactcagaattattgggtgaagggcttatcccttctttacaacatgcccatgatatgttattagtggaaaatccatcaacagttccttaccgagcaactacctatggccaggtgattgaatcccatcattgtctttgtttcaa

SEQ ID NO: 69264 - DNA, 838 bp, Cannabis sativa
aagattgataaaattgctggtggagctagactggggttcattacaattgaggatggtggtaaaacagaggtacttgtgtacattgattgtctggtatttccagctactgagagttcaggaccactgtttagagccataagaaatggacccaagaaagatcaagctccacctggggagccaagaataatgagaagtcttcttcaggcacttcaaaaatctgttgaaatagctagactttgaactttacatttacaatcacttttcttctctttcatctactactactactacatcaacacttctaagtcttgtaatttttttttctttttcactgttgaacaattgtatcctatttttttatatatatatattatcagctattcagcttaaattactaaccaatgctactactatagtctacctactaatctatattacaaaaggtgcaaacttttgatctgattatgttgcaccatttaatagaatgaaatagaatagaatgaagaagaaacaatctatattctgtacttttatttgattgcatattatcattttaatagaatgatttttttactattttagtagaatgactattatatttgaaatagaagaaaaaactattcgaatacataatgataaaaaattaaataaatttttttatcaatttcttttacggattttaaattttagaggagttaatgctaaggggcagtggtacttagcacttttttatgtattgatattactattgatccaactaaatattgagtctcatataacataatataatgttaaaaggtaccaatagtgcctagcatcctcttatgtgttaatattg

SEQ ID NO: 69265 - DNA, 1186 bp, Cannabis sativa
aaaccaattggctcacaagcttcaacttttttttattataatattattttagtttacattaagcgtaagtgggagcaaccgagcaactcatttattaaatgtagtttttcatataaatgctattataaatagaataataattgaaaaagaaaaagaagcaatgaaaaaactccatttcagatttataatagattgatatgtataatggagcaagatatttcttaccaattgagaatggatatgtgtatgtatcatatatacaccaatatgacaatatcataagaataaaaattatatgaaacagtctactgtggcagttatctttctttgtttattctttccattcatattatatatatatgctctactgttgtatttatatgaaaactttaaatgtccaaacaaatagatcactattcatataaatatatataattctcttctttaaatttctctgattgcccatactggcatacttgaatcaaaagctaaattgggttcttatcataaaggtatttgctcagcaaatacaatgtccgtattccaaaaagtataaaagatttaattaagcataagacaagataattacgctgttagttataattaattttaatatctttttattattattataatttatacaaaaatgacctgatttgtaataatgcaaagggtacgaacacattaaaaaagtaatgatgaagccacgtgtcaaatacccaattatttagggtggctaattcagcaaagaaagaaaagaaaattgtaaaccttatgattgtcaaaatggtgattagggatgatacattatatgtcccaaggttatgaaagaagcggtcccacccaataattcattcaatatatatacatatctctccaacctatcattaaagcctgcatgacttcaattattgcaatgatcccaaaagcatgacatatctgacctggtcacatcctctagatgcgtattttaattactacctgtttaccaaaagctatcccacgcgcgttggaccaccacttttaaaataactatatatgtatatgtgtatccaacaataatattctacaattacatcccctaaatatattctttattataaatcttaaaagttcaataaccaactagctacatatcctttccaataataatggttaatttaaatcttcactcttaaattttgac

SEQ ID NO: 69266 - DNA, 919 bp, Cannabis sativa
tatatattaatgtttggaaaagcatatatatatatataccgatctttcatatgcatgaacatgtccagcaaagacgacatcgactttgtaatcaacaaaccaactctcaaacgtacttctcatgccttctccttccatgaagtgagcactgttactgttatagaatggaatgtgcataagaacaatcagccatggcgtcttttctctgtccacgtttttcagttcttgttttagccatatgtattgaggtgtgtattttactgtattcatcaaaaatcaaatattaattaacaagaccaaacaaataatttgagacaaaataatcaaatagttctgaccatatggagaatagcttgagaggacgattatgtgagcagaggctcgtctgattgagtaccaaagtgggtcactactgttgcacgccttataaggtgtagtgtatcgattcaaatagttcttgaaagttgtcatttctccctacacaagtttttcaatatatatatatatatatatatatatattagtcttaattaaagtgtttcagaagagaaatttaattacatgagtatcttaattaccagttgaggcaaaaagtcgacttcatggtttccagtgttccaaatccatggttgataggcagtgcttggttcaacgaagcgaccccaggtgtcccaacgtaacccaatttgatcatactcatacgaagaagcataccgatcagcataacttagatctcccagaaataacactgcctttgctttactctccatgtaatgctccaaagtcgaaagagaattgtatgtttgccccaaatctcctgtacacacaaacaccatacactactactcaattaataatttgtaatgttataattcacaagtgacatttcttggtttaagagaatatacttaaaaataaa

SEQ ID NO: 69267 - DNA, 1315 bp, Cannabis sativa
ttttttggtaattttctatttttaggattaacagttgtgtttatgtttgcaggtaatcgtggaggagatgatgacgtgtcacgtcactttgtgtgtgatacattattaattatttaaattatacatgtggctttgtcacattatttccatcaccactttgttagccacataagataaaacttaacatgaagtttatatttgagcattgtgaattgttgaggaaaaattacaaaaacggataaaaaggttaaggggacacaattttatagtggtaatagtttgggaataaaaatcataaattatctttttcttaagaaaaataatacataactcttttgccttgatttggtatgtatatgaatatctaagtttttatttggaactaattttgttttttttttacaaaaaaaaaaaaaaaaaaaatatgcagggataaactttacttgataattttgtggccaatttcgatcttaaatcctgattttgattgtgtttccactttccactgcggacccatatggagacaagagggagggctttttctagttagtttttggtttgagtcacttgtctcacaaagttctcgtatcttttcttatatagtcatcacactagagttaagtttaaattaaatggattttataaaaatattgaagtttgggtaaaagtttataactttaccgtcacataatttttttttacaaaaatactgtctttttataaaataatcgcaaaacagcaaaacaaaataattaaaacaataatagaataactaaaaaataaccgtataacaacagtaaaaacttaacacagtatacggtataaaactaatatttttttaaaaaaacacataatatttttgaaaaaaatcttgtcctacagtaaaaaaaataaaaaaaagttagaaagtttaatatgtggtgtaaaaatcccttaaaattaaattatatagacaaattaaaatatatataattgggctgaaagacacatcatggccgacccacatatgaaggcccataatttgatttttgccaatttttgtttcaatcaagccttgaatgaaatacttttatctttttccaattttaccatttatccaatctaaactatgtaaatatcaattttaataattataaataagtaaataaaaataaaatttaaatatatttattaattagacatataaagtatcttttttgaataaaaattcataagatctattaattaataaatgcacttcagaggaacaatcctccaactgaagcacacgaccggtagagaaacaagagtatcttaccaagcaatgagccaactt

SEQ ID NO: 69268 - DNA, 574 bp, Cannabis sativa
aaatttagaggaagatgtaaatagtctcatttactaagaagaatttatttatttgaaaattaaaatacgaatttattagtgttaacaaatatatagagagtgaaagaatttggtatccaaataattgacctaaaatttagtgttttgtatataccagttttgggtggttgttattggttagaacttagaaatatatatatatatgtatatatatgtaatttatgggtattttccaaaaaaagaggcaacacttaatgttacacatatacttgctcccacctaacctaatcaatatctgattcatcgaactgtaaattaaatatacaaatttgaatgaattgaaaagtacatatatatatatatatggatcatggtcatgtatagttatactatgtatatcagtatttttaattactattatttggtatattaaataatagaataaaatattagtatttgttataaaataataaaaaatagatgagaagaaaaaagaagaagaagaagaagagagaaagtgaatgagaattactcagttgtttattctaatggggtgaacccatatttatacaaa

SEQ ID NO: 69269 - DNA, 4643 bp, Cannabis sativa
tagttttagagtaattttgttcattatgggctatacaatgataagccacatttgcatttccaatcctctggttcataatttgcatattggatccctatatggttatgtctgctggtggttggcacttgtatggcctcacaaggaacacatccataacacttgtgctcacagcttggtggacttgaacctatttttcctacccctttgtatttttctggttcattcatatttgcctcctcctttctgttcttcacctcttttgatgttggtttcatagactgcaggctctggcctggacctgattcagtaaggaaagaataattcagaaactttttaacagaatataagatgagagcccaatagctaaaggtatgagaatcagagagttgcagagaaaaaagaaaacacaaatgagatcatgtattatatgggaaaagacaaatgataaggataaagaaaccatgttattctaagtaaagatggtggtagctacttaacctgatggatgaacatgatcaacagtaatactatcagttggtggaaaagtcctgctagttgcagcaaccaagtacaccatttgcagagctattatgagaaaaccaaaccttcccttcatttgtatggttgaatgatgatgctgagtatgatatgattttccaatgtcaaataattaaggagcaacaaagagagaaaatcatacttattcaggattacatgcatgatagcatggatttataagggtgagtaagctgaacaagaaaacaaaaagaaaaatattccttttcccaagaataagctagggggaatatatctatttagtttaccttgagctaacttgaactgagtagagagactttagagtttacttgtcaagcaattgattcttcttccctatcaaaataaagcttcctcgtttcatttgacaagactcttgtgaccaatctgtttactgtgatcctctctaccatttggattctcgcccttccacatagcctatcttcactctgtcttgaatgaaaatgaagaagagaatactagtatactagtatgtgagggtgattgttttggtccaagaacagaagcactctttttggggggtctgggagaaacctgctacaccctatgagtctctgaatcagaataaatctttggtgcctactgcctagactgcagagcctttttttgttttaatatataaatatacaagttatcttctgatacttaaattcccttgtgaggaaatggaaatcccgaggcaggaagcctttttttgtttattatttttagcataaagagggttaaagagaaagcttccctattggctgatacacagaccagtacgaaagaatttaatgagttagttaatggtattaatgaagaacttgggtcaaacttttttacagctaggaagggatgtgggaaacaatggagctaatgtaccaccctctaatctgagccttccatttggaaatacaacagagaagatagcatttatgctcagatatgatcaccttcattgaatgataatatataaacatttattgtaacatgaagaagaaacataaagaggaaacaatgcctaggaagattgagaagctactcagaaagcatgttaataagctcaactgtgaaaaaaaaattactatgtaagatcgaggttatagttgttagacatgtgtttttgaagtttgagctgttctggttagtttgctaagttaacttacaaatcttgattgcatgcctcaatcttacaaaattggattgatgtaatggcatagtgaacactgctaactgctaactgctactgctatagagcagtagctaatttagaattttaatgttgtatgtatagtttatacaaggttccattttttttttctttcactaaatggaaaaaataatagtggcctgctcagaggcattataataaaaaaaaattgacaagtcaaatatcatcagcagataaagaaaaggcctaacggcagactgaaaagataaacgtaaaccatatgtatttttcaaccttgcattgattctagcgtgggaggaaaaatagtgactgtgtattaattagctgtgctgagcagtaggccagttacctaagtcagccagccagcattactcttagacctgaaaactacagagagagtgaaagaaagcattggtcaatttaatgatccaaaaatgtgattaagaacatcataaacaactcacctaatccaaaagaagaaaagaaataggaaaatagaactgggacttcatgaatgaatggatggatttgatttttcatcgttttaaatctatacatgaaatctcaatttgtcattcaaaatctgaattaggctgcagacagacagagtgagatttttaaaatactgtccttactctgataaggtaacagataattacgttactattctactacagtatcttgccttttggattagattaacaaaatggtataaggaaaatattatggaaactggaaatgcttctcattgtactaccattgtactaaataaccagatagatattaaaagacacagttaacaaaggagatcatctaattaactgaaatcacttatgtagaataggatgactacatttaataaataagaagaaaaattgcattccaaactacaatgttttcacattatattgtaaagcaaatcaaaacatacatgatacataaaaccaagccaaatattataagttgtaacaatattgcaaatgggactactttacttgtcacttttggactctttctttggaagaattgcagagaaaagggcctcaatttcctctttaattcgttgaaatacacctggacctttgacttcatctatctgggtattctcatcaatgtcatcactggttccatgcgtttctttatcatgggtaggggatttatgagcatgggctactgcctcaatctcttcttttgctctctccaacaagtttggtgcttttacattttcatctaccattcattacaaaaacccatacaatttaatatgcatttcaattttgaaataagaaattatgaataactttttgcttcaagaaatcccaagataaaagaagccagtaaatttcattacttatatacaattaaatcaagtattatttatgagcagaaaattatgagtacacaaaacccacacttcaataactactaacgatgattgttcttgaaaatatagctacacgcctatacctaattccaaaaacgttgggctcacttgtaggtggtatgttttacccaaaagccatcatcacaactaggtttaaaattgagtgataagaataataataatacctgaagtcgttggtgctgctttcggttccgccattagagtttatctatctaggaatataagaaagcgaatgttttagaaacgtttctttttaagattgttattgtttgagctaggatgcatccaagcagactttccgtggaccctccctcacctcgctactgatcatttaacgatggatttgagtaacacgtggataaagatcagctgtccacgtctctttagttcggagtatcttaatcaaaagcattgctattgagcaccagtgatgcttaacactaatccgatccaatctaatatttttttcttcatccgatccacgactatatagaaaatttatagaaactataatatacacgactatatataaaaataaattaaaaacttttttttttgattggatgatattcgttaattgtactaaaagatcttaagaggtattatctttctttcattagttttgatttaatctatatattgagatctttggacttatagttcatattaaataaaaattatttttatcaaatctgcttccacttttataactctaatatggaccataaaaatcgataaatttaccaaaatcatgcataaaccaaaatttacttcaaaagtaacaaattcatagtcttctaggattaccttaatcttgataatcagttctcctcaaaaaactagctgaattccttgccaaaattaatttgagttgatctaaaaatgtttgttcttcttgggatttcttagtgccaaagggaattagggagagttaggagaaagaaagaattactttgagtgatgttaatcatgtttcttctaatttttaacttcagcataaaatctcttatttctctacaaaatacactaatttgaataattatcaaataaagcttaggtgacaaattctaaaaacgcccaattttttttttttttgagtcaaaaaggcccttaacttttaagttatctttaaattaggaataaattggtcataatcaaatatcccgcataatttcgatattttaattatttataaattttaactcgctgaatttaagatgctaaatcgtatcaaagtgatactattggccaactgtcgaatttccactattatgaaaatactaaaattcacatataacatgtatgacacacttagaatttaataaaatctccataattgataaattatatcactaatgcttatttttgataataaaacttttttataataaaaaatattaaggtgttaacacttttattttataattttttaatcacaaaatgaaagcaaaatttttgtttttaaaaattttgtttttgaaaaataaa

SEQ ID NO: 69270 - DNA, 860 bp, Cannabis sativa
aagtttatattttttttaataatggggtgtatttataattttatggggtgcaaatataactcccctaaaattattaatctacttaagatatttaaaatttgaccaaagtgacagtggtacacagtgactgttgactttagtacttaacagaccaaaataaatagaatagcggagactaaaacagaaataaagtttagagatttctacctgtaaaagttcaataatagggttgatcctaccaaacttaaagctcgaacatcttagctgtcaattacctaacaattttattctatttaggaagagcttagtctaacctaacttaatttttattttttgttgatttgaaatcaaggaatgaaatttcttagaataaaaaccacatattttggatcctcattaactcacatataatgtaatgtcacatcatcctatttgctattaatgcaaataataaaatgcgccatttaaattttaaacataggccaaaaaaaggaacaaaataataaaaaaaattaaaattaagcttaattattatgtccattgaattttctactctttttctttttaggtttttagtatactttaagttttattgcaattcagcccctgattttttttgttggcaataaaatcctttagttttttttttttttttttgcaattaagttcttttaactattttttcacaagttttagtttagtacgattttttaaagtaatcaacacaactaaagatgaaggaagccgaaatgcaaaaaaaaataaaataaataagaggggcaaattaattttttttaaaaaaaataaaagagctaagatacaaatgttggggaggggagagggcccccaatataatgtat

SEQ ID NO: 69271 - DNA, 1332 bp, Cannabis sativa
  modified_base (1258)..(1262): a, c, t, g, unknown or other
cagaaatacaaaaagttattaatggtttctaatatttgtgatattttaattgaaataattaaatacgaagtctaatataatataatataatcttttttaccagagaaatactaaaaagtatgaataatgtttagcatccgtgatattattattggtgtcttaaatcaattctgtttttataattagaaagaaaataaagaggcaaaggtgggttccacattttcttgtttgttcaccaagctttaatcattggtatgaaaaatgattaagaagatacatattatgatttgttcaaattgcttgccaacactaaagagttacaacttcttcttcctttaattattatagaaatttggtgttatagaactatgacagctaacttaattgattccaacgttagctagagtaattatttattaattaatttcagtgctctaattttaattcaatgagcttcacaagttgttagtggtccactatgtggtatcaaataagatttttgaaaatgatatttttgtttggtaatgagtctcatcaggcatgaaaatgtagtgcagggtgattatctttttactttatgaacatattgatatatattttttaatggacgtgcatgctcaattattttatgtttatattcatttatatgcaagccaaagttatcttctaatcgatattaattgatctgtattggagttatttactcttatggcataactggcatttaaattactggcttcaaactttatattttattaagtaaagtaaaagaaaagattaaaaaaacagtaaaggaaataaaggataaaaaaatgtcaaaaattgttgtttaaagaagttgtaaaagtttcgctacatttatagaatttttacaaaatttaaagcttctgttgtttaaagagatcatttgccatatgctgatatatgattcaaatactcacatcagatgctctaaaatagagaatgtttataatgtttaaagaacttgtggtaaattaacacctatcaagaattaaataaaacaagaactgaagtattagagtagctgaattaaacaatgaacataaataaaaaaataaatacagaataaactaaatgaaatagagacaagatataacgaagttcatcaccctttttgtggtgacaaataatagaattttatgccctaaataaaatttatttcaatataatcttatttactaattaataagagattaaaaatctatttatgttgtttggttcacatgttactttcatnnnnntatgtttaatatataaattctattgaatcctaaacatatagttattcatgattatagtattgtctacaca

SEQ ID NO: 69272 - DNA, 837 bp, Cannabis sativa
atgggaggagtaatttattcatcttatatatatgataatttatttctacacattaacaatatgaaactaactctaatagcaaattaatttactatctactttactattaattcatgaataatcatatatttgtcttagtcaaatataaactaagaatgtctcataaaaaaaaagcggtaatatttgtaacaaagatcttaattcattaaacaattagactcaaaaacttatagaaagtctaagtgcgagagatcactaatctaatgccaccattaaagccaattgtttagcttgaactactactgcaaacctcccaacaaaactagcatatatctcaaataataagaatgacatgattcctttcaaagaaaaaagaaaatggtactaaacaagacttgattagctcttatttagtcattttatttgtgagattgttgtgttgctcttagagccttgtctcaaaaaaattattttcttttgcaataaattataattaaaaaaagttattcacaagatttgattttatcaaaatataattaaaaatatttaattataatcacaagtggcttattattctcaaattataaggctttttttttttttaccgattgagttttatttgattgatgatcccatgttaaaatatgaaaatgagattgagaaagtaggataggatgtatggtaaaaaaaaaatatgaggtggattgatccgctatggctttttttttttttttctttttatcatagatatctcatttttggacccattttaaatttagattaggttggattgtaatatatttcatcacaaaatgaattaccaatgcatagagtaat

SEQ ID NO: 69273 - DNA, 1077 bp, Cannabis sativa
tgtaataaaactacgaatagagggaagcaaaaagaataaaaatactgagctgaagaatacaaagaatttttattgaaagatctgagaaaatgacgttctattacagattatataaatacttaaaatgaatcctaaaaaatctcaactaacattacgttgctttttattttcctaaatacaaggacactaacaactgaatacatagaccaactcaaacataaaataaataaatagacatcaaataaatttgacttattcaaatagctctgtaactttgacagtaagttgcactaatttgcaacactcccccttagtgcagacatactgtcaacaataccaagtgcacttctgaacattgtaaacttagccttgctaagtgctttggtaaatatatcagcaatttgttcttcagatggtactttctgcagcttaatgtcttgcatcagaaccttctcccgaacaaaatgaaaatgtgtttcaatgtgcttcgtgcgagcatgaaacactgggtttccagcaagtttaattgcactttcattgtcacagtagatggaaattggatagtccaaaacaacaagaatttcttcaatcagcctcttaagccatatacactcttgagtggccagtgtagctgctacatactcagcttcacaacttgaaagagcaacagagacttgctttttactgcaccatgaaataactgctgaacctgtactaaaacaatacccagttgtggaacgcctatcatttacatcaccagcccagtctgcatctacaaaaccagtcagtataaatggtgcattatgtttatacaataaaccaaaattcagagtgctctttacatagcgaagaatcctctttgctgcaattaagtgaccttcacatggtttatccataaattgagcaatgacacctacagagtaagaaatgtcaggtcttgtgatagttaaataaattaaactaccaacaagtttccgaaaaagtgttgcatcctctaatcgttttccttcatctttagctaacttcaaggttggttccatcggagtagtcattgcttttgactcccccatacgaaaa

SEQ ID NO: 69274 - DNA, 1695 bp, Cannabis sativa
atgaaaattaatgaaaatgaagtaaatttaggagtattccttaggagattgacaatgtctagaagattatatttggagtttaacactgactcaaagagtatatcccgatactttgtaacattaagttcaagtaaaccgaatttgactcatttaatccgtgcctaaactaaagttaacagagagaattattatttaattttcttaataatgatctaattcaagcatgaaacatatagttatatatatgaagatgtaaacataagcaaagtagctaatcagattaacaaagtcaataatcatatatagtttagtctttggagtaaattgaaaaggttttgtatattcaatcaagttaagacaatgaacaaaatataacaaataatacaacacaaataatcaaataatcattaattgactcatttgagttgtgttactccatatatagctcaataaatgcctcttcttttgttccatatataaacatagatgacttcttggattaatcaaaattaataagtttctttgatttgataattgattgttataaattccaacacaaatattgattctttgatttgataattgatttcaaaaaagaacaactaaacaagtggcctcacctaatttgactaatttaactaattaaaacttaaatcaaaataaaatattactcttgaaaatataattaattacataactagtttaaagtcccataaattttttctgagtttaaaaatataaaaaaaattaattgataagaaacacgagccctcgcctcctcgccttcttgtaggatattttagtggcgagtcaacaaccctagcaaaagttagcatacttggggctaagtaatagcctctgagtgcatactaatgcatttttggtaacttcgtcattcttgtggtccaacaacttcatcactcgttccttggcgttgagcttcgtcactatgaatcgaccgtctatatggtgcttgatgaactgtgacagatcgaagcaagcaacagccaaagctcttggatcacacgatgtgtccaaaattgtaatcaggactcttaaaatctgcataataaggttgttatttgagtaattgatcgatcgagtatctttacgaaaaaaattaaaccaagaacatacctgaaagttgttctcttcaaattgcgcaatattattagaccaaaatgtagaatcttttcgaataggagaccaatcaagacgaccaatgagaacttcttttttgtaaatatcaaaagattttaatgcttttatcttatttaaattctcatctatttgatttaaagcatccaatagatcctgaaaatagaacaaagtgcaacccttaattttattataaataataataatagtgataaaacaaaaaccgattacagttagtcatcaaacctcatcactccatgtttgtaattttaaacttcgaacaagttctgataaatcaagttctatcatttgtgaatcaaatatccctttggggagcatgttttcaaaagtgaggatgacaattctaacaacctgccacacatttttcataccattacaaatatgaattttaaaaaaataagcaaataacaaacatggtgcttggaaatacaagattaagaaatcaaaaaacaaaattcattaagtaggggtgtagaattttagtgtaaaaaatgtgtgcacgtatcattactcaat

SEQ ID NO: 69275 - DNA, 674 bp, Cannabis sativa
gtatagtttttcaaattttcctttataatatgctaatttttgtctgactatatataatttcaatgatcgataaaactgtttcttcaatattaaaaaattaattttattcgaatgctaattgattgaatttagatttgtaacttgaatatttaaataaaaagtaaatcaagaacactaaatttacaaactttatctgaccttagaaacatattctaagcgattattgcttgggtaagttcccttgaaccaagtaaaataactttcattatgaaatcaattaagatacaatatccagttctaattacaactcaatcaaagtaaacataaatgaattcatacaaaaagttatccaaacacttgatttcaaatcaagtttacaggtttaagttcccttaaatttttgaagccaagattcccttgcttcttttcatcttttcagttgaaatcccttcagcagtttcatctgaactcccaaataatgcaaatcatcatttcttctacggctcctgaagatccaatgatttgttaagtcaagattatgcaattaattaaattaattgaataaatgtaaatattatggaaagcaaatagagagagcaaataatcaagcttgtaaagtaaagagtttaagggtaagaaattgcaaactctcaatttttacaaggttcggtaga

SEQ ID NO: 69276 - DNA, 634 bp, Cannabis sativa
aaaaaaagttattcatcctgtacatgatagattaagtaaagatttgaaatcaaagtaattatttgaaacagagttggtggaatcatatagtatatagaaagggagagataaatttaaagtaaacaatggattattttctttcttccctaattgttaattaatggtaattaattgttaggtgtattttgttattgacttttgggcttgttaagtgactattatatcaactgcttgaaaggttgttgcgctactagtactgacatgattttcatattttctttttcttttgtgtttatatgtataaatcaatctaattcaatagaaactgaccgatctaaatataattgaccatcaaacattgaatattcaattgtgattggatcggattgaattattatttttgaatatctaattggatcgaattggataatagatggggtgtccaaaaatccaatacatccaacatctgatcaaaccaattagtattttcatttagtttggataaaaatttagaagttatattgttatacgtaaaatatatatgtatatataaaaattaactttaaattttcattctttttttcttggattggattcatactggacttacaatattagatggatccaatccaat

SEQ ID NO: 69277 - DNA, 2265 bp, Cannabis sativa
  modified_base (332)..(341): a, c, t, g, unknown or other
aaaaaaaaaaaaaataagaagatgttttgtactgaattatatagaaaagaagatgttttgtactgaattatatagaaatcaattagatataatagtagtactgtcataccattcaattaataactattattagcatttagcaacacatataaaagtcttgtaattaggagctctctttaattagtgcagtaatcatatgataattcaagaattaatgcgattggatattttatgcatgggtccacatattagttttcaaatgggtcacctaaattactgtactcacttgattttagggattttttttttaaaaaaaaaaattattattattnnnnnnnnnnttattattattattattatcatttgttaatgttgaaaagattgaacatgtaaagtggaaaaatagtcaaattttggattttaagaaaggcatcatcaactttctaagctcaccattacatcttgtcgtctttataacttgataatatttgaaatttagtctcttaaatataataagaacgagtgatacctaatcctttgtgttattttataaattattatcgatattataattattaaattaaattataaaattcttgatatacttaattataagcagtacttatgcctttcaacatttttcaaatatacatttttgttttttcatgaaaaagcctaaatatgctctttttaattaatattattttcacatctaacaactacaacaaatataaatgtcattaaaaccattgttttaaaaattaagcaaaaacaattgcaaccacctacctcaccaaggaaattaaagttaggtttgatgctaaaaaatgtattagtgattaaaatttacaactaaaatttacattgattgaggaatttccacattaaatacttaaaattgcactttttttttaatattgtatatatttttacaatttttgtttattacatatttttcgcgtgtatattttttctttagaaaataacattatgtttacattattttcatgtagcagtaacacgaaaataataataaaaaaataactatatgtatttttgttataaaaaaagttaaaatccataaaaatattaaaaagatatagtagattcctatgtttgtaaactttttttcatttttgagtaattatagaaatatctcttgaccaaattagttgagactaaagatgtattagtctttgattaggagggtaacattgagactaaatatcaatgttaccctcctaatcgtaatttcaagtttgaaaacgcttggctcaaggagccaatgtgctttgaaattgtaaaggattgttgggaaagtgggggtgatgatagtttgccaagtaagttggctcggtgtgcagataagttgagtatttgggggaaggaggtgactggaaatttcaaagttcgtacttctcgttgtaagaaagagattcaaagattggctaataaaagggacactgcctctattcagcgtcacaaagaagtaaaggaggagttgtttcatgttcttgatcagaaagaatccttttggaagcagcgttctaaacaattttggttgaaagaaggtgatcataatagcagctattttcataaggctgccacaactaggaagagacataacaaaattgttactttgaagaatgataatggagtccgtgtaggttgggataatgggcttgctcaagtgatgattgactacttctcaactttatttcaagcttctaattcgacttgtcaagaagtggttgatagtgtcaatagctcggttcctagctttgttcatgaggagttgcgtatggctgtttctgaaaaggaggttaaaaaggcgattttttagatgcatccaaacaaaagtcctggcccggatggcatgacacctgctttttaccagaaatgttggagcattgtgggtcgtgatgttgtaagggctgttcagagattcttttcgacaggggagtttgaaccgggttgtagcaaagctaatattgtgttgattcctaaaaagaaaaatcaggaggatatgactcaacttaggcctatcgccttgtgtaatgtggtgtacaagacaatcacgaaggtgatggtaaaccgtatgaagccttacatggatgctatcatagctgacactcaaagtgcttttatcccgggaagccttatttcggacaacattctaatttcgtttgaggtgcttcactacctaaagcggaagagaaaaggaaaagaaggttttatggctttaaagttagacatgagtaaagc

SEQ ID NO: 69278 - DNA, 1102 bp, Cannabis sativa
  modified_base (1075)..(1076): a, c, t, g, unknown or other
ataatgtactaaccccaccattattaaaatactctctacaccctctttaccacaatattataaattaagggacagaaaaatatctctactataagaacaaaaatggcattccaacaataaaaattttctatatatatttcatgcatgaattgtacttacaaataaaaaaagaaatcaatttcctattagtaaattttcgaaatggttaactaattaatgaagtaatcggaattatagatataaactttgtggtaataataaataatagaagaactaaccttgaaagtaataaaaggtcattaagtagtggaactatcaacatcataggtcataaatatttgaaataaaaataaaaataaaaaacttgaatatagctaagaagaattctttattcttttccttaaaactaatctagtcttataaataatgtgattgacctttcatgtatttatatatttcccaaagaatttaattattaccaagtactcttctttttagtaaaggacaagtactctttctgcacaccaagtatactatatatagggtacctttttaaactaaaaaaaataattatataataaatccttttcaacttcaagaaacaaaagaaaattaatataataatataatatctttgtttttgttttttttattagttttattgtgatattattcatttggctctacactccattgttgggataatatatatatatattaatcttctcctccctccatatcaaataaattaatattttccttgtcaactttaaatattagaactctatttatattttacaaaaacaatacataaaaagaaacatttagacatgcattatatagtttaataagaatatcatgatcctgttgaaaataaaatcgactcaaaatgtatgattcttaacatattgaaaatataccaatgcctttttcatattaaaaatataaattatacacaaacaaacataattgttttaattttactatagaataattagcatttttatttcttgaacttttccaaaaaagcgtgcaagtgaggacaaagcacgctgaaaatactcgtgttggtctnnagggtcagtcatcaatccaggaagca

SEQ ID NO: 69279 - DNA, 1512 bp, Cannabis sativa
taaggcattggcacaacctacactaacaagtaaagacaaattgtaaagtgagaaaaaaagataaaaaatttacttaaagttatcccaagcattatcaaaagaaaatatttatagaattgaagaatgaagagagggtgagatgagctaaaatacctaagtttataattatttttttaaggaatttagaaaataaattaaaattacagcatctttacattttagattagttatattttaattttgctttaagtgaggtgacttctcattcatctaatgcatcaatatttgtttatttttgtatgctctaatgctctatcaaatatgatcatgtctttcaaattctgtatatattttctttaataattattcaataaaccatctttgtattaatatgtgatgtaaaataaatgatatatttttaggattttttcaattttacactttaaatagttttttttttgtattttcacagaaattcacatatcaaccgaagcaacctaaattacaatctaaatctatatagcaactcacataaaaaccaccagagcaacttaaactgtaaaaataaaaagaaaagattaaagaatagtatacgaactataatttccctatacttttcttagaaataattggttactctaacatatttttttaatattattttatttttctgatgaataattttttgaaagaaagtatatctattttatagaaaatgtggctatgtaacagatatgagctaatctaagatgccacaaaaataaagaatcatgctcaatcatataagtagaactagatgctttattattactaacattgaaagttacatcattggtgcataatttcaccattccctcacaaaagtatcccttgcacggaattcatctcactaagagtggcaatgatatcctcctcgatagcatttactttggatcccttaaagtcttttctatgcttacaatccttagcatagtgtccaagtttgccacacacaaaacatggaccttttttacctttttcaccagtcttttgtttgtgattgagctgtctaagatggtaagtaaaaaataactacaattttgagggagaatattagagttagagagcctcaataggtgggaaagataatatataagatacatgtgatactctcattatcaattaattttaaaatagaacctcatcttaaatattgtaactcaactagatcacatttatttagagcacttatataaatcataaacataccttaacattaagtattggttccacaatgcttgaatcactataaccttccaaccatccaaaaaaatatgatagtatggacaaaaaagattatagagagcaaccccatcatcctatctcgtaccacccattatatatctttatatataggacatctaagttaggaatattagtggaaaatttaaatttatatgcatatatttaatatatattaaatttttgaacacaagcttactaaaattgaataaggacttttttcataaatgt

SEQ ID NO: 69280 - DNA, 728 bp, Cannabis sativa
tctcaactgggaatcagggccaactgtttgttataaaaataatatgacaagcaaatgcagtatatttatataggtaaaggttcaaatgtactgcaagatacagcatctaagtataatgccaaataaggtactagctttctagcttcccattccccaaagttttgcttctccggtacctccctctttcttccacccccaactgcattcttcaatttgatttcgataataacaatgaatctggtaaaaataacaatagagggaagcttaccttcaagctctcttgcatcatgacatacaagagtccaggtgtttctttctcaatacacagcttagttgcttcaggggttacatcccgaggggagaaaccagtgccaccttgatcagaacaaaaactaatgttataaaagtgtgacttcaaaagtaatgatgaaaatcttctcaaaatacaaagggaaaaatccttgtgtttaaaccgaaatgtgaatacaattttttttgttttaccaagggtgaggatgagatcaactttttcaatatcactccatttctgcagaacatctttgattttgctcacatcatcaggtactgcagctgtcaaaacaactctagctcctcctaactttcctgctgatgaatttacaacagaaactgctctaggaccactgcaaagttatagatcttgttgtaagacattatgtacttttataaaaaggactccagcacatgca

SEQ ID NO: 69281 - DNA, 863 bp, Cannabis sativa
catatattatcattgatttaacgattcttatatatatgagaaacttctcatattaaaaaagtcaaaataatgcttgccacacagaggggatgcccgatggttggatttgcgtagtgagataacttgtgctttgtttttgccatgacttataaccaactcttttataggcctccatacatagacgtgctagctcgaagaaaaaataaaaaaggataagagagtagggtagcatatgctgaacacacatacgaatatccatattcaattaattaacattgctgattttgtttttctgtagatttattcaacatgttcaatgttcatatacctgggcttgaaaatgagttctcacaaatacgattccccggccacaatataaacttttacatagacaaaatgaagagaaagggacacgagtagattcctaataataaaactataggacatgagtaaacaattacaaggcatatttcaagtttatatctttcttttttttttattattttgttattacttttagcttttcgttgtcagatgagaatttaagggtaatttcaattaccataatataacgccatagtgtttccattttcttttaatattcacttggtagtgggcagtgtcttgcacagtggaaccctagcgccaagcccagtagattataatgttgaataactactataaaaagtacgattctcggtttttatgtgtcattttaaaaatttatgtcggtttagaaaatcgacgtacatgtcatagtcgcaaatagttttttattagcgccgtcgtttttaaaatgacgcaaaaaataattatatgcttcaaaagacaaagtcctatttcattagtgcattgaatttaca

SEQ ID NO: 69282 - DNA, 820 bp, Cannabis sativa
ttaattgattgattcatgttttttaattgatatattaattgattcatgttttttctttctttttggtgtgtttcattctatcagaaaatgccaaccattcaggtctggtcaccctcttactatttacttacctctgtttcttcttttgattaaaatcttctccccaagtttttgttaagattgatctttgtgaatgaatttctttaaaatgtactggcagttatggaaagatggtgagatgaaagaagaagttattggaggacataaagcatggctcgtgattgatgaagtgagagaaatgatcaacaaatatgtgtaattatccattcaatcttctttctctctctctctctataatgtgtaattgtaattgtaattgtagtcaaatccatcatagccctcccaaaaaaatgtatagtcttacatataagagaagtgaaatgccaaagcatacccaacttatctgataatctcacccagaatttgcaaactgtccacactgcatcaaaatttgcaacttgaaatctttggcggtacagttgcagattgcacaatgcaattcaaacctcgatgcattattagaaaataccaaattcttttatattatattatttattaattattacaaaataatatattttagttttatttgtggtaatgctacagagctttataaaaaaggtacttttgttataagaaaaaaagggttttatttttgtctttttccaatacaaaaacgtcgtacaaatatgaattgagaatcaggtcttttgctgctataataattagagttttgctaatcggcaccaggtgctttatg

SEQ ID NO: 69283 - DNA, 762 bp, Cannabis sativa
agatcatttgatctaagatcaattaggtgatattgaattaaataaatattacggtatccctttcccttgggtagaagatgaatgccaccaaaattttgacatgttttgctctagatctctactcacatccaaaggtaataaaaacacacatatcatatcgtaggagtgattgagccaccatttttatcaacccatccttccgtacgaaagaaagaagcttcacatcccacctgtgcagccttttacaaatctgatccttcaaaaaacctagaatcaccgatttatttcctcccatcatgtttggcaacccaaatacatactattctcatcatcttcatgaataccaagaatctgacataagtgatctttcgccacctgaggagtgtcagtacttaaataaagaagaggacttggtcaaattaactagttcactagatagaacctttaataaatgcaataatgacatcacattccgagtttcctcaaacaacacatgagtcacattaagagcaatgtgagccacctgaatcccatgaagacatctctattcttcataataattaatcagttcctagaaaccctttgcataaagaataaagttgtaaggtgaaatctgatcaccttgacgaatacccctcgtaggattaaagggacccatctctatacaaccatgactgatcttatacataacctgtaacgccctaatgattaggcacgctacaatgctcttttgattattatgcactcctttactaatcaaag

SEQ ID NO: 69284 - DNA, 1057 bp, Cannabis sativa
  modified_base (984)..(984): a, c, t, g, unknown or other
attttttttttgtttaatttttatccaaagatttgatgttactttctctcaatcatcgaaagatgtagaaaccaactttttttttcgttttcttttgatggatttgtttttaattttttgtgttgtgtatcaaaattatcctcttttcacttatcatattcattatttaggggttataattttaccaatttaccctatttgtccttatcaaggacctcaagtttggtaggttgtaaatgcaccaaaactattaattaacattttttaaattgtgtttagtacaaaagaacatatggggtagtagtataaattatcaattatgtagggggttaaatggaaatttaaaaaaaaaaaaaagtaaaaagaaatcttagtagggactctatgtggcaccgccattggtgtgttgatgtcataaattcttaatgagtcaaagtttattgtaaaattgaatagtggctatggctaatggctatgatatgaatgagacatcaacccaacctaactctctctttgattacgtctatgaatgaaactcttttttgagtctaaaaaataaaaatgaatattctcttctcttctattctcttgcttacaaagttgaacttttattgtttaattaacctagctaatatttatcattaagtacatggattattaatactaattaagctcctaatgcctaactttttgtgtctattcatataaaaaatattaaaaggcacaagttgtgattagtacatagtcaagatgttatgatgttcttggtataattaagtatcgagttctatataatttaatatgaacttttttataaaatatcgttaatcattcttaaggtgttatttcgtagtagtactaactaggcactacaatgcctaatagtaatatttttaatcatatattggtataaattttttgagcaaggtatctagtaaggtaatttcatgggtaacttatacatacagtagaacctctatttangaatactctattcaagaataacttctaatttattataaaaaaaatcaagtcccaatttgggctagttataaat

SEQ ID NO: 69285 - DNA, 2825 bp, Cannabis sativa
aataaataaaatagtccagtttatccttaaaccaaatacatgattactttcagcataattcaatcttgttcagtccagtccaatctttctagtccaattcagtctaattttgtgtaccaaacggactcttgaggaataagaatggaataggtgggtaattgggttttgcactaatttggaattaaagaatgagagtggcaattcccaagtgatgagattgtcactcctatttcttttgaaatcatgaattgttatatttatttttatttaattatttttttatatagttctacacatgtaatgggaataataattattctgatttaattattgcaagttaaagtaaataaattttttttatttgaatctgatggttaattcgattcttttactagtaaataaacacatttatgcacaatagtctcaactcttatgcaagtccctcttataattatatatagaaagaaaaaagaataattaaaaaataatttattgatttaaatattaaaaagtataattaataatcaaatttaaataaaataaaaatgtgtattaaattaaatgagagattttttttatttctaattaatagaaatgattttatttaaaaaaaataataaacttgaaaagttgttattatctcttaaaatataaagggaaatttgtgactaaaatatttaatttaatagaaatgaaattatttgacaagttatttttatctcctttcttctttttccttttttttttaattcaaattaactttgttacttaagagcaatcactcaaaatgacaaataacaattttggatgagcattctcatttgtaaacatgcatccatcatacaatcgagactgtcatgaaagtacatgtgccgctcgattagttgaatgtttaacaaactaaataacaacattagtcaaagtacctaacaagttcttacaatcttgaatcataagaccaaaagctaagaacattttaacatcactatcaatagattgaatcaccactaggctatttgtctccacaacaacctatgaaaattgtgcattttaacccagctcagcacctctttaacccaaacctcctctgcaacttctgatgccatcttacccggccttttaaccgttgaagcacctcacaattgagcctcccaatcccgcataacaaagcctaccacaaacctaatttgtctaaaaaatgagcgcatctacgttaatcttgatacaattaaacgctggtttactctaatgctcaataccattgccagaaaaaattggattaaaaaatgtatattacctttattttgagcttgctcccacagatcactatttcgaacaacaaactctaccacctgatcaattgttcgccctttttgctcccaaactagctttttctagcccgccatatcacccaacaaaaagtacccacctgagccaacttgtctacctcaaccaactccatggcagcctcaaaccagtcccaaagggaagcaaaatctctatgtaccatggccaaatccatcttctgccaacaatccccaagcaaagtcacaagaaattaagcaatgtactatagcttcattaaagaaagtacaaaacggacaacaaagatccacttgacatgtttatcgcgaagcctttctttgttggaagacaatttgaagcagctcgccataggagatcttttactttaggagggacttttagttgccataactttttccaaaaaaccaaacttatcatctcttaacataatctttcgtcaactaaccaaagaaggttgtaaacgagaaaatttaactcaaactttaatggttgtcaatggtaaaactgttactaatagaaaatgaatcacacagagttttgtggttcacctcctttgatttggcaataatgggctagtccacttgtagttttattattttcagtgctcaaacacacaccagagttatgttcccaaagtaatgcatttaagtatttcaatggcaagatctcttttcttacaggctcacaatgatggtggctagaaagttagaatggaaatctcttttattttctctagggttttcttgagtacgactaaccgaagagaaatgattaaccatctagactagaatgcgattaggagatcagatagcaaaaagactgaatcccctagtctaggtcaatgccttttataatactatggtctgaccatcactccctcacacttcagaagaatggctacaattgttacaatatttcacatttacaattaaataattaacaaataaattacataaaagtaaatatcttcttaatttgcgaagttagtttacatttgaaaagcttttggaagcttctgtcttcaagaaatgtactgaatgaagtccataacttaaggagataatatcatatgcgaccagtggcatgagaatggccactggtcatgtataatgacttacacttgccattttatgttaccttgagaatgtcttagagcttggtccaagcttgaaggttttcaaggctcccgaaatgtccaaggagcaatgacttatcttttgatcatttctcacatatagcttcccaaatacatcaaagttgcatcaaatagtgcttttccatgtggtatgcgaccaatggcctagggtttggccttggctgcatgcccaagctcctttccgtctcattgtatgcgaccactggcctaggaaatgccatggtcacatgtgatccctttctttccctctatatgcgaccattggcctagggtttggccttggtcacatgagggcttatcttttcccatcattttatgcgactactagccctagggggagcca

SEQ ID NO: 69286 - DNA, 2704 bp, Cannabis sativa
  modified_base (2351)..(2362): a, c, t, g, unknown or other
aactaatattttaaaaaatagaataacaaacttatcttatgtaatatttttgaatgattaaacaatttatgttatgaaatatatagtaaaggttataaataatatttctattttaaattaaactttttaaataaaaaaattacaaaaataatttttttttttaaaaaaaatacaacgtgctttgcacgtagttgccttctagtatatatatatatatataaggcacattttagccttgtcgtgaatgcgtacgtacgtgttcaaatatttaaacagtagaaaacaattataaatagacatatatatcttgttcaaaaaatatgtatatgaaagaggagtggacatatggatctggtattgatataattaacaacattatattaagtgacttaataatgtttttcctccactatatttagattaagaccattcacaaagcaccactatatccatttgatcatgatattaagaaaaaatatctttgcacgttttgtacacattgtgatcaatttccacgatgctgcatgacttcaacaaaaaaaaaaaaaaaaagaagaaaccataattatacatatataaatactacaaaaaattttacatttattattaatcataaaatttgtgattaattataatatataattcctaactatactaaaaatattagtcacaaaaatatcacaaaaattagtcacaaaaatattgttggcttttgccttgtgtttgtattgtttgtcttttgaataaagctttccctttttttaaaaaaaaaaaaatattaatcacaaaaaatataatttgttatgactaaatacgtttttagttacaatactatattgtgattaaaattaaattagtgataacttgtatctaaatattatgttttagtcacaagaaatttacttttagttacaaaaaatttatgttgtgattaaaagattattactaaagataatattttttagtgaagtgcaaaaaattagaatgtttatactttattatgtgaaattgatgtgttaattatcaactcaaaatttccatacacaaaatccttggcagctaactaaaatcaaacgtgtctaattaactttacaaaattaatagttgtatattaatattagggtttctcatgcgttagtttatagttacaagaagttgtttttttttcaccggccagacctgtcgatattttatgggcataggtgcaatttgattgggattgtgttttgctattgggattcgatttttgctactgtaatgagtcttatctctgcgacataattttgagtatacagtattgtttttgttacatggttttgagtattttttgtcttttattgtgatattattgttttgttttcattggtttttatttttattttttgatggttgccttcaaatagtaatcgctattagctagtgattggaaataataagttctttgtgactaaaagaatttttagtacgtagtgcagttatgtattttgcacaataattgaatgctcaagttataagtttgaatgaacatgctacaatattttctactgttatgtattttgagcggtaaatgaaactaaatgtaagtattcttaagattatatgtgatgttgcaatttttttcatttcattttacttttagtttattatcaaatatgcaatctgagaattagctaggtgattgattatttttttttaattttatttctgatcgtgtctttaacaataatcccaattggattacgtacactcaataattttatatataatgacatatttgcatattcttaactatattaatatgaagatggggccacaaacataaaggaacctaatatatatgtatttatatatatcattacgcaagatatacagaaaattctatggtgatttatcgatcactacagtactacgtcttagtcaaaaggttcaattctttagtaaacggtatgagatcatatatactacaacaacgttatatttttggataaggaagattaatattgaaaaggatatatacatatagatgattggtcatatacatataaatatatattgattattaggtatacacgtactatatatcttcggaattattaggtatgctacacgtactgtaaatattgtttatggagagtttttttttgttgaatatatttaacattgtttttttctgttcttataattcctatccttttggaattaatagatatagttatcttagcaaaaaagtaggataattgctatgtatacgtacacagagaggacactttacagacatggcaaaaagtagagtcaaaagtctccctttgattccatcatcattacacacttgaattattattattattatnnnnnnnnnnnntattattattattattattactccattagtagtagtaatatatagtactacaattattgtccaagttattattaacttgggttataacatcacatacattgataactaataattgaagattcatttgtgtccccatggtctaaagtcaccaatattataacaaataataatgttaattgtaattcattatgtttcgtctttttggtcacactaataattctgacattaggagtaggaggaggaccatatgacaacatatatatttcatgttagacgtttatatgtataaactgaaatatacatgattatgaataaagtgcggaattaataaatcatatatgc

SEQ ID NO: 69287 - DNA, 530 bp, Cannabis sativa
tatacaaacaaatatttgttcgtgaaatgcacgtttgtagtcttgaactctagcgttgtaatttgcaaataaatacataaaattattataatttatgtggttaatgattgaacatttgggtggcttcaacaagaaccgttcttcactttctaataagaaacaaacaaacgtggattaaactacttaaccaactaatatattcccaatttgcaaaacgccaagcaataataatttgtactaatattttatttcataagaaaagaaaatcgagaagagtttatatatgctaaatatggtgatattttaatgctcgaaagggtagtcaaagtcttcaataatcagctgaaagagagtacgtatcaagatttttctactattattatatttaaatctcaatcaccattaaatattattgggtttttgttactaaccaaaggtaatattagtatttgttttattttggtatcgatgccaaagttctattttgttttgtttgattgagtcaagtttttagaggctgaggattttat

SEQ ID NO: 69288 - DNA, 712 bp, Cannabis sativa
  modified_base (685)..(687): a, c, t, g, unknown or other
ttaatactattatactttgtttacaaagaaaaaaaatgatctcccattcaattttaaaactaatcactcctaaattttaaaatttattttcactcttaaaacaatttagtataataaaatacatatgaaggccgtttttttttaataaatgtgattacttttttaaaaatggcctactcttaaatttatttttctacaaagtagtttcttcacttgtttagcagcttcggatagttatttttttaaaaaaaaaaaaataatgttattttatatatataatattattgtatgagtgagtatttgattagggtaaaaatataattatgatgctttttttttttaataatttgctatataacatgttcctgataggtaaatttttatttttagatttatattatttatatatttaaaataattaatttttaattaatatatttaataaaatcttttcaaaaattaaaatttataattttttttattttataaaaataaataaaatcatgttagtatcataatataaataatatgttaattattttttaacaaatttttaaaattaatttcaaccatctaataattcaaacttaaaagtaaatgtaatatattatttaatctaactattcaatttttgttataaaataatataaaataatataatataatataaagtagatgagaagannnaagaagaagatgaagagagaaagag

SEQ ID NO: 69289 - DNA, 676 bp, Cannabis sativa
aaaataaaactaattactatagtttttgccaatgaatccccttaatatgtacaagaggtccctttatatagtgttttggggacacaattataacacaataaaaagaaaataaatctgaagcaaaaattgtgtgaaagtcaatacgaaaaattacagtttttaatctaatcactaaaacaatgggatttgattcttaaaactaaaataatgggatttgaattaaaagaagttggctggaagaatattgcctttccaaatcaaagcacaatgatggtccaccttgccacatgtcgatcacaagggaagagaccaagtcatggataggaataagacttaatgagcaacttggaattatataaatatatattgaatagctttagtcacaatatgatccgcatggtagaaatttgggctgggcttgatgttatttcttcttaaattgggttcttcccttgcaagaatgtcaatttttctcatttctttctttcacaattgaatcattcttttcatttgtatcaaaatacacataattcctgcaaaatgaaccaaattaaattcaaactaaatattttcagttatacaatatatttttcattaatttcatgaaaatataaattaaaatttaatttagtttaacatttgagatcaataaatatgcattattcaccaccaatca

SEQ ID NO: 69290 - DNA, 1418 bp, Cannabis sativa
atcagcaccacaacttaagagaatatctacagcttttgcattgttacataagatagcatggtggattagagttcttcccaagtgaggagtgttaggagaaaggtgttggagaagcatggttagaataacaccactggcctcaaaatactccaccgcacaccaagtgacactgtaaggctctgctagtcctgccccaactcgaaaatcctcccctgtattcgtgtcccatgaccatgctccaagattcacttttatatcagttctgactccagcctgttgatttgttcataatattattgtatgatatttattacaataaaaaatatatctatatgtataaaataatacctgtaacaagactctgactacgttaatttgacgactaactatggcagcaacaagggcactgcagttgacattggcatgtagaaatggtttggaagattgaagcaacaaacgataggtagcattagcatccactccacactgctaacaatcaacatcatctctgtcaacatcatcaccaaaattcatagtatgttcaaaacaaatacaagaaagaatcttttacacacaaccctttgttattgctcttagaatgtatatatctttagtaaaaaatcacaacaaataccttgagaagagcgcatacgacatcaacaaagcctctgcaggaggcagacacaagagcatgaacagcagcctgagagcggatcatgtctgaggccatgagcatctcagcaggcctagcaagtcccaagtagctggcttctaataatgcctcctcgcatgccagctgagatgccccacaacttataagaacttccaatatcttcaagtgcccttctctcactgctgccgtggttgggtacccccgaaacactctctggttcacatcggctccaacattctggagtagtaattataataagagaagaaattaagctcaacaatattaattagtggcgtttgaggtgtgagcagtgtagttttttctttgccaattttgaacaattttccaaattgtaactgtaactatagaatctaaagacaaaaatactagtgcagtccggtagctcaagatgaccaaacaaatttttataataaaataagtattgctatttgagcaactctaatgagtgttgctataagtagtgatatcagaagtggtatagatgaggttgttgacctttttttgttaacctttttttgttagacattttatatgcataaataaaagatatataaaatgcggaattaataaaacatatatacactatgaataaagatcgaaatacttccagattttttgagctttaattctatacaagcaatccttttttttttcttttttaagtggttagtttataaattacatttaaaaaattaataatggatccatcaacgttaccttgtta

SEQ ID NO: 69291 - DNA, 2109 bp, Cannabis sativa
ttttttttttttttcatgaaatattctttctgtgtctgaaatcgatgccatgtaatgttttttatttagcatcttttcaccatgatgcggttttgctctactttttgtattaaactttagaaataatggcattttgctggatccacacgttattcttctaccttttaaacctttttccttcttttattttgaacaaaaaggccactcaaatctgaataatttattataaaaaaatttaaaagtgatgcttttggaggaaatgtttaccttttagtttgtctttttctataataataatacattactgttatatgactgttaaacccacccaacaatggaaactttttccaaagaattattgattgttttggagaaaagggcaatattctgattcatattatataacagctcaattacaaatcaaacacaaaaagtgtctgttatatatattgaagaacccaattacaaatcatgctcttccaatccaaaatatataaaaacaatacacaaaagtcacactgaattttaaccaccatgccttggtgaccaaaatgggttatggttctgatgagtagcaaagagattggggtggcagttctcatcatcgtcgtcatcgaaagtcgtccatcgtttcgagttgttgctgtgtttctctcttgctgcacttctcatgttctccatctctccaacatgatctttgaactctttcttcaccacatccaaaacaacatctccatatctgtcacaccatgaccttaacatagcaaaaaaagaaaactgattaattttgtacatcactcaatacattttttacaattcatataagaaaaatgaatcaaaaacataaagaatatatagaatctgctttacttggggaaaaaattcttgagctcagccttgtctactggaagcttggtagaaattgcttcaatttgatcattcctaaagaaaagaacaagaaccaaatcagaatgaaaaacaatgaaaaggaaaaacagaaaagatagcacaaacaggtaaggtgattgagaaaacatacgagaattggagattaggatttgtagttgaaagctcagtttgaattctggagagctctttctttatcttatcccctaaaaccttcaaattcaaacatcacccaagttcagtttcaactcaatctctaatatacaatttcatgaattcagaatgattgatttagttaccttgtcaatgaagaaatctgatggtgaaccatccttatgtagcttctttttaattagcttggtgtctggcccttctccaatgggactggctactagatggtttgagtaaacctcagagtcagatctttcattaagaggtagtggagctgtctcatcctctgaatcattcttactccatttcttgaatccatcaaaaccccaatgctttttcgcagattttgtgggtgtttcaatgttattaggacgcccacgatcaccgccgctgcagccgccactgcttccactgccatgcccctctctctgttctttctgaaacagagacttaaatggttttctctttgccttttctgtgctaacagtttccctaaccggctctggcgggtggcttcctggcatgagaattgtgctcgtttcattttctttactctgcaaatggctatcccaaagtgggttttctccaaattttcccaattcatgatttgagaaggcagaggcagagagttttgattcctccaaatcgaatatgctcttctcttctttgtgtttccctggtttgtaagaagaaacaaaacccaaaactgaggctgctcctttcatctgcttctttgctgagctttgctttgatttgctcttcgaattagaactctctttgtttagcaaacagttttcatctttcaagtcaataactgaccattcctcttcagaactatgctctttgggatctcttggtgtggccccaacaattacatctttggcctcaatttcagcaccttgcactgccaatctttgtaataatggcctctttgaagagtggtactcctctgaagatatacatttagcatacaagagctcctaaaaaaagaaagaaaatcaggcaaagattcagatttgaacagaattctaa

SEQ ID NO: 69292 - DNA, 730 bp, Cannabis sativa
atattattagctaataagcttaaccaaatgaaacctatatgtcgactactttcaatggtataggttatttgtttattgaatgtttttataattctccaaaataaaatggaaattttatttctcaaactttctcttgctctatccttgtcgggctaaaggaagagatagaggagaaaaatctaaacaaaagagaaaagagaataagacttttcaaaaattataatatcatttaaaaaataacatgtgcacctataaattatacaacaatataaatccaaccaaatatgtcttgtcaaacattaattttgtttgtatatattgtttttgacacaatttcttttcttcaaatattttaaagggcttcttgtcaaaaaaacataattaataaaaatcactgtcaaaaaaagaaagttatgaaaattttacagtgcacttttattaaggatgtactcatacatttttatctattttagaatttagaattttatttttcatagttgtgtatattgtagttatttaagataatttataaaattttaaaattttttaaaaaatttaacacaccaaaagtaagattcaaacaatctaatgcacatgtaatttttttattttatgtgcaggtaaaataaattgtttaaacatagatttttatattgtaaattcttttgaatttttcaaaattttacaagataatgtataccactataaaaaaaatgagattaaaaatttc

SEQ ID NO: 69293 - DNA, 1253 bp, Cannabis sativa
tcttgaagatttcgtttagaccatatttggaaattggtttcttcaaataatcagattttcttttcaagtgaactagcttctctggttttcgacggagcaagtactcctccggagttcccattggaatattgaaaaagaagaaactggattggacccaatttgtttcgatacagtcagactttctcaaccccatttctggaaaactctttctcataatagagatgagtctgtccgagtctcccagataaagagcaacgaacgaaactcggagagtcttttctccagtttgacttgatttgaccacgtctaagatcattctaatgaaaaggtcttcgtctagcttaggtgccacctcctgccaacggaaaacgacgtcgttaaccgcgttctgttcttgagttctctcaactctgaaaacggtcaccgtttctgggatacgaacgaggttgatcttgtaagccaaaacaacgccgaagctcgctcctccaccgcctctaatggcccaaaataagtcttcccccattgaaattctatcaagaactcgaccttccacgttgactaactgagcgtcaacgatgtggtcaacggtgaggccgtactttctcatcatgttcccgtaaccagcgccgctgaagtggccaccgacacctaccgaaggacatactccgccagggaagccatgcattttgctgttctgggctatcttgtagtaaagttcgccgagtgtagctccagattgaacccaagccgtttcggtagccatatctatatcaatggagcagagcttctgcatgtctagaagaaagaaacgtgtttctatggaaacgtaagaaaggccttcatagtcgtggccaccgcttcggattctcatatgcaggttgtgcgtctgggcagatatgacggctgcttggatgtgggagacatgggttggaacgacaataaggagaggctttcgtgtcgttgaactattgaaacagaggttttgaatgtgggattgaagagtcggagtaaacgacgtgtcgtttggagtgtggattaatgctttggatattgggtgagaggagttggagtttgtggtcaacagtgtgtggatgaaggctgaggtaagtaaggcatcgtcgtccatgtttttgaacattggagctttggaatttatgttgagatgtgattacaggaaagaaatgaaacactgaaaatatgtgtgtgtgtctgtgagtgtgggtacatacatatttattctatgtgtatgattt

SEQ ID NO: 69294 - DNA, 784 bp, Cannabis sativa
atacaacttaataattcatcaatagacttccacacgccattggttgttgctcttcaatgtttctaatatttcatcccaattttttccattattatttgcagtaatattcaaaccattctcaattggtgtcaccatttttttattaccactcaaatatatgtaggctcccttaagcaacaactccaacacttcactagcatactctacaactatgtcttgaacatatttttctccactagtcaaagctatgtcatagcgaaagttttcggggtaatcctttagatattggttgaattcgtcttcatagagtacactatcagcatttgacaccccatggaaaagccacacgaatcctgagaatttgtatgttgggatttcttctttgaaaaaacgacggagatgggctctgaatggagctatacccgtcccagtagccacaaatatgtgagttgctttagggttaaaattcccgagaagcattgcctccccagaaggacctagggtttcgaatttcatcattagggaccgatcgatacatgtattatatatatgatgagttaattaaggcattgcataataaattacctgtgagttgaattttatctccgggctttgatttgatcaaaacttcactagtgctaccaaccgaaagacttacacataagcttgccgttctaccattaaacatatctccatatctagaagaagcactagtaaagtatctaagttgtgatgagtttcctactgtgaaaggattttctggctgcgaaaaaacacaaaattt

SEQ ID NO: 69295 - DNA, 968 bp, Cannabis sativa
  modified_base (898)..(900): a, c, t, g, unknown or other
ttcttcctctgcttaaatctttcaagattagagatatagaacacaaatgttatgtctatctgtgttgcttaatgacattgtttactataatactaacatgaatatgttactttctgctgtttgttttcattattattattattcggctgatgtgttgtttttagagattgaagttagagcttttgagctcaaagcttgattcttccatggtgattttgtgtattttgtttagttttatattatgagttgttggataagtttagtttgggtataaaacaggagaaagattactgaaggaatttgaacttttgcccctggcccagtgattgatacagaagctcatggcaagcggatggtgcctaaggtggggaaagatctggcaccttttgctgtgaagcttttggaccaagtggcaagtagtgtgtgtgagctaacttcagagaagtgggcagtttgccgcagcacgacactttcactttggctcaagttgtcaagtattaggttatttttagtctaagtttcgggttttttttatagttttttttcttctttgttattatttttggaatataattacgcttgtttattttggttttaggtttcgatacttggaatctacaaattaatcaaaatttggaaaacaatgatctataaaatagagaaatttttttcaagaaaataaaaataaaacttcaagcttaaattagactatattctgctcagaatttggaaaaagtcaaaacataaaagtattagatctctttttcatctttcaaacacatcttgaatcaactcattttgaaagtgggtagaatgattttattttacttttctaaagtggtcatttgattttattttacttttctacagtggtcattgttgagaatcatggggttcnnnctcaaaaccaattggcaatgagtggagtagtccatgttcttatatatgactcaattctctaccattta

SEQ ID NO: 69296 - DNA, 6333 bp, Cannabis sativa
actagatatacacttcaaatgtagtgtttctatcccatgtgagactcctactcacacacttcacttttctatttttacataatttcatacaaagttccatcaaaaacttacaaattttaatacattcaccaagcaaatgtgagagctgcagaattcagaaaaatatgtttagactcgagctatctaattgataaggcataaaaatatgtggaaattcatgtgacctcaataatgccttatcaattaactcagtccaaagtcatctgctccaaatatgcttattgtggttatgtataaaaagaagcatttacagtattgtacttattttaaatcattcccttaaatgaaaaataacaataagttaagaataaacaaagaaaaaaactgcatacctggccaacattgtaagcagttagtgaaggtagaagaaggctgagagaaggtctgtgaaagaaagtacaagaattagtacactattcattgacctgataacaatgtctagtctacaaattaaggaaataaccttatgaggaaccagatgctctgccacattctccttttgcacctgttctatggtctacaaaaaactcttcaatggttagagaaaggaataactgactgatgctttcataaaaaataaaatgtggtaatatgacaatagcaccaaaagttgactaatatacagcatttactaaccctcaccgaaacacccttgcattctttattttataatttgctaccaaattttccaaaagagattgtaaatcactccataaccactaacccaacccctattttgggtcaaggaggaatattaatattgagcaaatgagataaaactctccaaagaacaaagaaagcatctatgatggtgcataataccttcccataagcaacaaaattattcatcgttactcaccacttcacctgcaacaaaattattcatccttgaattatataaaattctgtgaagtagactataaacttctagaaaatcacgtgataataaatattagatctaaaaagatcaataaaaagaacctttcaagtagacaggctgctgactcttcacaacaccaataaaatcacaaggaataatacggccctgaaagttcataaaatagttaagtgcagctttcagtagatataaagagaggttaacttatgtagcttgaagttaaagaattaacaaagtttcaccaacaaattatcaatacctgatgaattagttggtaaaaactgtgctgaccatttgttccaggttcatcaaagtcaatttcaccagcctcgtagggaagcggaactccatcaattgatacacccttgccattactttccatgctaacctacatagaattacaagacgaaaggtattaagagcatgcaacaaaacgacacacaccttcaaggagaaaaaaaaaggcaggtaagctaagcagcactctaagtggacctacctgttgaatgtgtggggcaaacttctccagggcttgggagtaaggtaagatggcctaagcaaaaaaatatttagtcaatctattcggtggatggtaaagaaataaataaacttgaagtagatgtaagcactgactcttgcaggatatccaagaaatgaaacattccataagctcaacaagcctaaaagcacctaataaacagatgtcttgtttaaaaaattaacctgtactgaatctcacttctgaagttcaattaagaaagagcattatggggcatcggtggtgctcaacaccatatagactaatcctggtaccaaatgagtccaacaacattaagttatcatattacatccatttatattagtggggtggtgttgaaaccattagcgcctcttagtattattcatcaagagaaagaatgaataagaaaggaagaaaagagtgtgacacggcagtcctctttgaaacagtttttttgcgtaagcaattgtactgaactttcttgcatatcaaatttgcacgagggaaattaatcacttggttatggagacaaaaaaaaataccagttcaggtacttaggaatatttttctcatatggtgctgagtggaaatgctgatcaatgcttgaggccccctttaagaacctttcaccagatgaaagaaacaatgttatggcattagaaacatgccaaatagcataattggtaaatgaagttaaattcaatacaaacaaattaagatattctcatctgtctttcccctagtaactagagatgaaaaatagattaatagttcaaactaatctgattgacagctggagcacaagcaaatttatccataaaaaatttcagtactaatgatgcagtggaactgtagcaattataaaatacatacttctcaacaatttggaaaccatactgaagagacaacggcaacactcccacagcactgcaaactgcaaccagctgttaaaactccaatcaattatcaaaaaggggcaatcttaaagcgaaaaaaagaggtaaactacttaccactgtatcgtccaccaacccagtcccagaatgtgaaagcattgttaggatcaataccaaatttttccacaagctgaaacagaaaaaataatttagtactaatgacccaaccggtgcttaatcatcgaatacaatgactaaaagagtaccataagatttgtgctgactgctaccatatgcctagcaacagcagaaggcctgaagatagtatgcaatcacaagagggggaagttaaagcatctttcaggcatttcaacagttaatttcaagaggaccagtagagagactggttaaatgcacatcttttcaataattaatttcaagcagaaaaatgctaaaatatttgacaagaaaacttttagggggaaaaacaaaatgacagaaaaagattttactttttctgctgaaaaaaaaaacagattttagtttagtgaaagaaaccacatgaaatgggaccaatcttcattcttgatttgctcaattccatatttgttctacctttttcatttacagcagctttgaagcaaattcagccattcaactatataatatagatcaccataaaattccccaagaaacaaatcccatattattgaagaatttaagctacagtttaacattgaactgacccaacagcaaccacatctgtaagtggtaatcctgtagctccaacctaacaaaattttcagttattagaaaactgaagcatcacatccaacaaaagtgaaattaacaggctaaggaagactacccaagaaccattgcagaccctctcagagagctcctggatcttgtccagaactttccaaatatcctggaccacattcttcccatcattctgaataacagtgtctctaggagcacggagagcaacatggagtactgatctattctctgtgctatttatctgaagtgatagaacacccataaataatcaaacaatatacatatatataaataaaaaaaaaaaagagaaacaagtttgcttaaaaacattaacaattaatttcaaagaaccatcaaatggatattctgtggtattttatagacaagagaccagcaatgacactcagttcatcaaactaccaatgaattcttgctttctaataagcacaacaaagttaataaacacattactttgaaacaagtaaaccctgtatcacattacttcatttagtcaagagataaacttgaacttacatgttccccaccaaacatttgattaatcttgtgtttgagatttgctgtctacattgtcaataccaacaatcagataagctactaaagaatagcaagcaacatgggcagtttaaaaaactaaaaggggtgaactgaggctacctctgctaatttaaagagcttttcaatggttgcaagtgtggcattctgccgccagtaatccaatagcaacccaccaaactcactgtagaaaagtaaaatatacacatataatctgtgtcaaactagattctaaacaagaatattcataattaaacacacttctaaagcttgaaaagaattatcgtacaccatcattgagtggcatcgttgagcatcattcatcaaatcacgtaaatgggtcttcttaatctcctcaacatgagcctgcaaaagcaaaacgacgcatatttgtaatcatgaccaggatttcaaatgttacacgttacttgcatttcattagtaggaaaataaaaaatcccaaataatgatgactctaagtaagtccattatctatgaaaaactaaaactcttccattaaccatcgtctgaattctcgcaaaggagaaatagcagcagcagcaacaacaataataattaatttccaagcttaaacattaaaatattgtccttctaccagcattttccattagtttgaccaaaaacatcgaatgaaaaaagaaagaaaagaaaaagagattaaaatacaaatcatcaactgaaaccaaacaaacaagatacacctaatcgataacaaaaagaaaagacatttcttacttcagtaaccaaacagagcaaatgcacaggatgaagatgatcagaccctagagagagaaagagacgcgaaagatgtattatctcatatagcatatatgttgcatgtatgtatgtacctgaaaagtccgaaattttgctggaaagggataacccaaaagtaggacaaaaatacatgctttttccatacactgcgtctacgtgggttaactcaggtgcttgaggtttatgctagcccgccacgtggcagtcccatgatgtcaactggtctcgtcacatatacgctcttcgtcgccataattaagatttttgacttaaattttgacaaacttttaaagctcgttaaaaatgtccttaaactattgacaagtggatataaggaaatcgagaaaaaaaaaatattattaatgatagctttcaagcaatattcaaattcacctttgcttatcaattgttcttggacaaagttgtcatagaaatcttgaaacagagttgcatagtacgtttgatttactgaagacgaagaagatatggcagtggaagaggctattgtttcgtttgtgattgaaaggctcagtgacttgttacttaatgaagccaagttcttgcatggagtcaaaagccaagtagagaatgcaaagatcaagctgcaatgtatgagggctttcataaaagatgcagatgcttatgtaagaaatggtgatgagagagttcgcctattggttgtccaagtcagagaaaattcttatgccttggaggatgttattgaaacttacaccttcaaagtggctttgaaaaagaacagaggtgtgataagtgtactgaaaaggtttgttagcatcttcaaggaaggagttgatgtccatagagttggagcaaggatagaggagatctcatccaacattgatacatggacttcagaacttcaaaaatatggagtacagaaatcagtggaaaaggcagcagaaacttgttcaagccaaatccaagagcgtagtgagttgaggcgaacttattctcattttggggggaacgatgttgttggattcaacaaagacatcaaagaattggttgcccatttgacagcaaataaagagaataatcatactcatgattggcatagggtgatgtctgtatgtgggatgggtggattggggaagactacccttgcaagaaaggtttatcaccatgctactgtcagaaatcactttgattgttttgcttgggtctcaatatctcaacaatgtgtagtgcgagaagtatgggaaggaatcttatttggcttagagttctcccacacaggaaaaacggaaggaaatcaaaaacatggtcgatagtgaaatagccaaagagctttacaaccttcagaagcagaggaaatgtttggtgctcctcgacgacatttggaggacttcaacttgggatcgtctaaaagctgcattcccattcactccccatgacgaaaccgacagcaagattttcctaacaactcgaataaagaatgtagctttgcatgcggataaaaatggattcatccatgaacctcagtgtctcaacgggaatgaaagttgggagctgtttcagaacaaatcttcatgttttgtaaagaatctaacaagtaatacatttcaatctcaatttattatataactgagaatattctttattcttactgtagttttatttatcatatcactttaattgtttttgtgtgtattatcagactccaaagacaatgaaagaatgaaaattcttgggagagagatgcttagacactgttctggtttgccattagccatcattgtgctcagtggtcttctatctacaaaacaaacagttaatgagtggga

SEQ ID NO: 69297 - DNA, 1846 bp, Cannabis sativa
atgaaagttcaaaattttggtagtctttttcctataattatgtactaatatctatatactttttttcttccaaaatacaatgtcttacaggagaaatggtcaaagaacctgtatatagctgcaatttgctatggaagaacagcctcttgaaatttgggattgaaagaagaaactgcacttggaacttcgagggcaggtagaatattaatgagtttattttatttatacatttactctaaaagattagcttggggatatttaactagagctagttatatctcccatcttgctctttttttttgtaattatttttatatatataattttcaaaatttaggtggccgtgctgagcgaaatcgtctacctgccagggactcttgggtgagagattattatgaagaggtacaagaaaaagatggttttcttcatttatatggatcacccaactggagtacttatatatagtaaagaatctttaattgtaaaggggtcatcttttctggttacgtttgatagaagatcctgctcaaaaccccccttaaaaagaagtttgtatagttcttgagagagatagagagagaagcagagacgtttcaatctttttagtttgatctctttgaggtcagtcagcattccatgacaaaaatatgtaaaaccctttttagatatggtcaagtttgaaagatgaaatacaggaagaaaacaatttttttttcttctgtataagattggccaatgctaagagggaatgtaatgtgacctttttgacattttcataaagtgttaatatagaaacaaaacaacaccaaagcacttgggttgaagatatttgtctttcttttctttgatttgcagtaaactataaacctcaatttcatttgtcactttcttttccttaaattctgtctttaaatgcactataagacacactcacacactaaccaataataataattataataaggaaaatgattctgagtattttgactaaacaaacaagccttgacccaaactcaaagctcccacttctcagtcctcactcacatggtgtttgtttggcttgaaccaccttcaagacagtcacgtgatgcaaattgggatccactttatacggataaagattttctgcaaagtgtagagaaaaaaaaaaaacagttaggttcttggctgaatctaggtggataattaatcctagtctaacgaactcttgtttatgcttttcgtttgagactaaatattcaattcatagctcagctgcggctgagctgaattgacttcatgttccaactgaaattagaataataataataataataataataacaataattgtaataattaataataaataaaaaagagtattttagttcaaacttttgtaggttattctctctccacacaggtccaaaaccatgtgctttacttaagcattgtccttcacattcacatacatccatttatttaatattctcaccttccctagctggcctcttaaggtgtgaaatcacaagccaaaaggccaataaatctatctccaaagctctctgtcttccaaaggccaaaagggcaaacaatatatcattcaaaaataaaagctttatctttccaaaaggctaaaaaagagagcttgttgagtatcttagtaataattatctccaaaaatggatataagaaactggtgcagttcaagcaccaaaagaagatcaatcaatttaggaagttgccacaaagagagtgctaagtcttcctcaactacaatacaagcacttaataatccatacaagcagatatggaaagttctttggatgaagttcaagaaggaaaagaagaagctttttaagtcttt

SEQ ID NO: 69298 - DNA, 731 bp, Cannabis sativa
tatatggtgaaataggaacctatgtatgtttgaagataaatgtttggctcatcaatattgatcctcttgtcaaatagagcattaagactagagtattatttgttaaggttttcaaactgtataaaatggaaaaattgattttagaatttgtaacaatgatgttgtttttaaggggtatgccccagatttgataaaaaattaagaagaaaaaaagtaaaattacaataacataatgttttttcaaatctgatttatacaaataccttttaattacataacatctctctttcttccatttttatttttcaaacataatttctctctcttcttttttatttttaaaacatattatcatcattgcttagacttaagaataagtaatatcgtaattactaattagcttttaaaaatagttattttaaaatttattaaacatatattttctcgctttcatttaaatcaaagcaactaaaattatttagtcgcttatcaaattctcattagttatatttagagatagaaattgggccgctaatgtacggggaatgcaatccctgtccccattcccgctacctatttatacccccatccccgccccatccccgtctaataactaacggatttggagtaagggaatacccatcgattatggagaacccatcgagtatccattaagataaaatgaaaaagaaaataatttaaaataattgaaaaaataaattaaaccaata

SEQ ID NO: 69299 - DNA, 986 bp, Cannabis sativa
ttcatgaaagaaaaaagaaacaattatgtcatcatttatcattaattcgcctagggtttgcatgtgatatgtttcatttaaggacaaataatcaaatattgaaaaatagttgaaccaaacagaaagcatgtacaagtacatacagcatgtcttaaccaaagttttctctacattaaagaaaataataaataataataatagaataaaaaatctgagtcagcattatttatagaaaaagaattgaagaaaactatgttataaaaaaacgttaattatttcttccttaaaaattacaactcagtagaaaaagttaaaaaaaaatacaaataaattaccattattcaacctttgacactgaatttcagccaaagtgctcataaaagcataaagggttttcaggttttctttaccttaacagttttctttatcttattccctcaaaaacatgttggtttttattgtatggtagatatgtttgataatatatattactcagaagaaataaaacatttttaagaataataattaaacaaacgcccctagtatatatgtttttctgtgcctttttaaatttggttttggactataaacgcttaaagccgtggtttttacttatatggttagttggttacatataacaacaacaacaatatgtatataataattttttaattttttttttttaagtttttcaataatgatttctctgaaaaatttgacctttctgttaccagtagtattctacacgagtttactacctcttttcttgttgatgggtcacaattttatagatttactcaaaaagcaagtaaaatactttacatctaaatgatattggaaaccccatttttagaagaccacacccaatatgtatcttattctcatattaatatatatatttttttctcttcttatatataaatatatatataaaaaaaaaatggtggcttcctaggtaggcatggcaaaaagatccattcattcgg

SEQ ID NO: 69300 - DNA, 527 bp, Cannabis sativa
  modified_base (33)..(45): a, c, t, g, unknown or other
tttagaaaccaaaaccgtaaatttgaaaaaaannnnnnnnnnnnnaaaaaacagtatatgaagtaattctcctattatttattgttgtaaatgaataagtttaatttataatagtatgttttatctaagaaaagaaaaaagaaacggaggatctgccaaatgagcagagctcacaacacagggaacaatctcatccgaactagcacaagctttagacactagtggttttaatttaaaattcaatgtacaaagataaaagaaaagaaggtgaaattggttttggttttggagctaggttgtgtcgaagtggccactttcaaattatggtattggttttgtcaaattaaaacttgtgttcaatctaatctttatacatttcatgtttctctactagatctctatttttgaataggatttttaataataatttttggagtattgctataaagcactagtagtgactagtactttctcgacatgttgcgttacgattggctagcaatactccttaaaagctattatattaa

SEQ ID NO: 69301 - DNA, 501 bp, Cannabis sativa
tggaattgctctatacaacaatccgtgcgaccaatacttcttgccaagaaaccattaagaaactaaaaaaggaggtttctcataagccagctaatggtgtgaaggcctttatcgctttggtagccatgtagaagatgcgagaaaatgcaactcagatcacccagaatgcggctaacagggaggttagggcagaaaagttctgcttgtgctccttggacatgtcctatgcaatgctcgttcatggtttttggaagaaagatccctctgctctccgacttcttaggtctgatgacgagatattcaccaagaaagtactcactatacatatcaaaacttatcttaaggagttcccccttgatactgacagtaatgaggagtcaaatgacaaagtttcaagagccgaacatcttattgaagctgaagcctaaactagagagaccaggaaggagatcattcaaggtgttggccaggcaagtctagaccctatcctagagccaattc

SEQ ID NO: 69302 - DNA, 519 bp, Cannabis sativa
tataaatatgtaatattgagtggacttctattttaccaaatattttctcatattatagtaaaaatcatgaactcatgaaatgatgaggttggtttttgtatgaattttagaataaacatgggtttgtttttgcttcctctatgggtatgggtctttgggaatgatttaaagccatgagaaaaaaaagtaggcattcaataaataatcaaaggaacttataaagtgaagaattgtatcaaagagagagcgatgggccatatttggtaattagatatttaaagtgcaaaaaagaatatataggccccacattttcaaatatattcttcaacttgatgaagcattttcaagtatggtatctcatgagaattaaagtatattggattcattgaggccattatgaaaaaaaaaaaaaaaatatggatatatgagtatattaattgttgttgtgtaagtatatcatggcctcattgtgaggaaggggaaaagtagcattactatagctattagctaatagctata

SEQ ID NO: 69303 - DNA, 1082 bp, Cannabis sativa
acttgtataatttttttttttggatatagtaagatttgaagttggactccttaatgttatgtgaagatctctcttctgtgaatagaaagagatgttgtaccattttacttttggtatagcaaactttgaaaattgtatttgcaactctggattgtattttttcttttttacaagaaatttgaactttttgaaagaaaaaactacttgatttgaagggattttttattttatttcttcttcttcttattattattatttggtgaacaatttgatttaaagataattttttacttggtctacatgtctaatatgaggaaagtgttaagggataattaattaattatgtgtgctaaattacaatgcttggtagtatgaggactttgacagtcaaagttttgactgtggattaatttgagtgtgcttttcttaattattgtactagagcattgttattgggcatcagtggtgcttagcacccttaagacgtttcgccttgcgattgactagcgatactccctaaaaattattatattaaactatatgaaacccgatatttaattagattaatagcaatattgacacgtaagagggtgcttgacaccactagtgccttttagcatttcttttttttttttgaagtattcgtattccattaccttaacattgaagtggatgagaaatttgatggtttattttccattgtatttgtactgattatttcaatactatattgatcattgttattttttttaatatattttaactcaagttgaatgtatgtttatctaattgctttgttctacaaattgaggtttctattttcctttactttttttttcctttactttttttttttaaaaaaaaaaaattaaaaaaaaagcttcaaaggtttaagtagatcatttagttttctatattatgtaaaatgttaaaaatggggaaatttctattatctattgtttgaggccgaaagccaactttgggtaacaatgtctcttaaaaaaaagggaaattatagtaaatggccccaaattataggagtatgttagtttatgtcatcttttcaaaaaaatatagtaaat

SEQ ID NO: 69304 - DNA, 4215 bp, Cannabis sativa
cttacgatagttgtctgcgagagacttttaaagattttcctatagagaatgtgaaccttctcgagacacttctttcagtggaaccatataaacgggggacagcctccttagctcttgcatctgaggtacttattcagctacattgtaattttcttgtcttattgattacacagcaatactgataatttactagtatttgaggcaatttgttttacaatgttaacattgacacttctgcggaatttcaatttcatcacattgattcacaaaatgtatacactctgtttcgctttcagtatttctcaacaaagccttacgcatgtgatccatcaagctttccagtatacccacctagcaaagagatcgatgctaaaaacagggaggaagctaagaggtgagacattttcttttattttataaaatttgcacagtttgcattctataataaaataaataataaatagaaataagtaaggaggtcattcaattgtatgataaaggaagtctagtgctgccttgtattcagttgtggtgatgctgtgaggaatttgttagtattttgaggttatgttaaaatgtcttctcataagaaaaacttgtgctgttcttgttggtactatgttgtaaatggacaaagtttaacaattcacaagtcacaaagatctccttaaattactattcaaaaaaaaaaaaagaaaaaaagatctccttaaattatgtgactgcataaaagcaagaccttcttcatgggacatccatggaaggcatgggatttaaaatatgaattttgaaaattttgtacacttcaaataaagaatttgaaatcattgctttaattatttgttgagttaattcgactttgttttttttttttctttttttataccgaattcagaaagaagagcagtgggagagttcgggggacggaaacaaggaagccgacaaggaaacctttgggaaccagtaaattggcaccatcagaggtctcttttttctgcaaaattgttttcatttcaagtatctgttgatatacttgcttgttttgtgggaaatgctagccattaaatcaaagtaatcttatgttgcaggactctgtaactctgtcgcgagactcacgtaaaaccaatggttgtagtctacatgttcataaggaagaaaatggtaaattagatggggatgcaccaaagccatcagttgataaagaagaagaggtcttgcatgtgaagaatgcatctcaaggagacattccattttctggcccattacaggtttccacttcaagtggctttgcgtgggcgaaaagaaggaaagatgaagcttcaataagatcacatactcgatctatttcgagaggacacattttcaatccagtagagccttcaattgcagtgaatacaaagaatagtttagatttgaaaacacatgaaaatggagatgttatgcataggggacgcgctgaatctagaggccatgactcatatgagattgctaagcttgccatccagaaccactggggcaagtttgaacgtccagattcatttgacgcttctgatgtttaccactcacaggaattatctttggcactttaccagagagaggaacttggacccactaaaagtgatctggtaagtatgtaattgaaaaataaaatataactgactttaaagttttaattgttaatatgaaatctaaattttagtcatagctggaaaataaatagaacttttggttgtaacaacagaccattttattcatgttgttggaggaattttgtaacaacgccagaaaatgcaaatcctcgagttgagtaatgaaaaataattagtactatttccaaagtggacataggctcgaccaaaattgagcttaaccactctaatttttgtgttgtttttatcaattatttacatacattatttatttcattactcccatattttgatgtcgttacattattcctccaacaacagttcttattgattatcatatgcttcttttttttctgtcacttctttttcttcttgcctacgtccaataatagtggagggaaagaaaaagaaaaagagaaaaacaagagcagtagagcactcaacaagagaaagtataattaaaataaaaggaggcagaagagaaaaaagattaactatcaaattgttgaaaactgtttcatttcattagtgtggtccgtattaggaatattgactgcagttcaataaaatattcttgaaaaaacatcgaagcatggtgttttttctttcccattgagtctacactgttataattttgccttgtttggctgaacttctgcttctgattttagcttcagaaagctactaaaagtggcttagctgaaagctgaaattaacatattacccaaacagcagcagaagtgtgtttggactcttaaagcccagccaaccagcgcctttaacctttttgacaagtgactgccttgttatcaataaacaattctacatatcattgatagaattaaactgaactaaccatcccaaatgacagctgaagctgttgcacttgacactagtgatcaattatgaataatagctccttacatgttatagctgtagcttgatattgttgactgaaaaatcattacactgattgaataccattgatggtgcactcaaatttatgagtacattaaattcatctttatgtgtattatgaaaattaatttgtctttataatgagtagttggttgtgttgattacatatattaaaaggtcaatttttgttttgtctattcttttcttaattaaattttcatattacttcagtctttatgacttcttaactctctctatattgtataacagggttttcaggatcaaggtgagaaagttgaattttctggacccttattatcacagtcacacagaattgatgaactcttagagagacatgaacggcaaatccgacgggcagttcggaaatcatggttccatagaggtattattcatactggttaaactttaattagtgcaatgttagttcatcttcgtttccttaccaaacgccatggtcccatcccatctaataaaacctgtgtggtattgacatgtcattggcaaatatgggatattcattgattaacagtttaacctcttacggagattgcatagtgatttggttagttgacttaactgaatctgcatttttaaatgtgcatattactatccagccaaaactaacatagacttgtttatctgtttcatcctatagtgtataaaattttcaataatcttttctgtctcgttcaccttattcttctaatgtgtacggttacttttacttatcttttcttttgtgtacagttccaggtaagaagctggtgaagtagtttgttcgataggcttggtcccttgaagaaattgattaggagggtaaagcagagagctatgtatacagaatggatccttttatgtggtcataacaatctggaaaatgctttctcaggagtaggcatcctattcccatcctatagtaatagttaacaaaataactagttaaaatctcaagttcaaacccagtgcttagaagaagagaagcaagtcctgggaaggaaagggcaaagatcaagtcagatatttcggtcactgtcaattattcatgttggctttctttatttcactacgtattttagtatcatcatcatcatcatcatcattcggcattgtacagatcaatgataaaaatatattttgacagagtgagcaggaaaaggccttgttgtatatgcttcaatttagtaaattcggataacaactcctccattaacacctataaattcattaaagataaacatattagatcatttcaaaatgagcattgtcatattgcattagtgtctagtactttttatagatggtgtcttacaattggttagtggtattctttaaaaattattttcttaagttatataagatttggtatttaattacaataataacgataaactagagagggtgatagacactaatagtgttttttaaaatttctctatcagaataaaataagcatgttagatatatattatgttgtgtggtaggtttttttttttttttaagaagctacacacttccaatactcttttccttgaaaagcatatcaacgtatgtgtattgggttgatagttataattttaattttatttatttaattattattaggaattaggaagaggtttcaatggtt

SEQ ID NO: 69305 - DNA, 799 bp, Cannabis sativa
  modified_base (104)..(113): a, c, t, g, unknown or other
ttccgttgtaaccactgtaaggtttcttatactttatgtgtttatttcatatcattttagaagttcatatttagggtgttaaataacatacttgttagtaaatnnnnnnnnnnggtaaaataattccaacaccttcacacctagggctgaggtaatgcttgtcacctccccacttaggtctgagatgatggtctttgaaacaagtctgaggtgatcatctttgagaaaaggccgagatgatgtcctaatgaagactatctcgacctttgggatagtgagttgacttcgtgccctctcttaggtgtaggttgaggtgatgaggcatggtggtttcaccaccttaatgcctaggtaaaatgttatcataattgttattttttataaaattagggtataacaccatctttcatattctctatccctcctaacatttccttctattctactttccatccttcctaacaaatatagtctaagtactgaaagcttctacaatgtaccattctaaaagaaatatgcagtgatacgctttaatgtattttagtatccagaataaaaaatttagtctaatttttttatataattttcttaactacaacatatataatcataagaaaaaatagattacaaaattttctgcagacaaataaacatgaggtgcattgaatttttgttattagaccatctccaacggaagatataaaaatatatttggcacaaaagtaattttgtggtaaatttacactaaattttagctttgtactccaatgcacaattgtaaaattttgatgtaaaattt

SEQ ID NO: 69306 - DNA, 1406 bp, Cannabis sativa
aaaaaaaaaattatgttgttgttgtcattaaaaaattatcactaaatgtagctattttattttttgtggtggtatccttatatcctacctagcaaattatacttctcttgaatcaatactgaagacagaagctgctgtcttattattcttctggataatttggactttaattttgagccgtaatggtctaagcccacataaatagggcggacccaacccaacaaaatagagggacataatctcattttgtttgtttaactatatatgggtgcttgagttgtgaatcaagacttcttggaacttggaatgctactcaagaattctttaatcttggaaagggtgtgctgtttgtgagggaaaagaagaagaaaagaagttcttactgaggttttagatatgatccttgctatcttagataacctggaactggaactggttatgctaatgcattttacttgaaagtgatccattgatttcgttttactcttgaaggtttttgaaaagacagtttttgcattttaatctttcattttccttgataattttacattactcacggtttcttatttgattgtatagaaagggataggaatttacttgggattgagaatttaagcttagaggaaggcatattggtgataatgaaaagctttgtaatggttttcgggagattcgttaaataatgtgtttaaaccaagattaaactactataacataaataatgcgtgtaaaggatttatgtggcactgtgtatcattatgaatgttattaagttcagttcagttcagttctttttttttttggttaaaataataataataatatttattttagtcatcagcaagttcctcccttgtgttgtaaaagtattttccacgttttaaattttcctctattatttgccacataaaaactattctgcataggatgtcatcacttactaaatgaatgttggtggtcaaaactggtatattaatgtcttttctacctcccattggtgatgtcttagaaattaggggttggggggataggtatggtgctgaatggttccaagattggagtaagatttcttcttttacgtatacacatgatgcaactgtatatactattttgtattaaaaaatgatctctgtggatttttattctgcctcagtttatgccttccccactcatatatatctatatcttgattaatcttaaaagttatatgtttgccatttattatggtagccgcagtacattatatttgatctgttctgaaagtttctctttcacatattctcagtggttcaggatctccctgtttcaggctctcactgtttcagggagcactaagtgaatgaatgtaattcctagtaatcaagtggtataattaatttaaatagatgaatatatctcttagcatt

SEQ ID NO: 69307 - DNA, 1367 bp, Cannabis sativa
gaataagcatatttatatgaaaaaaaaaacagtagacaattaaattatgatcattagtacacttgtttcgtaattgagactttcgcatctatttatgtaatgcgctaagaaacaacataccctagcaagtccagtatcaccctattggtgctatgctattgttgttgttgctgttttcttctctctggtccatggtgctgtaatgaacaaatctctcttgttgatttagcttcatcatattctgcaggtgtattcaacgtcggtcgctatgctgctcacagcaattgtttccgtttttctatttggcttccatctatctcttgcctttttcctcggctcaacgtaagttcgcctgtcttatattcaactccaataaatattgtatagaatttgttcaaagtttatcttaatctaattaagaatgtttattatgttcatctcttaatcctttcccagtgtcgtctccgtatcgatatacctacactctatcgggaagctgcaaagatagtaagaaggaccagaccggacctcctcttgctacctctctatatcttatattcagtcgattttaacgacaacggttagttcatataacaaatttttcattcatatagtgtaaattaaagaagtatatgagctgagctcttgtgaagctgctgctggtacatggaacaacaacgatctctatttaagaagaagagcaacaatgtcttgtgataaccctttatattctcccttaaatacatacatgtatttgtgttatttatttatttatttattagagaagctttctatcatactgtctttttacacataaacatgtataagaatatatatatatatatatatatatatttaatgagtagatgattaggattacagattaagcaatcaagagtagactagaacggtggttttttatattgacaaattatactgattgtttgtgaatgctttttcctccacagcaacagcagacgtaaagagatactcacaactttatgtgttttttttaatgaaagaataataataaatgatttttgtgttttttttaaaaataaaaaaataaaagaatttgaactttgcttagacgaattccaattagatgatcccattcccactagttataacctacattactacgtacatgaaattaaaaacccttttaaaagtgggaggaaagattaggggtaacattttgatttggagtaatgggcatccattcttatttgggatatgttacaaaatagcaatgctattaggcaatttaatgggaggtaattacactctataccctttttatattatcttcttttatttttgccttcttttttaaagtctatcatttttacctttttttttaaaca

SEQ ID NO: 69308 - DNA, 851 bp, Cannabis sativa
acaattatctgaaattcatagctaattttctctaaatttgtgcaggtgattattgaaatcccatacaatttcgtccaagcaacactttataccatcatagtatatacaatgataggattcgaactaaatctagttaaattcatatggaacctgttctttacattcttcacattgtcgtactacacctactacggcatgatgacggtggcagcaactccgaattaccacatcgcttcagtcgtttcatccgcattttacggaatctggaacttgttttcaggattcgtgatcccaagaaccgtaagagtctgagaaaccctaactacacaaattttatactaattaatcacggctgttgacattgaatttttgaacagaggattccgatatggtggagatggtactactgggggtgtccgatagcgtggagcttgtacggattggtggtatcgcagtatggtgatgtaaaggaagaaatggacaatggtgagagtgtagaagaattcgtgagacgttactatgggtatgatcgagaatttcttcctgtggttgctatcgtcaatgtggctttcactgtcaccttcgccttcatctttgcactttcccttaaggcattcaattttgagaggagataattaactcattattactcattattattattctattttatggtaaaaagtgaaaaataaaatgattaatataaattatttttgaaagtatttttgtaagatgtatattggaataattacatatgctttatttttttttttgtaaaatatttaaatttttacgttcaaacaatatttttttatatttttacgatttttcaaaaaataacacgaaaacaa

SEQ ID NO: 69309 - DNA, 794 bp, Cannabis sativa
  modified_base (333)..(342): a, c, t, g, unknown or other
gcgtaacagtaataaaagaaagaaaattgagaaaaatcagtaatgggtgtaaatttcccttatagaatctaattttaatgccaaacccgataacgaacaataacatccaacttattaacttaaacgttagctcatgatatgtagaaaatataaagatgagattcacatgtaactatacataaggatgacgagccaattaagtgaagatctatctacagtcgcacgataactacttaatttagagaccgagtctatgttaatgttgcctagttaaaatggactataaatcatttcttttaacccttaaaggtaaatggtatttttaaaaattannnnnnnnnnatatatattttttaaaagatattttttttatttaggtccctaaaatgagtgggccctagacatgggtctagcccacctatgcctaggaccggccctaccgctgccctaccttcataattactagctttgttagtgacatactccacttactagctatatgttcttgttgactaacatatacttggtctctagattaagtgtaggcgtgttaaagagatccatttagttgaattgggctggagttccgattcaaatacttattggatctaaaacattcggatacttattggatctcggatcaaatccgctttgccctgcctaatttttttcggatctctgatccgacccaaattcaatacatataaaacattaaattcaagacctggactcggacctagatctggactcgggctttggactcggaccctgacctggacccagacccaaactcg

SEQ ID NO: 69310 - DNA, 3344 bp, Cannabis sativa
ttgtaagtttcccaaaaaaaaaaatcaatctaaaaattctttaaaatatttaaaattccgttttttttttttttgaaacaatcccaaaaaggatagttcaagtgttggattcatgctctccatatgtaaggcccaagcccatctggcaatgttgcgattccgttttacatttagaagtcatccaacggtgaatgcaagccaaggtgcagaggagcggtagagatgaaccactagcgaaatcgtttcagaaaaggcagaagggcatcgaaacgtcatcgtagaggtcaaattatcaggatggtaaacaaaccctaatttggagtacgaggacaagcaaagcaaagcaaagcaaccatttcattattacatatacaaattagggtatagatctctctctctttcactctttctcttctgggttctattgattgatttatatatcacagaacaatggagatggatatgatggtaaataatagtaaaaggtttgagcaggaagataatgtcggggaaaatgggtgtgggaaaatcaaggaagagggccccaagtccttgacaaagaatagccatttgtgactttcgcaacctcttccacaacaaaattagctattaatttaggctatatgggttgattaaaaaggcgtgggtcgcattctaatattgaatgccgatctagaattctcccaacattacttctacacccatttccccccacttttctcctgcattgatcaaaacctcttttactgatcctccttcaatgtgatacatcaaggttttttttagtggttttttcttatttactctgtttgtgtttggttataagaaattttgaggtatttgaagtttttcttgcccgactgtgcttaggttctgtggtcactggtcagtgttagttctgtgctaagcagaatctaacacattttcaattactgttgcatatttttctcatcaaaccaaacacaaagtttaagtggcaagtttttattatctaattaacttcttcagtgctttcagtgaattcctgcagcctcatgttattttcaggcatcgcttgacttgttcattgaaggttcattcttcaggtgattgggatttggggactgctgtttcccacttcttatcagttgttggaggagatctatgatgttctagtagtgtatataaacgatctcttgtgctatgtttttctctttgaaatgttgatatttctaaactataatttgagagtcatagaagggtgttcgattttgttttctaagcattttctctatgtaatatttgatggacaagagaaactaatgaccactttttgtacaagaagaaagagacgtagtgaaatataatgcacttgtttactttggatatttgcttaaataatttgatctcgataaatagtattacttttcagccatctaaatccagctgtttttcgcttttttggaatggaggggctgaaaagggcgcaaagttcttgattttcctattcagatgctgttttaagctttatttagttgttagtttgcatatcctttatgatatttatatggaaatgattcttgtatttgtctgtttttattcaattcaatttaaaagaaatatgtgcacaggataaggttgttcgttattttaaatttggagtgcattaagggatagctcgagctaattaaactatctttgttttggatagaaatgaaagctttaaaacagagtacagaaatgaaaaacagagagagagagagatatcaaaggagaggaaagcctcagaaccaactgaggaggaacactttatttatattgagatttgtacaaggcaaaagaattctgtaataacagaattgattacaagaaaacaactgaaataacaacccaaactaaccaataaaactaacatttgtttattggttatcaacctcctcaaacgaaaaggtgtacaaatcactttaagtttgcctttaagataatgaaatcgttccttaggtagaggctttgtgagaatgttagcaacttgatcaacatttggaacatgtcgaactaaatttctttcctcattatttgtgttgataaagtgtaaatcaatctctatatgtttgcatctggcatgaaaaataggattggttgcaagagtagctgcactttgattatcaactcagataattggaacatcttgaggtgtaatgtgcagcttagaaagtagagaaagaagccattttatttctgtcgcagcattggccagagctttgaactcggattctgtggatgatcgagcaactacctgctgctttttcgcagaccaagagattaaatttggtccaaaaagtactgcataaccaccactagagcgcctgtcatcaagtgaacttgcccaatcagtatcggagtaaacttgcagagagaatctagatgcaggcttgaggaaccttcctggaagtatttgaggaacgagaatggttgatcagtgttgcgttcgcaaaacatggatttgtcaattatagtttgagattaaccataatccatacttaatttttttgagaaatattaaagggcacttatcgtgtctagcacctttttgaaaaataatatagtggactgttgattctgatttactctggttggcttggcttttggggcactttcattggttttattttataatcaacatttcaatgatttggttggttgtgtaccaatcttgaatttgtattgccaaaaatctgttatctactttccacttgttggactgtggtgttgattttgttgtttattacttaatacttggcagttggcacaaaagtgtatgtttaccaaaaaaggtaaaaagaaccaatttttttctctcctttttgtttgggtatagtaaaagaacttactatttaagttaaacagtatgttttttagttcataaacaaacacatttccataccgccccacttcactcactaataagtggttaagatggtcctagtaaactattcagtagtggtcagtggccactagttgacttaatcttaaatttaatgtgaatggggtctctagtaatattttgatactattattgtactacaccaactgcatggaagcataaaacaaaacttattattagtattattattatctatttgaatcatccacatgataaaaatttcatttttttcatgcttgtattgtgtgataaaaattagtgcttgtgatgaaagaaagagctttcccatactcttgattataatatattcatcagtacattataatatatttatgtgacatttcatgttagagattttattataatgaaagaaaattaagatattacaactctattgtaatacaatacaaggaccaacaaa

SEQ ID NO: 69311 - DNA, 2768 bp, Cannabis sativa
atattacgtaattgattctatccagattcaatgaatataaaatattcatttatcagaatcaataatattattttatttccttaattagaaatattctaatagtctgggctacttgggtggcggtcgagggctcacgatgaaatttgggagggtgcattttcattttaattaggaaagagaagagccagagagagggaaagatggaagtgtgatagtggagagtttcaaaataaggagagcattttgggaaatatgaaaacgttgacctaattgaaaaatatggatatacataaatttaggggattattttattttttttttttttttgaatgaaagtttgatctttatttaaataacgacttccgctaccaaacttggtagcaactcagttggaacagactccaaactgaaagaacaatcaggatacacaatgtagccgccttcgcaaaggagtgagccactacattagctgatcgcttaataaaagaaacagatacattgtttaaacttagcaagcaaattcttacaatttttaataaccaacccaaacaacgaaatcatctctgtcgaacaatgaatggcttgcaccacattaaggcaatttgtttcgacatacacatctctccacctacggtccttgatccagcttaaggcctctcggatgccaatggcttcagcaagcacaggttcaacttggccaaagaataatctggtgcgaccttcaacgagtagtcctgacccattcccaacaaccaacccgataccatatttctcaccattgttgaatatcgctgcatctacattaatcttgacactattaccatgaggagtggtccaacgctcaacaacgtctctagcccgaagtaaaggccatgacgattccaattcggaactttgagcgcatctccattggtcaagataacggtttggaaacgcaacaatatcaaccggattgaagcctttccctttccaaactaactcatttcttgcaccccatatagcccaactaaccattgcaaccttgcagcacaggtccgttgctgcattattgaagactgtcgtgcaccagtcgaaaagaaacaggtccctgctggtgtgactgtgcctatccccactctttcccaacactttcttgtaacctgacaagtaaccaagatgtgcaagatagattcatcttcttcttggcacaacaggcaaagagaattaacagccacatgcttggttcgtagctgaaccaacgtagggaggcaattcgtgcaagctcgccaaataaggttctgaattttcgaaggatccttcatgctccaaagctagtgccagaatcttgcgtcctcttccccataccattggcccttcgaactttgcaaaagagtataagcactcttgacagtatagatgccggagccatcctttgaccaaaaataatggtcctcagttgaaactaagttaagagggatttttgttatcaagcgccaatctctttcctcaaaaatatcttgcaacagctcaatatcccactttgcctctcccacggtcatcaaattacataccctagtgttggtaaggcttgggtgatctgtagtgacatagggttttacattgtcagggagccatggctctccaataaccgagatgttgcagccatttcccactaaccaatgtgtaccattacgcactaaatcttgtgattccaagatgctccaccaaatgaagctcgggttggatccaagttgagcattgaaaaaattaccatgaggataataccgagctttaaacactcgtgaagacagagagtttggtcgagtaatcaatctccaaccttgtttgccaagaagagcaatattaaagtcccggaaattacgaaaacccattcccccacctctcttgtatttgcaaagtctatcccaagtcatccaatgtatccctttgttgtcatccttagaggaacgccaccagaattttgttatgagttgttcaatgtctctactaatctccaaaggtagtaagaatacattcattgcgtagcttggaagagcttgaaatactgacttgatgagcacttctttacctcctttagagaggaacctccctaatttaggggattaattattccttaatgtatgtgtatattctcaaattttcctttccaattcaaacttggagacaaaaaaaatcaagacagtacaaattcaactatttacttattttaatttaaaaaagtgagactcactttgaacacaaatctcttgataattaaacttaatttaccaaacataggttaagttagacattctcattcccatcaagtttaaacctcatagctctattctactcttttttttttcttttttttttttttttttgcaaacgaggttacttagttaaaaatttccatccttatctatattatgatgaccaatgtaaaaaaaaactaaattattgtctcgaacaactttcaataaacattttatatttcattttaaatattttggtacaaaaaaagaagtcatatttgttatgacgaattacattataatattattacaacatacactttattttaatttgataattaaaagggaattaaagagatatggttataattaaattggaattggatcgaagaacatgttgacaactttggtcttaagatatcggtcttgattagtaccaaaaccatcacccttgtggtacatctccattgctcctctaacaaaatcaatggcagattcaataaacacttgagagtatggagagtttgaagcttt

SEQ ID NO: 69312 - DNA, 1033 bp, Cannabis sativa
  modified_base (27)..(30): a, c, t, g, unknown or other
ggggggtttgggttgtggttcggtttnnnntgtagacgagcagagagagagagagatggggttgagttatgagagggatatttttgggttttagataaagatgtcgtattttttttagtttgaaatgtattggtttaagaataaaatattaagattttttaagtataaaaaatcaaatttctcttacacatttgtatattttctttcacgaatgaaattcacattgattaaagtatgacttttttctttatataattttataataatattaaaagttgagtttttctaatgcctatgattgtatgtcataatcgagattctataactaatttaagcaaaccaaactaaagaactccttacaatatgctttttagataagattataaattgttatttcttccgacaacaatgcaaactcattccatctatcatttcattaaaattatatttcattttattttttgttagaagacttggagattaaacttcattattaaagttcatcatagtaccatcatgctaaaaaatattttagaatgggcattggtttaagaatattgctattacttacacatacttttttaatacactttgttacacagaataatatagggtttttttttttttttttaaaggacataaatataagtattatccaatattaggcatatatgtcaaattgtacaaaagacttattcttattatcttagaagattcaattgtactttagcttattatgacattcaaattatattttataatacttttacaaggaaaaagaaagtggccccaaaatgtgatttaaatttaaaaatacatatcactcaaatttaacaaaatttaaacaaagtaatcataacgaattcactttgctcttatgaataaaagataatttgagctggacggtagacagtggaatagcatgatgaccaaaatgtccaaaacattctttctcttttattatatttataagaaatgctaaaagtactgttctaatatttttttttggggtcagattttatataatttaatt

SEQ ID NO: 69313 - DNA, 872 bp, Cannabis sativa
  modified_base (833)..(835): a, c, t, g, unknown or other
ttattattattataacgtttaattggtattatatataatagtcaattaaagtaactacaacataattcaataacttgctaataaatgatagtcacaattgatatagaactattatttttacttaatttgtatttaaaagcaataactaattaaatttattgttttacatattttgaacatttacacaccagtacaaataatataaataactattaaattatatttgaagatactgaaataatttttttctaaaaatattgtacaaagaaattaaaactttgattaatacgttgtttttcaatagttttcaagaaagtgtcatatagattttgtagattatgaatgtcacttggcctgagcaagcgatgtctcttattttttcaaaaaaaaaaaaaaaaacaaaaaacaaaatgatatgtcatgcttgtcttatatagcatgagacatcatttttcatgtaaataacaaattatgtttgtctttaactatatttcaatcacttatatatttaattagtagtgtatgtagagaaaagaagatctcatcaagattatgttcaattacttgtgatttccaagaaaggaaattcatacgatcgagcttgatcgtaagagaaaaagacaaaaaaatttgaaaaaggatttcaagatccagatgcagaggactgtaccagtggcctaaggagcttaagttgcaagtgtcatggcaagagcctgaagatcagaggtagatgaagacatggttttgagtcaaacttctgataccatatagagaaaagaagcagggagaagaaaatgttagacttttatttgagcttacattaaattttattnnntttattaaaacttgggttgattggatagttctttgct

SEQ ID NO: 69314 - DNA, 1469 bp, Cannabis sativa
tcatacttggtttacatgtacagaaccgcatgggtgaaatatttgcttttcatgccacaacaatgtcaaacactattaatacaccaatcattgttttcacaagaacaggatctatggctatacttctaagtcattatcgacctcactcaacaatctttgccttcacaaatgagtaagtctatcatgaggaatgatatgtagttcatttctgatgtaacaattctattagtaatttggactttttcagttctgtaaataactactcttcaccgattcataagttaaattcttagtgcatttattaacactatggcttcgggctagtagtgtaaagaagttttaggaagatgaacatacataatatatttagcagaaaaattttctgacaaatttcggagttgtctgtagctattgtatcattatttaaatagggaaaagaatgaaagtcagcaagagttgcgcaatctgtgttaacacagctgatggcaattttttggttcttcaagatttctacttatgaaagtaatgttactagataattgatttagaatttaactgatttagtaaacaatctaattactattgctcttgtctcttattataattatcattcatattctctaacagcatatgctttctcatgctaatttcatacattttctgcactcaaaatatgcatgggtgcttattatatttgagagtagcaccggctctgcaagtgcaaaatagtttttttttttttttgacgcgataacttttgcttagcagagtaaggattaagcagaggctggggctttatcatggcgttctgcctatatatatggaattctcaaatgacgcggaggaaaccttctctagagcactcaagctcttactggttagtgaggtttaacttttatagatttatttcttctgtatcatcatcttatacagttatttgtttctgacttcaggataggggtcatttgaaggagggagaacatgtcacccttgtccaaagtggtgcgcaaccaatatggcgttcagaatcgactcatcacattcaagtacgtagggtccagagctaaattttgtgctggcgggagttttcgtttttagtggctgatagtaaacaatatgttaattcaagttgtgaattgtaagtgtatatttgtatgtatttttgtttctttttgttaagaaaattttcttaattttgcaaacatcttaaatatttggggttctaggtagtagctttcatgttgaaacagttaatgttgattgagatttagtctgtcacttatgcagatataaaattatcaacattttttatccttcttgttgtgaagctaatgtgtagaaacctcaaaattctcaagtgtttttaatattttatggctgtgtagatcctgtctccataattctgattttttttgtttaactatacatataaataatttgttccatccatgtctcttactgatattctt

SEQ ID NO: 69315 - DNA, 630 bp, Cannabis sativa
  modified_base (492)..(494): a, c, t, g, unknown or other
tatatatatataaatatattgattggatacctttgacttagtggttggatattctaacacttaatatgatttccacctacgtagagatattccaacgatgtcggcactatttattaacaacctattattatacaaatacatattagatataaacattcttagcttgatttattattaaaatagtaataatgatatttttttgttgtatgaaaattgtgaaagttgtggacaactttaagctacgtgaaaatatataaatattaattttaaaaatacatataaatattctcataattcatgattaaacatattatatgaattattattttctgattcttgaattgggccaacatcacgttataatttgaacattattattagacaccagtacgtctcacgaatattacttagtgatatttcctaaatttttttttttaaattatacagtctgacaccaaggagtaccagggccggcccaagcattgggcagcnnnggccattgcacaaggcccccatttttctaaagcccaatttttttttgttttttaaaaaaatgcttatttttttttcttttttcttattatttatacataaataaaaaaaaaataattgaaaatttatgaagcaatt

SEQ ID NO: 69316 - DNA, 1041 bp, Cannabis sativa
acagtaaaaaattaaaaaataccgtctggcagtatttttgtaaaaaaaaataataaaagttaatataccatgtaaatttctctaaaagaaaatatagaacaaccaaccatgcctaagcatatcttaataaataattgattcataaaacatagagttaataacaatctgagaattctttgaatctgaatatatagaatagtgagtgccatgagccaaaacaacccatcaaaaaataagattataagtcattaccatatataaaattaactatgctacataaataatattaaaatggtgttgcaacaccattactaaaaataaaaattaattaacataaaggatgaaaaaaaaaaacataaataataaatccttcaaaaaaaaaaaaaaacataaataataacattaaaaaaaaaatgcaatactaaagtattgttattattattatttttccattaatactgtttcttttttgggtatactaaagtacttttattgtgaatgaaataattgtatttctaatgttaaagtacatgtagtatacaaatgaaaatattcgaaatttgttgggcaatgactctcatattatatatcaaaaacccattaaatacgtttccgacacaaaaacataatgacgcctagatgaacaacttcttgcgtctggttccttgtttttagaatttcttttatttattttttctgattaaataaatatttttaaatgatactacatagagtttgtgtatataatacattataaatgtacacattccaataatgtaaaggaaactattacagtagagatgggtaaatttaataggatagtaatttataacttttgatttaatcgctcaaattaatttttgaaaactatatcataattaatacatttatttatttataattaactttgaatattattaattataaatttaactaataaaactccaaaccatctactaaaaatttaattttaattatatatatactttttaattttaaatttataatattttaattaaatttattttaaaacaataatta

SEQ ID NO: 69317 - DNA, 961 bp, Cannabis sativa
taatcgtatcttatcatgccatgtggaacaaatatacttttcttacctcatgtttcggtccaggtatgttggccgacctatatagagaatgatcaacgcccgggccctatgtcataacaacaaaagaactattaaccaaatgatctaacctattctaggtccaaaattcatttccaaggcttccactataggtcactagggtacccctacttcaaactttgagaaaatatggacaacggggttcaaaaacaccattagaaatggcctgccattttaaaaaatggttagccgttttcttgcagtttcttggcgagaaacagttaactgttttccaaaaaacaaaacagtggatcattttctgtaggaaataggaaccccaaattttatacctctcaaaactccaccgaaacctatccaaatcattccaaacttcacaggacacatatatatcatccatacaacagtttcagtgtaacagaaataaaaaatgagtccttaaacaaaaaataccattaaagatcgagctttgagctttaaaagctcacactcgatttctactttaaaaccaccttaaatccaacaaataagcatcgaaatcaatcccatagcaacccaaaaacaaaatcacgagatcacaaattccataaccattctaaagcacaaagtcaacatataaaaattaacttttcaattttgaaaaggaaatggattcttacccatgttctccttcaatgattcactacctagctgctatcagggcttgaaacactaagtttttggctgaaattttgaaaaaaaaaaaggatggaggaggtggtagttttgtcacatgaaggtgaagcagggtaggttttttattttgagttttgtttaaaggttttaatatatatatatacagataagtttaaatttattaataataataaaaataatactcataataaatataataataataata

SEQ ID NO: 69318 - DNA, 1835 bp, Cannabis sativa
ctcttatggctaagaatcagttgttagatgggtttgctataattttagcagacattctcactatttataattatgttcgaattcttgactttaagcattatattcgttttgataatgcattagcttataatttagctaagattgctaatatttggattatgatgtgatgtagtggcgggaccttctgagctgtttatttgtgagtcgtaatcgtttggctaaacttctacttgtagctagaaatataatataagtataagttttgacttatttttattgtttggataagtattatatgaatagttttttttttaataaaaaatattttttaaagggtttgaatattatcaaaaaaagattttttgtaagtaaattaaaaatcatataaattattttaattttaaaaataacttcccaaattttttttatgagaaactacaaattctagtttatttaaaaaaaaaacataaattaattttttttcttccaaacactcttaaaatgactttttttaattttaaaagctaaaagatagcttatggaaatgaggtatattgaaaaatacctcttttatttatcaattaatcaaatctacttttaattttgtatttaattgatacctctttttatatttattgtacccaaaatactataagagaatcacatggaggagactatattgaggtaacatgggtaaaattgataaagtatttaaaaaaaagcaaaaataatagatttgaaaaaagagaataaaaataaaaagaacaatataaaaaaagactatggagtctaatttcctcaaattaagccaaaagactcactcttgccttagaaattcacccctctacaaaaacatcaattttactttttttttttgaaaggaacatttttttacttattattgatttaaattgaatacaataattatttgtaagtaacgtttaattatctatgttttccctcgtcttacgaaagaaaattggtattaagctgattttagttaaaagctttaaaaacctcagaagagagagagagtctgagcctgcgacgctttctcatctatcacttctttcctgttaccttcactttctcggacaatacaaataaaataaaataaaattaaatcagaaatcaaaagagactaacacaaacaatacacacatttcttttaaaccaaaattcgactcaacaaaccctaatttcccccctttcttcaacccaatttcattacctttgaaatcctctaaatcacttactcactcactcaattctttgtatagcttcttccatttccttttccaattcacagaccggtgacctatccatcaatggctgggtccacagcgggggacaagagtccattactgtcgccgacgagctctcggtcggtgacggagacggtgaacgggtcgcacaagtttgtgatccagggttactcgttggctaagggtatgggagtcggtaaacacattgctagcgataatttcatggttgggggttatcagtgggctatttacttctacccagatggaaaaaatcctgaggacaattctgcctacgtttcggtcttcatcgcgctcgccagcgagggtaccgatgttagagccctgttcgagcttacactcgtcgatcagagcgggaaggagaagcataaggttcatagtcatttcgatcgttctcttgaaagtggcccttacacgttgaagtatcggggcagtatgtggtacgaactgaattctgatttctgttgcgtaattggtactttttatatttttgtttcaattagctgaattgtttttggggatggggtagtaatctttgaactaaattcgatt

SEQ ID NO: 69319 - DNA, 9450 bp, Cannabis sativa
  modified_base (5510)..(5515): a, c, t, g, unknown or other
gagattgcacagcttacccggtattttcccttacggatcacgggactactaactgtcacattatacatttaaccccttattttttttttttatggcaaatctctttaattttatttttttttttttacaaatttgagatgttaattaaatatcactgttaaatagtaatcgaatgaccaatgtgtatacttatgaatatgtaaaagtaaaattttcaagccaataatttaaagagcactcacaataacttctctacttgatcatatataatatctcaccaaaactctatttttctattttaactcaaacttttatattacatcatacatcagtttctgtatatatatctcaaatgagtaattgtagctacatttagagaagttacaatacaataccattattaaaatagttttagagtaactcattgatgtatgagccatttgaccatttttagctaatttttacatataaaggtattttaaaggagctcatgtgagtgctctaataatctagttggtatttaatggtgatatccaattaatatcccaaatttgtaaaaaaaataaaataaataaacatagggagattttgccacaaaaaaataagaggattaagtgtaaaaactcaaaacatcagaagtttcgccgtaaatgcatgtttctattttttttttttaagagagaaatactcatttctattaattatattttatataattagattttttttcataaatatatatatgtattatgttttattttacaattttacgatttaaattttttatttataaatatatatttttaaagtttcaaaattataaaaatatggttttctcggcaaaacgtaagaaaataatttttttaaaaaataaaagaaatcaacatcacaacaactataaataaattattaaacaacaaaaaaattcaacatcgtaacaactataaataaaatataaaactaataaaaaaaaatattgaacaatttactgaaatttgtatttttatagataaaaaaattcaaaccataaaaataaaatttctcggtgttaatagttttttgtaaaaaaaatcaaatatttggtcagctatgaaaaaaattccataaaattttggttattgaaatatttttgaaaaatttctcctaaaaataaaaataaagatgctttttttaaaaaaataaataaataaatattcttttgcatcttatattttcttaaagattttttttccaaaatacgtggcaattcaggaagaaaccatgtggtagtaggcctccactacgggacatgctacaacaaaacatatatctgaggcgcgtgagtcaagaaccacttcaggagtttagtcatctccaataggaccctctgagatggtagttagttattttttcccctccgtgagaagactcatgccggagaggctacaactagattgtaggattcggcgtgaggcccaaggctgtatatgaattgaattgttttcaggatgaatatgctttgcttaaaaatcagtatacctttaaaggtcaagaaagcgatctgctgctactctggagtccgaaatagctacactacatgataaaattcaaacagtgtctgaagctaagaagcttcctaaggaaccggtggtgcaccctgtgcgcaaatttaatgcagcatgggaaaggtcaacctagctatggaaagtgtgtgtttaagggcttaaagccataattctttgactttgcgacatctcatgtctcatttgatagctacattgcggactgtcaagtcatgcctcgcaaggcatcacctctaaatggtattaagtaccactaatactcaataataatacacttcattttattaactttctagtttatgtcttgattaatttttgtatttctcaattcaaactataatataaggatttaaattagattttttttgtcattctaacaaaatatataaaattaattaattagattcttgtgattttgtaatttttttatgtaatcttattttacagtttttgtcaaaggatttaaaaattagatttatgattatttaacttatttttttttaattctaattctagttttttttaatataaaaatatttcaattagattacatgttattattttagttaatttttattaataaaatttcattatttattaaagaaaagtaattatcacatttttcaaaaattcaaaatataagcatattaggacaagataaaaaaaaaaagttggtttaggtgcttgtgtaagtgatttcatgaaaagttacaaaaaggccaaaaagcaatccgacaagagatctctctaactcagtgctgttaaattctggtgatttttactgcttctttttatggtgggccactaccattagattcatgccacgtgttctctataatttgtacactaagattcaaactttttcctttttattcaagtcaaccatttgttgtacaccactccaccaatacacccactaagttttacattgatattagtttttaagggttaaatgactgttattttacttgtatttaattttataaatttaaagtttagtcttaaaattttttaaattattaaattagtaacaaatttaaggtattatttaaatattattatatactgtttatatgtatctttttatacacatgatacgtttatattagtatatataatattattatttaaaactaattttcaaaattcattttaaaattataaaattaaaaataaaatatttaaaataataaaaatattataaattttgaaataatttttatattttttaaataataatattaagtgtactaatataaatgtaacacatctacaaaaatatacacataaagaatctatattgacagttaaatgtgaaaaattaatgataccttagatttgctaacagttcagtagttttgaggatttttagtcaaaatttgaacttaaaggattaagtgcaagtagaattataattaagagggtttaatcgcaaaaaattctattgatatttgtgtgattaaataacgaagaaaaaatttacagtacaccccctaaaagagtgttggttgactcttatttattttcgcattcaaggaaattttgattgagtcccgttcttccaccttgtcgagccgctacctcaccttgactcttacattagtatgatattgttcgctttaggccgattcctcacgattttgtttttagacatatttctataaggtctcatactaataaagtaagttgaacacttatatccaagacaactcttgcctattctacaatgtgggtcttgaattgatactccaataattttttagttcattttttatgatcgtgttcgtgtagttaattacgactacgaaaaaatcttaatagtttagaggcactttggctgtatttttagtttttagttttcaaaattgagaatagaaaataatttttagttgtttttaaattttaatagtgtttggctaaaaactgttttcatatcttttttacttaaaaaaatttcaatattccacagtacaccacaaacccaggatcctaaattcgaatctggcctaagatcccaaactcagaccccgaacttagattcgacgggaacccagacttggaccctggatttagacttggcgctggatccagacctcgatcccagactcgaaccccgacctaaacttgagtatgagagaaaaaatgaataaaaaagatatatgttttagacaaaaatattaaaaaaaattatttttaaaaatagaaaataatatttttattttttttaattaagttttcaaaaaattattttaaaaaaattagccaaacacttccattatttataaaacttgctttttgtatacactcccatttttatacacatgatatacactatccttcttatacacatgatatataacgctgaacataaataataaaaaaaataattatacattgcgttcgataaaatatttaaattttatttttaatattataaaatatttaaaattaaaaaattctcttaaataccaatcttaactatatatattgaagaactattaaaacaccatgcttaattaatatcaatcaatcatatgattaagatgatagtatttagtacatatttttgttttgaacatttagtaatgaccacatggttttgaatgaatgagatgtggactttcttagtgttgtttgtttttgaacaagtttctttatatgagaatagaataagattatataatttctcgatctttgttttcatttttttttctttttcaattgaatgaatgaatggtatttattacatattttagaattattatagaaacaagtactacgtacaaaataattcacatgttttttggaactctacaaaatttaattatcaccccatcacaacacaactcataactatgtcggaattcttaccattattgttattattttttaaaattgtatttcttttatctccttcaaaaattaacattatatatctcctccaatatgtttttttttttttaataaatgaggtaattttattgatattaattagctaaaataatagcacacaatttaattagcgtatctcccttattgatgatacgattgagattagaattagaaaaatgagtcaaatatataatcagccgcctaattcttaaattgtttgacaaaaaaattgaaaaaaaaataaaatgaaaaaaattacagcatcacagttaaccttaaaaatacctatattcagtttcttctatcgcttagaagacacaatagtagaaactgttgcagtaaattcatttaacatcgtaatttgaacactcaattatattgtccaaggtaattaactacactaatgacaacctcttcagtctcaaaaaatttgttatttacatcaactaacaacgatctgatgacgaaccatcaaaaaataaagaaaaaccaacaacgaaataaaacaaaaaaaccatgtcacacaggcaacactaagacactcaaaaaccatgttacagagacaagagtaaaacacttaaaactatatcataaatggaagactaatcgcagtaccaaaaactgattgtaatagaagaacacaactccgatcaagctgcacctatacctagggaaagccgacaagcttgaccggagaaaaaagacaacctcttgtaactataaatttaggaacgataaattcaatttttttttttaatagatacgaattcatgattttttttttttttttaaaaaaaaaaactatatgtgtctacattattaattcattaaattaagaaataaacttgatttgggtatagcataaaataaactcctatgtataaatattaatactgtattagcatgtaattatatatattattaataaaaataatacactattcctaatccataaatatgtagacaaacttggcacatgagaaaacatcttaacattaaaacaaaaaaattagattaccgaggaggttggcagtaacataataataataataatannnnnnataataataataataatatagatctagactaaagaaccatctggtcccttttctacaaaattttcctatcttacttagaccttaacaagagcaccccccaccactgttgctcccgctctttaaaataaactgttgacttctaaaatattggaataaaccgtaaagtcttttggtggagtattctctcaaacgccatacctataaagtcagcttttgctaaaagaatacaaattgaagacgtgtcttgccccttttgcgatgaggaagaagaaacaatggatcaatattttttcctcaattgtaattttgctttcatttttggaggtcctcctcctgggggtaatgcttgtgccagagtgtgggccccgaatgtaataagattgggttaaatttctatggaggttgaaggaaaaaggagtggaggtccaataattatttttatatgcttcaattgtagtggacacgatatggaaaacccagaacgataaggttcatactaataaatataagtaacattaagtgttgtattgcctatatttctatatgttacacatattttggctcttgtttgtttcctacgccgatgatatttacacctcctatttggtcccccttgcttggacgattggatcaaaatcaactgtgacgttaaggttgatagcaactcaatgtgtatggtgaccttggcgagagatcataacgagttagttttgtggttggctagcaacattctcaacttctctgatcctcttattggagaagttgtgacctatttgttagccttacaatcagtgactcgtaggaagcatttgtttgtgatgatagattgtgaatttgagacggcaatcaacatgctaaagggaactactctcatttagggtattggtaactatgtacttcaatgtaaaatgctctcaaaccttttgactagttataattttttatttatttccagattatgtaactttgcagcatataatgtggccaattgggcttttgctagtaatgtgactagtatggtagatccgtcttccatacctgttaacttaatttgtaatgaccacgaggtctaacttcttaaggtttaatatattcacgcaatttattaaaaaaaaaagatttaaattaaggttaatattattttagactttgtattttgtaaaaggttgattgaaccttttgtcttattaaatgacaaattgaactatgtatttgctaaaataatacaaaatggtacccttgtctcaaaatttaataattattttttttaatataataacaatttctagcataaacaaatgtagaaaatgtaactagttttttataatattattcttaaattttatttcgtttaaaaaattattttatactattttaaaaaaaaatacatagtttaatttattatttaacaaaataaaagatgtaataaaaattttctaccaaatataaaatccaatcaataatatttagaaattatataagcatttaacttttgtaataatttgaatttataataattgagatccattgaaataaatatgatgaatttatatttattactgaataatatataaacaatcattaattttctttgtcatttagttaacaaacaaagatgacaaacaactatgaatcctcttttcacttttttcattctcattctcacttataatttattaatattactcatacaataaattatattaattaataatgttcattagtttagtatataattaattgcagttgaaatgtttttttttttttcattttcattaaaactcattgaccattctttttttcttgaaacttgtaaatgattaaataaatatacattggtaatagtggtaagtaaccaactctaatatttggtagagaggaaaaaaaaggaatttaataattttgtatattatttttaattaaaaataaaaataattaagtcattttatttaaatgtataatataatagtaattgtttcttcattttttttgtctttcttcaattttaaaagaagaagaataaatagtgctgggatctaactttttttttcatccattttcacttttttttctttttctaattaaactatatgtatatattttacttaaaaaaagaaatatatattttttcttcatttcttcgctattgtttactatttttttgctttcgaaaagaaattcaaaagttagaataaatttttagtttcaataaagagtgacactatttattcatgaaattttgaaaaataaattttcttgttaaattttgtttcctgtcagaaaaaaaaaataattggacatttttttttatatataaaatttcttaacatttcattttttagtgtgctaatcaactttctaatatgtatttttattttgcaagtttgcttaaattgttcagttcggctggatgtcttttttaggattatctacagtaattttgtctaaaattttcaggataacttaattttatataagttattttgtttttatagcgattcatattatcattttataattttttagttagacaattaatttcttggctgtctctcgatgtggacgtctatctttttatagttcacatcactctattaaaaaaaaaaaaacataaagtaacaaaactaaaatagaacgataattgagtggtgattagtgaggtgtaagaaataaaagtaaagatttaacaaagtttggacttttttacttttgatttattttgtatgcatcaaatatgatatagtgtgtacatataatgtaattttgaaaaagacacattcatgaagttgcatggtacttaaaaataataataatttgagctttgtcgactgttctacttttttcaaaaaaattgatataaaatgattttgaaaagactaaactattaataaaaaaatacaaaaactttattcggtagaagaaaattgagtatttgggtagagcccaataatattttaactctttcaaaaaattatataaatataaaaataaagtagggaaaataattattaattccttcttattatctttttttctttagccacttttaccttttttttggtcaatggtcaaaaacacatttctatgggagctcatactatatgaatacccataaaaccattaaatggttagaaccttcaattagtcaacccaaatcaaaatttaatattaagacatttattatagtacttaacttagttttaatattatgaaatcatcataacttaatatagacatatggagttattttttattttcttacaaaataatatgaagttgaagtaaaattataacttgttgtaatatgaataattcctatataaacccatacaagttgagactataatttttttttaagaaaaaatttattccaatatgaaattacatatttacaacttgcaaagtgaagaaccaaatagtgcaaaactaaataagtaaacaaattaaagaattagataataaactaaatttaaaaagctcaagtaaaaacctaaggaaaaaaggacacaagaagtgtccaattattgagtacttttttcctttttcattactaattggtaacaggagtggcaggtggcaacactcttgggcttggaaggcccatcactcttgggcttggaaggcctgtcactcttgggcttggaaggcccatataagaaagccttggtgagactcgaatctttgggctgggccttggagaaggaataggaatactaccataaccaccatggttgacttttggggataagttgacttgttccaatgctcttgattgtagctcttgaggatagtccctaacacacccaatacgtggaccaaccccgcttgtccatttgcacgataaacgtttcgccatgtcaaacatcggcggaactccgctattgatggcattggttgttgttgcagcatccggttcttgctcgatgacaacagta

SEQ ID NO: 69320 - DNA, 787 bp, Cannabis sativa
tttttttttttttgaaggatggtttatctccttttaagttggtgtaaaccttgaaataaatatatattataaacatatgatgataataatgaatatatagctcacacttaaaaaatgggattagattattaaaaaaattaaacaaacaataatacacacactatatatataatgaatgatgagttgattaaaacatattattcctatgacaaggttaatcgaaattcactattaatacattcttttttaaaatatataaatatcttaaattgtaccagctatcctggcctaaccatggatagaaacaggttagacttatatagagtccacttatctaatgccaaaaataaaattttttcttttaaaattatacatttttatattgattgattttaaaaaataccatctttttaaataagggtcaaaaagaaaaatcgccccacaatatttttgaaaaaaaaaagaaaaaaagaaaaatcgccccacagtaaaaaagaaaaaaaagtgagaaatttcagtatgtaatgtaaaaacatcttttattaatgcatagacgtacgtaataccttatttgtgcatgaaagatagctttcgccccaaccaccagaagaaggtagttgcttagagagcaagaaagtagaagcttttcgaatggaatggctggtttggtaggtgcggccagctgcgatcaagccctttacggcgaagtaagtggcatagttgtagcaaacgccccatgatccataccatgagccatcttcttcttgcttgctctctatgaactctg

SEQ ID NO: 69321 - DNA, 1131 bp, Cannabis sativa
ccagatttttgtgacagctaatcctatactgagtggtgctgtaaaagagcatgttgaaggcttgaaaaggtgtgacagtgaagcattgaatagttaaatactcacttttactctttgtatgttcagtctatgaatatatgacatgtttgctatattgcttatttgtgttcatataattctcagattttcttgtggtgggaaatcagcagaagattcattctcagattcagatgttccagattctttcgagggtcttaatcgttgtcttttcccgcttgttgtttcatatcataagtttctgatgatgttagatggaacattagggaattcattctttgatagatttcctgaagcaacaaggggtgcaacatcattggcatgggagaattttatcagaatgaaggaagttaattttgaaaaatttgagcaatcttattggcctattttgaataggaaaatcactaagagccttccatcttcagctgttttcgcggaaataatgtcttgcataaagggtggattgcacacttcgatttgtcatgatggtaatcttagtcgtgaggactatgtttcgctatctcaaagccgggtttcgaatttggatggagagactcgagaatgtgtgtatgatatcttcatacattatgagagaaaaaagaagatgaatggtgaatatgatttgggtgatctagtgaccgatcttcatcgtcgacttggagaaggaaactatgaggccattgagtttgactttgtctatattgatgaagtccaagatttaacaatgaaggaaatttcactctttaagtacatttgcagaaatgtgaatcatggttttgttttctgtggcgatactgctcaaaccatagcaaaagggagtgactttagatttgaggacatacgccacctcttctatgaagaatttatattgaaatcaagaagtggaaaaagctttgggagaggagagaaaggtttaatgacagatttattccatttaaacaagaactttagaactcatgctggtattttgaagttagctcagagtgttgtaaatcttctttactatttctttccggactcaatagatgttttgagccccgagataagtcatattatgggggaaactccatcact

SEQ ID NO: 69322 - DNA, 565 bp, Cannabis sativa
aaaaaaaaaaaaaattgtataaatcttcactctctctcttcctgttcttcaaacagaaattgtattggtatttgatagttagtcaggtagcagtttttagtaattgctaaagtatattagattcaattctaaaatatatcatcaaaatctagtattttctatataactgaagcaagtacactgaaaataatgtgaaaattacattgtatactctttttatttcacttgttttaattagtggatataataaaaaaaaaaaaccagcttatcccaaaaataattgaatgttaaagaaaaatatagaaatgcccagcaaatgagattctcttctattttttttttttttttggaatatttataataaatacccaatattagcaaaaaaaaaaacattacaaaaggatgggtttacagttttttaaatatttgtacggatttaaactttttgcacagaattcttttgagaaaattatactacatattttttttaagttaatgcctttaatttttatcccatcttataaaatttattatgtttacttttttttcaatcattcaaccaatt

SEQ ID NO: 69323 - DNA, 600 bp, Cannabis sativa
tccaaattactgaagcggtcattacaggtctgcacagcaatcaccaaaggatcattgtgagggaagtgcacattcttagcatcatcctctatgaaggtaattagtaagttcatcatttggggatgttgtgcaggtgattttaccaatatgcatacttcaccttcatctacttccctttagtatctcttttatgagttgcgaaagcttgcggcgagatgagatcctcctaaaattattgcaacatgtccattcacaagtggtggaatgagccgaagaggatatggggttcctgctccagggcaagcgatgcaaccacagcaagagcttgcagtgcaagaagggtaggtaatgatgttcctagatcttgagagcgtcctacaccctcaagaggatttatggtgccccgctatcccagaaccatcatgtttccttgaaccaccccctgttcaggatcaatgatcgagattcagacccattgtccaaagtgtcccacttagaccaacatttcaatctcatcctttaagtactcgcactcattagtagtgtggcccttctctccatggtactcgtattgtttgttctggtcacggctattcctcc

SEQ ID NO: 69324 - DNA, 834 bp, Cannabis sativa
aaggaaaactttgaattagaaataaactttgtcaagaaatcagctagttgatgattgttaaagacatgctgcacgtaaatctctttttgaatcactttatttcaaacaaaatattgatcaatttctatgtacttggtgcgagcatgaagcattaaattgccagcaagcatgatgatgcttagattatctcaccaaataagaggtggggtagcacctagcaagagggagttgcaacttagagaataaagacttgattcggtttatctcagagaccacaaaagaaagattacaaaactgaattacaaaatattaattacacaaagtttagctcaaatattgttaatcaagaaaacgaacaacttgattaatcacttgtttagctaatttaacagaattaacaaaagctaactaactgaatgtaaagcctaataattaacatgcttgatcacttgaacctattaatattatgtgtgtaatttaacataaatctcacacattttaatttaataaataatataaaaaattattaatcatttaaaatgcaccaaatttgtatgatattggacaccacttataatgaaaatcctcttcatgtaattataacattccaatcaattgttgtccacatctatctttgagtggtctaatcaatggattcagaattcagtttaaaaacatggttgcttagttggaatttttaaagttgtctcatcgaatttagtttaaagtactgttcacagttagtttttcaaaagacaaccatgaccatccatttagtgtgtatgggctttatttatgtggtcttttctttaaagtttgtttatgtatgttggt

SEQ ID NO: 69325 - DNA, 3745 bp, Cannabis sativa
agaagaagaagaagaagacgatgaagaagaagagaaatggagattgattttgaagaataaaaaagtgatcttttttggtctgaaaaaagtaataaatttgaattaattaaagaaataaaactaattgaatgatattttggtttagaggaagaagataaagataccgtgccgtgacgtgacgtaaaaccaccgacaatgctgaaaattgcttgggtaggttgagccttttttctggatatgctatccaaaataatatactatataataataatatatattattagtattttggatgaggaaaattgaaaagaagaaaatattatattaatacataccaaaattctattataacccctcaaaagacttttgtatctaaaataaattaataaaaaataaaaaaaaaaaagaataacttatcttttcactactttcatatttaaatttaaatttttaattaattcctataggaaataggaatatatgacttatatgtgaagtctataaataccacagttcatttaagatttattttttgtaacctcactttccgaagcattacttatattatattataagcttaaaagctcatttttctactcaccaccactactctcattctcaactctcaaccaagatttacagtcagttacttacggtatgctatgtgctattaacattaattctttaagctaagttactctaaaattatgagaaatattaaaaggcactaatagtgcttagtatccttctacgtgtcaatattattattggtctaagtaagtattaggtctcatatagtttaatgcaataatttttaagtaatatcgttaaccaataacaagacgacacatcaaaaaagtattaagcaccattggtactcaataacaatactccaaaattatttgtgttatttatttgttatgaggaaccaatatctataaatttgttagtgttaaagtcaattatataatcaaaaaaatttatgtagaaaattttacaactactaaattttttattttttgttaatttataaatgtggaacttttttaatccaaattaagtttttgaatttgtcatttataatcataggggagggaaaataaatctttttattttattttatttttttattttatggtataacaataacatatctttttgaatatctagagtaatgttttgggtaactaatcctaatcaaaatagaaatatacattatagtaagtgttatatatacaaaaatatgctaacgagcaatcctcacttgttccacactaatcttttcttctttggtttgctgcaatacttgtcactcttcttattttctattcacatattttggtttgtcaatttagttagtagtttcaagattcatttagtaatttcactttttgttaaattttctatatatttattcatagtatgtcttgtcttccttctaagttataaatagtaatttcaattcataagtaactctttcttgtagaataattcagaattcacttattgattttttttttccaaactgtaaattttatttttaagtctccaaaaattaaaaaaataattatatgtatttaaatgctaacaaactataattaaacacttttgatttgtagattaaaaacaacatattactcatgggtggatgtctttcttgtttttattgttttaatgataatgaagcaataaatatgtctaacaacgaaaataactctgagtctgaggtacgtaaaattaccatcttctcttattttatttattaacataaaattgtttttaatattatgatgattaatttagtaatattaattatgatttttattttattttttgagaattgtatatttatactatttatattttgtaggtttcatcattatttaatgaagatgatcaaagtcaaatttataaacaattacaagaatttcatgaaaatgaagaatgtcctacatgtctcgaaggtaaaatataaatacatgcatatgttttatttacttttagagtccttataaatattattttacaatttagtcatttaagattttgattcaaatatatatatgcttagaaaaacccatttaaattcttatgttagcatcctacattattatttataatttattaaataaaaagattattcttaaataatatattttcatgtttataacaaatacaaaattaactttttgttttgacagaatttacagttgaaaatccaagaatcacaacaaaatgctttcaccattttcacctctcatgtatatatgagtgggagcaaagaagcccactttgtcccatttgtaatcgggtaattattcataatcattttttattttattattcattattttcttaaaaaaaaattgttaatatttgttatatatatatttatatgaaggtgtcttcaaatcaaatcttataatttcattttacttaaatgggattttttgtggtcttttctttttttccctttaagagggtcattgttatttatacatgtatgatgtaacaattgatttttcttttataaatacttctattttttttttgtagcaataaatacttctattaatacaactgaattatttggacttttgttttttagataatgcaatttgatgaatagagagcaatacaagataaaataagccagtcatttaaggtgagagatttagcatgaatttttatattaatattcagtagttattaatatgaaataaataataaaaataattaactttttagtttgtgtttatcaattttttttcctaatacaatcataaacatccaattaagagttttagttagtttcatatgtttataaatatttaaaatcatatctagttattctcttaaaaaagttcactttacattgttttttttttcttactcctctcctacctgtttttcatattttctaattttttgctaatatatgatcattattattattttcagtcgaaggggaggattcataggcacgtgtgacttgttagtcgagaatttcaagaacaattggagtttttcgagttgattttgttttcttcttcaatttcgttcatctgtattttttttatttttatttttagaagagtttatctctaagcacattttcttctttaatttttttttcttttcaaaattgcaagtgtagtaaaagtaaaccattgattagattttattattttgacgaattaagtatgtttatatcgaatttctatattttcatcaaaggaatgcattacaattttattcattttttttaataaatctgtaattttttttttaataaatataacataattgctatatagatatcgaggagagactggagccacaaccaatctttttacacaataaaaaaaacacaaccaataatgtgaaatgaaacaattctcaccaccacaacaacaaaagcaaacaaactttgtttttaaaaacatttaaagaatagaccaatttaagcatcaataaatatggtgaaaaattcttgtgtcatttctaaaacatataacaatgtacccataaagtaccaaccaaacaatttctttcccataaatcaataatactaagatatccagaagctaagattgtgtaattgtaaatgttaaataaaatgataaggaacacaaaagaaaagtgttagaatctgcaacttccaacacttaaagattcacaattaaaccctcgacccaattagataaaatatagtataacaaaaatagttatgcatccaaaacta

SEQ ID NO: 69326 - DNA, 657 bp, Cannabis sativa
cgaatttctcatcaataaccttcacaaagggggcaaggcagttggtggtgcaagaggcattactgatgattggctcatcgtggctgtagccatcggcgttcactcccaccacgtaggtgggaatgtcaccctttcccggggcagtaatgagcaccttcttggctcctgcctcaatgtgcttgcctgcaccatctctgtccacaaacacacctgtgccttctatgacaaggtcaatccccaactccctacaagcccaaagaaaaaaaaagttatttaattaatttttcatcttcaaataccaaattttcaaaatggataaaattaggaagccataaaaataagttagatgaaagaatttttgacaatttataaagtatatgtatttgttaaaaacttagttatatttatgtttaatttaaattgattcttcatctataaatatcaaaattttaattttaattaaatatctctcgactgatgttactatagaggccaacgataaacaataacttccctctaaaacattttacaccttacaactttcatcaatcatatttatctataatttatttttgaagtctaactaaattgaaaacatttgtaaagaaaaattcaattaactttatcatcattacaactattgcaattaagaaaata

SEQ ID NO: 69327 - DNA, 551 bp, Cannabis sativa
  modified_base (253)..(255): a, c, t, g, unknown or other
agaaagagaaagagagagagagaatttttgtgaaagcctagcagtaaacaccagagccctcctgaaccagaaccagagcctcagagccagacaccagattcagaaaccagcttcagcctcgtccctgagcttgaacacgacctaaccacacggaccggaacgacacggtgtcccacacggctggaagcgtctcagtgcctgccaatcgctgaattaaccttaccattacctctcaactctctctctctctctnnntctctctctctctatctatctttgaagcttttgtatcaatctccagtacagaaatggagcgaatcatggactttgttaagctcgaaccttgtggaatagtgtaggttcgaactttttttctaaactcttgaatcttctctcgggagggttttcgagctccgaagtgttgttttttttctatctatcgaacttgagcttatggcttgcttaagattgaatgttgtgaacttggatccggagaggaaaaggagcggtgggttgagaacgaagcaagcaggtagaggatcgtgccgggg

SEQ ID NO: 69328 - DNA, 802 bp, Cannabis sativa
tgtgcaaataccaaaagtacttctggaattcaggtttaatatattatagcaatggtaatgaatatgaatgtctaatttcaactgttcggtatgataatttcaggtcatttacggagttatttgatcgccgggaatacattttgtcactgctcagctcagagcaagtaaaggtggacaatttgttatttttgaattttggtggttgtaatcttgtgaatgatgtttgttaatcaattggagattttgatatgagaaagtttagaaattaagagttttcttaatgtatatattgtatatattgtatatttactcaatgttatatattgattcaccatatgttttatgaatttattaatttttgtaaaagagagaaaaataacctatatatttcaatctaaaaaagtcactaataaattaattatatttaaagtatagtattatttgctacattggcaaataaatatattaaattagtgtggcaaataaatatatcaaattagtttggatttttgttgttcgttagttttcccaaatcaaattttgcataaattaagtatttatttttcatgtttatcttagtaataattttattttttatgtatgaaatgaagtataattttttttggtagtgattctgtgttattgttttaatatgttgcttaattgtttatataattttttttggcagccatgatggataagcttattataccaacttcttctcaattaggtgaattgcatgatccaaacactaccttgaatgttacccaaagtcctactctaaacaccacctcaaatccta

SEQ ID NO: 69329 - DNA, 799 bp, Cannabis sativa
tgtccactgagagagagtgcgagagaaagaaagaattggaatgtgagagtgcaagagaaggaggagtctttctttcagcgacaactggtggtggtcttacctacaaaggtgagcaaagagaaagggagagaaaaatgtaagagagagagaggtaggtttgaagaacgtgaaaaaaaaatgcaaaaatgatttttttaaaagaaaattatagtatttttcatttgtaaaatattttttttattttaaataattatatcatatgaactaatattattatatcacgtgtacacttatgtacacgtgaacaatccactttagcatataacaaaatttattgaatggaaaatttaattcggtaacaacacttataatgtggtttgagaggttatataccataaaaaaaaaagaagaattaggaataagttgctagtgcacgcaaagtttttggggtttgaccgtaaattactcaacatatataaataaattaaaactgaatattttgatcgggtttgatcctgacttggccaacccacccaaacccgacccggccaacccgcaaaattttaaaaactcattttgttcgggcggatcgggtccaactcggtacactttcgggtgggctcacgggttgattttctatagccgccgaattttaggctagacccgaacccgcttgccaaccaagtcaaatttaattttttttatatatttttcttacatacataatatattaaagataattaaaaaaataaattttaaaaaataaataagtgaaatatttgtgttgtctattacaaag

SEQ ID NO: 69330 - DNA, 4492 bp, Cannabis sativa
ataaaataaaaataaaacctcctcagtttgtttcctagttgtatagaaaaagaaggtaaaggtcgagaagtacaatgacttaaataacccttttatttttgcaatgacttaaataaccctttactccactacaatttctcgttactctcgtcaaacaaacaaatccccctaaagcttttgtcaaaaaaagaatctctctaaaggtaaagtctatataaataaataagaaggaagaaacccaacacacacagtagtagggaggtagatttccatttgtgtgcgccaccaaactacaacctccccaaatcctcaatggcgatcgccttttgcctctctccagcttcctcttcttcatcgttatcattttctaatctcaatccccaccgttcacttctctcatcgtcttcatcgtcccatcttcaccttcgtttctcttccgcaaccgttaactcccttacctatcccaacagccgcagtttgtctcattttgttgctgcttccaccggtggcggagtgggtggattcaacggtggaggatcttcaggtggcggcggcggcggtggtgatgatcacggcgacgacggtggtgaatccgacgaaaatgcaggcggaaagaacagagcggaggcttttttggttcttaaagaagcggggaggtctctggagagtttgcctaaggacttggcggcggctattgaggcggggcggattcctgggttggttgtcagtaggtactttgcgcttgagaagtcgggattgatccggtggctgatgcagttcgctggatttagggagaggcttttggctgacgatttgttcttggctaaggttgctatggagtgcggtgttggaatgttcactaaggtatactctttctaactttcttttttcaatcactgtcattgttctttgatttacatgtaaataataaatgtgggtgatcttgatatcattttcagcaataaccaaataataataaaaattaaaagatgaaaaagatagccttcactttctgagtagttagagatcaaaaggtcttttaagctccacagttctgtttctatttcaaaatctgagatagtcgtatatattgtttgataggtttgataaagtttatcacttttgttggtttctgagttttgatttttacattgatcatagactgctgctgagtatgagcgccgaagggaaaactttttcaatgagcttgaagttgtttttgcagatgtggtatgtattgttttcttaccatttctctcgtcgattgatatattattttgataatttatttacactctgaattatgcaaactatgagtacggggccacccatggcctaacttctcttgttactttccatgacaaatcataaagcaaatttcgctttgctttgaaaatcttatatgaatcatggtaacttaatattttcattgaataaatttaaatttatttctaaaagttcgttctatctatttttcttaggtaatggccataattgcagatttcatgcttgtttttcttcctgcccccactgtttctctacgacctgcgcttgcactcaatgcaggattcattgccaagtttttccataactgccctgataacgccttccaggtttttatctttttctgtcaacaatttacaattctttccgaggtttgtttacagctactcatattattctacatatttatgggcagattgctctctctggaacatcatattcagtaatgcagagaattggtgccatattggtaaggagaagatgcctcctagttttcagtggagaaaaataaaatgattttaggtacttacactgacttgattgttcttgcagcgcaatggtaccaagctttttgcagttggcactgcttcatcactggttagtttctgtttgcttatgtaactgtttctgctacttctttctttcctgataatggtgtgatttaaaaaaaaaaaagaaataaaaatgaaatctaactttcacaaatctgaagctggcgtaataaaattggttaattatttttatttaggttggtacggttgtgacaaatgccttgattaatgcaaagaaggcagtaaataaggatgctgctgttgaagttgagaatgtgcctatagtatccaccagtgttgcctacggtgtgtacatggcagtttctagcaacctcaggtacgtgacttctccagtatcactttaactataaatggaccttttagtttagcaattcatccttgcttatgtgctaagttggtgtgatggatttgttaaacttggcacacgatgtgctcaccagtttattagataaacttagctgaattattaaactatttattcttgctagagtgcttcaactgtctgtacatgtaactattggtttcatgactagcattagcattggaataactttaccaaaacgataattgtgactgacaggtatcaagtattggccggtgttattgaacagcgtttcttggaacccttactacaccaacacaagctcatgctaagtgcaatgtgctttgctgttaggactggcaatacattcttgggttcattattgtaagaattattctactatcagcattttttattctcaaatgagtctttccccttcgtgtttatattctgatcattttctaaactctaatcacaggtgggtggactacgctcgttggataggaatccagaaatcccattagtaattgttggttcgccttcactgccatttctatttttctttatttaaaaggaatcatatagagtgaagttagtctcccttgctccactacagagatgttgtaaaagaatggcaaattgctaaaaattggatttgtgggggagtttttggtgcttaggatgctttggatattctttgtcgtagtacatttacagctcttgacagtgctaacacatgggattttgataattagtttctggtccattataatttcaaccccattcatgaggatttgtggtacactgttacataaacttgaattgttgttgttttctttattatggaatgagtttttgtaattattgaagagatctgtattctgtggttcgagcaaattactatagttttatggctccaaaaatattgtagtattgccttttttattagttcagttattaacgagaatacgtatgcacaacaagccaagcgaatcatgaccatgagttttgtttcttgtcattagtggttcctgtgaaaatcaccaaccattgaaaactcttatgcatgatcttctttatcccgaagctgtatgattatcaagcaattattgttcaacatatctagtattcatttccgtcgcagtccatataacttactaatcggaaagttaaatctaaatttaagcttagtacattcatgcccttctcttgttaaattaagctgtgacatcttccttggtacatgctctgtatctgacctctgtagtgttttctccatctccatataccacgtcgcaacagtctcttccattactctattacattttcacagaaaaacacacaataatcaaaacaaacaaataaattagcaaaacataatgcagattgctgtatacaatcataatcatttatgactaagtactgacctccagtggcagttttgcaggagaaaagactcgaattctttgaatgtgattggcagagtggttaccacaaggtgctaagccaggagaagatgctcttacataagtgttcataattcgatcattggactcctgtgtggagtggaagaagaagacatgaggagtttcacagggattgttggtcggccaccgtgtgttgaacatgtagaaaggtgacctacttgatctttgtccccgccatgggcgaaaagtctcgagtggtctgcgcagaaaactgcgagggagtgtggcttcatagatgtttgtggagtagccccatgagatggagatagaccagttggtgggcctgtggtggcatattgtctgttggagaacacgagaggggtcaactttaactgccttcatgaggtgtttgatggagtcgagtcgggttttgttggggaagatcgggtctacggtgtcaatgtggtggagggagaggaatggagtctgtggatgagctgaaagtagtcctgatatgtcaccatgtagatcaatctacaaccacaaattttaagtaatgatcaaaatttacggcgtttggacctttgattgttataattgatgtatatttaataatacatatagttaatcaacattatggaagggttagagtaactataatatgagagaagtattctatgaacgtatgcatacaatgacttatttatgtaatttgatatcgtattagattttttaatataaattaaactatatatataacattcacaacaattatgggttaaagagagcttttcctccgaccttgtaagaggaatggtaaaaagtattagtggtgcctaatactcttctatgtgttaatatttctattggtcaaattaaatatcggg

SEQ ID NO: 69331 - DNA, 581 bp, Cannabis sativa
aaaatattctttgaacgtaaaaatataattatttttcaaaaaataatgccttatgcaattattctaaaaataaattatgtttgacaatataaaaatatatacgctataataaaatatttaataacttaaattatgcattttattaaaacaaattaatacaatctcaaaactaaattttaataatgcataaaatgtaaaataaacttatttgttacatgatcttgaaaattatatatattttttctcttatataatatcaagagattttttttcaatttattttaattatatttaacttcaagaaagatataaatgttatttatttttaatttttagtaagagtttataacttatacgaattaagataacaatgtgaaaataagataattttctaaataatcatattttgtcacaataaaaattcaattaatattttttttttggtgtcatgtgtttttaatcgaagttatataatggcattgatagttttctttttagtagttgaactattatcttttattattattattgtttttaaatgaaagatacaagtatttatatttagaatttggagataagat

SEQ ID NO: 69332 - DNA, 750 bp, Cannabis sativa
ggaagctaaagagttctaggattaaaaattacaagtgattattttttttatcaccttgacaaaattacaggcgcttatatcatgaagatcgatattccatttcttattattattcgatgattatactagctagctagtgatatttaataaaggtttcatgttgttatgcgttcaaacaaaaatgggattcactttaatattaaacttctttttttcaaaaatgaaaagtcccatattcctatacaactgacatataaagtatatagtttgttgttagtaacgataatttcaatatcttaaacaatttcttttggtggctagttagcttgacaacacttttccattaaaagtgaagagaataaagtacaatttgatgaaaaaagatcattgatgagctttggaaaaacaaactgatcttattattgatttcaaaccaaattcctataaatcaacctcgagatgatctgtcatcgtcatcttcatcaggaaagcatgaatatagtataagatcaaatcatacatacaaaaaagaataaagaaaagattaagatatatagagagatagagagagatagagcttacagataaagctagctaacaagagatcagtgttggtgatctttgttaattccaaagatagagatcgatctggagttttcctttgtaaaaaaccttctttgaacaaagcaaattcttccaagaaagctgaattggttgaacaaaaactcaaactgatcagcgatctcaggt

SEQ ID NO: 69333 - DNA, 2845 bp, Cannabis sativa
aaccataaatttattaggatagattttgttgcatttagaaaaccatccaatcgatggcctcttacaatggttgagaccattatatttcgtatgatatagttttttttgtaaagcttgagtgaaaagggttggtttaatgtactgaagtgttgttcacagtaaggatttgggagctgagtgattctggtggtggttcgagtgttttctgatccaacaacaatggatgcataggtgtttccttttgtttgaggggtttggttttcaagagtcgacattggagggtgatggttggattagctcagataccaagtgaaaatattagacaaatatatttgatataaaactcaggtcaattaacaatgagttgttgcattcaatttatcggtagagtctttcacctacaaaagagtcgttaggctcaatacagctggaaataatacaatgaggaaagagaggcaatattctaacaatataatttcttaattattgcaaaatgattatagggattgcagaaaaaagacaatttagttatgcaaaatattcacctacaacagtaaagtaagacaggggaatctaatgcaatttcttcatttcaaagcaaagcctataaaaggagtcttctcttttctttcaaaacaaaaaaacaaatagagtcactcactcaaaagctatattatcttctttttgctttatcttttccctagttatatggtgatagagtgaaggtattaatttgagtttgatggagtagtgaaagtggtgtatttttctacttgttagtcattgtatcctggaaatcggttgttcatgtatcctttaacactaactaggtagatgggcaaatctggtttaagaaaagcgtacttcaggtgtctcgactttctttttaattactgattttctatctcattattgttgtatatttatattactgtctttcaattaataacacattgttatgtttgtttatcatctccattctcaatatttttatctaacattatttattaaaattattctgacattctattacatataagaatctatactaggcaataaggaggaaaggcctcataatataaagaaaagaaaaatattagaaagactcccaaaataaatatgtaggaaagtgatatatatttgttatatatacttttccaaatgttgggaatctctgaaattttgtttttttggttcctaaatagaaagcacattgcatgcttatgtagcctaaatatggtatcaaattcatttgtagccactagaagccatacaaatacaattgtgatatccctaatgccaacgggatcattaatagacaactttttcttgcaacttaaaattttaaaatatgtgcatgtttgtttaataaggcaacagaaataggataacgtgggcccctttgtaatatttgcaagactaagtgtcccactcaaacaatttcgtatgttatatagtatagtagccagttactttacacatatatagtacaatctgtatatatttatagtttttgtgtagtattatatacagtaactttataaaataaaattttccaatatggtatgaataaatgcatggttggtaaaagtgatatcgcaatgatgcatcttgtctgctctatttgtctgcgaggaacaatttgctgaagattttctacattttgcaggtggtgctaaaaggattcgttgataatattctattgtactgataatatgtcctacattataatatgatatatcaattagttatatattagaataataattatgttgattattagaatgatgagtggtttagtcttatcattatcattatttcataacatgcctaagggacacaaaagcaacaccgggataggttgtgttgaggggctttctttatctttcttttttcccttattagttagtcaagaaaattaatattaagctaagagatgaccattttattcattgttatatataaataattgttaccatcaactccataatttgcctgtatttaatgactatattaacttcgaggaacttagtaaaatattattcatcaattgcgttgaattcttgatgatgctataaccaattcgcaatagggggaggttaaaaaaaagttggttactccctcgtgtggcctgtttggaaagccatcaagtatttaaaattaattgtaattagaggtaattacacagtttggaggtaattggcaagcctcaaatactctctccaattctcataccccataaaaataaggaaattacattatatactcactttactctaattgttttaattcttacctttatttttttattctttaaaatatatctaattttatagatgatgtctccattatacctcttagattaatgtaaattatgtgctaaactaagtagagggtaagggtataatgggtaatctactcacaaaagtgcgtagtttttaataaaatataatatgaaagtatttatgattaatgaatacaaaaaataggtattcttcaacttatccataaaaattaggtatacttacatactaaaaaataattttaattatttaattgataaaataattatttaatataatttaatctttcatttttattttactttttcatataaataattttattttattaaggattttttcaaatatatacagaaaaggcaattaaattacaaaaatagttaaggccgaccctatgaacattaatacagcatataaactaaatattacaaaatactactttttctactactttagctgcacagaacaaaacaaatactctcactcacacaatcttcgatcgacaaacctagcaacccaacaaaactgaaaggaaactcatc

SEQ ID NO: 69334 - DNA, 3917 bp, Cannabis sativa
cccccaaaagattgccaaaagcattccaaacaaaataaaaaggtttatattctaagaggtgatagttctcttttgcacatgatatgcattctcctctgttaactttcataacacggagtatgtaatttgtaagcaaaagctacattagctagcaagtcactgaaaggattaagatagacacagacacacacactagagagagagagagagagagagagagagagagaacaaaaacttcacacgaatttgaaagagcattggaaaaggggaaagaaaggcatgaaggatgaacgtgcagaaaataggccagagaaaatttataatgcaaactaatgaagaaaagtcaagtgttggcaacaaaagagacagaaatatgatctcacatatgatgcgtatcaacataagtcttctactaaacaaggttaatgttttaatattgtctccaagttcaggagcctggtgaacagagaagaggttccataaaaagcttccttccagaaaccaacctcgtagtattgatttattcctcagttggaagtataaacaagcaaaacagttctaaacacttcagattaataaacccacttcataaacttcaaaactcgaactacaaacatatactaaaaaccaagtcttttgctagcggtttttgactgatatggatatgatttgacaaaactatttaattataacaaagggcagaaaggatacacaagcatcaagatatggagggcaagaccttctgtcacaataggctagctgaatcgttttcacgaagaacgaagctaaccccatattcagactatcttaagacataaaagaaataaacaaggagaagagaaaaaagaggagccagatggtcccatccccatcttatattcctgaaaattagggctctaatggttgaaatattctccactccaatttcttagctcatctataattatcagtactctttgtccgtaataagagggccttataaaactgaaaaccccaaacagaaacaaaggatcactgtggctctactcctccatatattccagaaaaaccaaaggtttggttttactttctttccttaacttttttccccgagaaaaaatactatatttcgcgttgaatcaaacacaccaaccccataacaagctactaacccacccacaaaataaataataacgaaacagagaaacacccgaaaaacaattccatcgtaaaatccgatattccaaaatatatataaatatatacatcataatctcttttgcaattttctcaagaaagataaggcacagataatcgaagaaaaagaaagccaagcaattctaaaccagtcagaatacaaaataataattaaaaaaaaaaaaaaaactcatattcataagttcaaattcacagacgaatgaatttaaaagaaagaaaaagaaaatattcgaattctggttctactacctttcttcgtctgaattgagaaagaaagttttctttttttttttttatttgcagactttagagagagaaagaagttcctttttagagagagaagcgaggagaagcaacgacgtgtatgaatgatcagaggctcaaactcttttatatgtcttcataattttcttttaattttttcctttcctttttaaaaaatatattttcttttgagaaaaaaaaaattatatttatttatttactggctttctattttaaatttgttacttctttcgtactttgttctccttataaaagatatagaccagttacaagtattcatattcatattaaaaattctataattctttgattaattttaagatcttttcccaaaaaaaaatgtgtatgttaagattattttttcttaaaaaaaatattaaatgggtgtttaatttataaatattagtttagagaaatagtgccgtcctgtgtggtggctaatgagaaagcgagtttggtgagatattatcagccgttggatgggtgggtgttgtaatcaagggccgtcactgattttgactttgactttgacgtctcctttttttttaaaaaaattttaaatttaaaaataaaaatacaacaacagaaataaaggctctttggctaattggctctacctcacgtcaccggctgagccgcctaacctataacttttaaaagaaaaaatatgcattttaagcgagttcttgcaacgcgcacggaagatgtatttttagttgaatgatttggaaggtaaatttaatttttgacggtaatactatttaaattaggaaataaatcacattttgtatgtaattatattttgtttaataataatttttattgacatatttttagtgataatttaatcgtaaatttatatcaaatttaaaattttaatatatatatatatatatatatatagattgtatgagtaactattccattatacttttatttttgtagtactcagataatttaaattgtgaaaaaatttatcaaataatttttttatctaaaaatgaaaacaaatgatgaatttatagtaattagaaattaaaaaatatttttacataaaatagtgttctaaaaaatgacaattgataaatttatagaaaattcattatgatatgatttcaaaattgttgtcattatcgtcttatattcggaattacttttttatcaccgtcagggccgaccctatgcataggcgggctacgcccacctaggacctactcattttagggacctaaataaaaaaaaaatacattttaaaaaatatacatatttttttaataatttttaaaaatacaatttatctttatagtaagggctcaaaaaaaaatctttttacctataactcatttcaactcagggcccgctctgatcaccgtatctcacttatagttattattatattcaaaattgttatcatcatcatatttcacttgtgcatccaattaaatataatgtacaaacttgtgtataaaaaaatcactcttcaataataattattattattttttttttgatgcaacaataataataattattattattcacgtaagttttcaataattattaaaataatgtgtgttttaattataagaataatataataaagaataagaaagacaatacaaacaccaaattatttgcaccatatccttatttgatttcttgccaatacaattttttttaaaagtcacttaattactcttcaaaaaaaaaaatcatgtgtaattataataaaagtaagttttataaaaataaaaattataaatacttattggataattatgagtttttattataagaataatatatatatataataaataaatatataatttaaaaaaaagtagttattagctaataaaaaattatttaaatatcttattagctattctttaaaaagatattaaataaatatcatatatgtgttattaaaaaaataattattaactattgaaaaattagttattaataaatatttaatttaactttaaattcataaataatttgattattgtagatatatttattgatatttataatattttaaattttaaatttaagtaaaatttatataaaaaaatagaaaagatattatggtttaatttaaaatatatttttgaaatattctctacaattcaaaaataactaatgattaaagttttaaaaaatatatatatttcttagcaaaaaaaataccaataatttttggatgtggtttatatgaatattgcgtgaaaattatatattaagcaaattcatatttaattttttttctttcttaaaaaaatatattattcattttatttgtgtaaaaatattataaataattgtgtaaattttattaaagttttatcttcgtatagatattttgtggttctgagtaattgataattaattaaaaaaattaaaagtaaaccaaaattttacattttacattt

SEQ ID NO: 69335 - DNA, 1015 bp, Cannabis sativa
ttgggtttatttatttattaacgtttaacgttaacagtctaaagaatcgttaaaccaagaatcgttaaaccaaaaattatcgttagatagacacttttaatatataaagatatatacttcacaatatttgtgacaccttttaataatttaagcttattaaagatttagttggaattgttgttaggattttattcatttttattcaatgatcgttatcttgttatcttaatgtatttgggtcaacttcttggaaaggtaataagatttgtatttattgaaaaaggttcactaaggaaacgtagcaagattggatactaataaaatgagtatatatattttaagagaaatgctaaaggcaccactggtgcctaacaccttcctacgtgtcaatatcgctattggtgcaattaagtatcaggtcccatatagtttaatataataatttttatagagtatcgctagccaattgcaagtcgacatatatatttagaaggtactaggcaccactggtgcccaatagcaatgctcatattttaacatggcttaacacattgtacactttattgttattattattaaaaaagtaataagcagcataactatcgaaagtttgctatttgatactctaaaccttttcctaaattaaatttttgaggactaaacctctcaaactttacatttattttggtctgtattgtttcgttaattgccaccgtagattattctttagtacctttctaattatttctttatcctttaatgcggttgataagtataatttggatccaattattaaatttgtgcacaacttttcaggattaataattatagatcattttttcagccatccatattattatagattcctaataaaaattgtaagaatcattttttgggaaactttaacgagtgaatcaaaaaaattaataatacgaacatgagttcatgattactaaggattcatgttgatctactattgatcatgtttatgatgtgaattaagtctttgtagtaa

SEQ ID NO: 69336 - DNA, 655 bp, Cannabis sativa
tcaaaggatgtctctgtaaattagaaggaaatcccttttaacttcattcatttccttagacaaattgagaaagaatcaattgtatctataaaactttttgtagtgaacaagaatttttcgggtcaactcgggtttttcccatggatcgttttatctttgttcggtaaacagacatgagaaactcaagcaagaagatccactagacaattattaggaaaaagaaaagattatttattgtgctagtaataacacttgcctcttccatagaattaggcttctgctcacttaagatgctgatttgttgagtagacaagattgaatggggaaatattcctccatggatagaagagagctctcttctcaactcatcaagctttaattccaagccagaatattgaagactttgtttaaccgacttcattcgagctactcttttttgtccaatacataactcaagcgtaacgtttctcttcccttaaaaatagcgagacgaaaaaccacaattatagccaataatcaagaacaatgtgacctttaaaattttcacataagtagtcatgagtggaatttgaaccattttcaattaaaatgctcgtaacaaagattggatatgcatatcgaagagtcatcatcggagaaagaatcttaccttgca

SEQ ID NO: 69337 - DNA, 1212 bp, Cannabis sativa
  modified_base (1160)..(1167): a, c, t, g, unknown or other
accaattttgcccctgtcacttcaagatactctccatgtaactctcttatgtcagggtattttgggtacaatacatagaggtgtgttttaaataaatataaaattagagataaatttaattaattaattaataaaagaggtatttttcaacttacccattattaaatcgatgaatatattatttaagtatggtcatgagttgtaacattgaggtgggtggttgggtgcatatatatgtatgattaaataaagggtatcttttcttttgtaataataaagtataatgaattaaaattggaatgatggatgacaggttatttgaacgatccagaatcaacaaagaatacaatagacaaagaaggatggctacacacaggagatatagggtttgtggatgatgatgatgaattattcattgttgatcgattaaaggagcttatcaagtacaaaggctttcaagttgcccctgctgagctcgaagctttgcttcttactcaccccaatatctctgatgctgctgttgtcccgtaagtagtacttaattagtaatccattcattaattaattaattaattaagtagtctctttaattaattaatatatttgttgttatgtggttttcagaatgaaggatgaaacagctggggaggttcctgttgcttttgtggtgcgttcaaataactccgaggtcactgaggatcaaattaagcaatttatttctaaacaggtatattttcattttcttctttatgccttatcactcctaattatgaaaacaaaaaatcatctctttcataataataaagatattaagaaaggtgtatttaactacaaataatataaatagatttgtgcttaagcactacacttaatcgttaatatttttctagaggagttttaaacaaaatacttttactgaaaaatagatttttttttctatttttagagattataatttacttttacggatttatatttttactaaaaatatgtaaaaacaacataaacgtagcaacaatatgcaaacaacataaacaatgtaaaaacaatagtcggtatttttattttaagaaaaaatccataaaaatgttataaatccatatttttataattttggttgtctaaacaaaatatgaaaaaataaagggtaaataccattnnnnnnnntgtgttttgcaaaagttacagattcgaccctgtgttttgttaaat

SEQ ID NO: 69338 - DNA, 810 bp, Cannabis sativa
  modified_base (245)..(271): a, c, t, g, unknown or other
atatttttttactaattagggtgtttctacgatacacttttgttatgttgttaatgttgaaatagttataatctctattttttaatattatcgtaatttgagatattatacaattttttgagaaattcggataggatgagctaaaatatagtgggtcaaaggaaaagaatatttttcgatattccttatatgaaaaaaaataatatttttcaaaattagtaaaaaaatatgtacttttaaaagannnnnnnnnnnnnnnnnnnnnnnnnnnggaccctaggcacaggcctagctcactatgcccaaggccagacttaaattcataatagtttaccataaagcaagattcaaataatttattttacacgtttataaaattaaagaagcatgcgtgcattcaacattgtttgaaaataattttatttttgacgtgttaaaaatttgcaggttatctcaataaaaataactaagttgtacaatataattttttttagatcaaaactatgtcgaaaatacaaaaacatcgaaaagaagtacatcgtagttatttaagatattctgtaaatttttaaaaattcaaaataatttaacatcgtagtgcagatgaatgtttgaaccttttcaacactacgagttattctaaaaatttcgaaaataagtgaaatatctgttatataattacaatatacacagtcacataataataacaaaaataatattcctacgagataattatattatttgacatattaattaaagattataaataaatatatgcagatgccaaggattttgggtggatattatgat

SEQ ID NO: 69339 - DNA, 4746 bp, Cannabis sativa
tgccatcatgtcaatcctactggtagcagattgggtggccataaatgtaggacttatcctgtcatctatgaaactatcgtgtgaattgtcatcatggccgccatcatcgtcctcatcatcagacatatcactatccgcagataccctatatcaaatataaccaaatactaaaacaatcagcaagcacttttcttataagaataatttctgaaacttcatttacataatcacatgtttcaagaatgaccaaagatagcacatacagaaagaaacttactcagcctcttcgtcaatgaagtctcttattacgtcattaacaggcttcttacctgaaattatcaataggcaatgtatatgttaatagtagttcttataatttggtggttcgatagttttgtgttagaaattacaaaacaattttttattaaaaaaaaaagaagtacaacaataaataataacttgcttcatagcaaaagttggtcacaaatgtctgaaaaacaaaaattgtgatatgaagcatgatccaaacaaaaatgaaaaatttaaatatctagcagtataatataatgtccaaatacctctactactcttatgctgatcaaacaatttctcaggccttgctcttgggttaaatgaacaatcttggcctcgatgcagattctcattttttccttcattttcaaccttgcgcagccttttaaatttacgtgtcggttttacactttctgacttatcagcaatgcttagaccccaatctttgctgcagctgccacttgtcgggcttgcccacggactacaagacttgtctaaaattggggatgtatgggtaagtcctctcatgctggcactattgtccttataaagactaggagtttgaattgcacggtctatagaaaaaacagagacatttcttccacagttgccgctttccatattgactatttcatttttctctagatttgaggacttgaatggaatctcattatgtaattgggcaggtgagagaaggttgggtctaggatacgcttctccatcttcaccatttgacaatcctgcaaaattcacccttcaggttcatcacaaaacccctgtataacaactcaattctaggaaagaaatcattgatacgatatcaacatttgtatacaaaaatatttaggaataccaaccattgttatcagtaggagactctggaacaacaccacttttgatcatgttagttaaccgagggctaagttcattatctctggaatcattactgtaatcgtcagggagtggtgaagccttcatttcatcatcaggtgtctcgctgacattatcttcatctagcagattcctactaggagtgccatggaatgctttccctttcaaggcatcagaaccacttaaataattaggactttcatacttccggcaaactgtctgaggaatcattagatcttctaaacctccagcttgagcagttgtgtccttgtcctctacatcttttaaatggcaagagactctatctacactatgtaacagcactttactgctttcacttgtacgattcatatgtgaaattcctttggaagtaagtaaaggaacagaaagaattaaaatatttccaaaagtgtcaatagaaacaaaatcttgaccaaagagataggaatgcccatcaggactttggtgaggaagatcacgcccactatgattctctttggtttctatggtctctgccggtgaagtttcaggcctcaaaaaatttgtttccatattatgttgcgaagagtaatcatcaaactgcaaacctgcacaagattttgatgaattataataataaaattaaaaaagaactacttgggggattttccagacatagcatcttcactcaacaactccttgatccaacgagctactttatatttctgcacaagcatttttgagatgaatcgaaaataattctaccttctccattttcatgttcaacattgtccaatcccaaacccctctcaaagccgacttcaacctgaatacattagtaaatcatataacagagtaaaagaagacaaacaacttgagctaacgaactgaaaacttacctccatcaggggacttttgctgtcactatcaaaggatagtccttgcacttgttgcattgcatcaataagcagtctggttttaaaggaatgcattactttatgaactctcgatggaaatgtctggaagtgaggaaaagcaataagagaaggtttccaagtaataccaccaggcgggtggaaatacttggtaactaaattactctccgcatcagttagattttctttaagcacgggtgtcatcattgagtcatcatccttcattttctttccactgcgaacaaatttttcaattgaaatctgaacatagttgactgtgggtttgtatatatgaggaacctgaaatgttctttaaaataattagtatgtccagaagcaaaactaatcgaaccaaacatgaagaggtcagttctcttggaaaatcttaccatccttggacttgggtggaaattgaagctattcattcccccatttcgcatgtgtttacccacattcttgctacatgcttgctttcgtgtgtaagcttttaactctgttccttcacatgctagaactagtaaagcttgtaaaggaaaaatggagcttaatgcaataaaaaggagcatgaagattccatggcatgttatgtatgtgctccttacctatgtcttatactaaaaaaaacaaacagatcaattgaaaaaggatatctactcgaccatcatttttacgcccagttctccccattcgttgaatcattctcagtggtgacacattagaatcaaagcatataacaagatcaacttccattatatccaagccttcttcaccaatggatgtggcaacaatgacattatatccaccagcccgaaatttctgtggagaactaagtaagcatgtgcaaggtggtggagaaaaacagaatgaagtgagcagttacctccaaaacagcctgttgaactttttgtgactggcctttggatgattttcctttaagaaacataggtaaatgtaatattttaataaactaaaagccatacaattgaaatcgctggctacattactgctaattgcttataagaactcaaatgaacgtacatcaaaatattggtaattctttgatgcaagaggcaaccagagaaaatgttagtacagtaaaatatcaggacaataaattgttttagacttttagttggttgtatggtaatagtatttccagtgtaaatatggtacattatagaagcaatattctattactttgacatcttaaaaggcatagatgattcaattagcagagaaaaggtttctttgagctcagtaaagagataatctcaagctttggttttcttgatgactagaacagatgcaatgacaactataaagaaataattaaacatcagatctaagtctaaatacactcccaacttgtggtgggcctgctactgctactgctaccaactccaacacgaagagtgaaaagaaaaaggacaaaaaaaatgagagggaaaacacttttctgtttgaatagtaaatagttggccatatcatgagtagatgctagaatgccatacctgaactttgaccaataaattgggtagctttaacaatatttcctagtttggccaatgcatccattatgtccctgtaccatcatttgtatcattaaacaaaagaatttttgaatttgaggaaatttattaaacacaagaatgtgttaagaaaacattggcatacacaagtattttctttacctgacacttcccctaaaatttgagaagataataacccttgagcgttctggatcatttttttctgcatccaccaaatagatataattatcatatttgctgacagaccgtaaatcacatccaaaattcatattaaagatcaaatacagataaacatcaacatgtcactatatacactaataaaataaaaaagatcatcttaaccaagctccacaagatttgtttatttatttatttatttatttttcttctacaggataagaaaaagttcccacaacatacaagaaaatactaactcaatctgaaactaatttaacatttagaaggtattattaaagtcgtgactacaatcataaaaatctagttaagggaataccaaaataaatgagttaaataagccttgagttgctagattttttaatggttcagctatattgctacattcaattagtttgcaaaaccaaagttttactaagacattagtgcaaacatgatatttcaagaattgggaattgctattatttttagatgcaacctcaaatcaggaacgaatttcaaaaatagagatgaaaacaattccaggcttctagtaaatatacatatccctgcgaagcaagaagcatatcaagtatacttaggttaggtcagcaagaagatgacaatattaagagcatcgttattggtgcccagcaccattacaatgtagcgtcttgctaatggttttataataatttttaaattaaaatatgtaaactccgacacttaattataccaatagcgatatgacactttgtggtggtattgggcaccattggtgtcctttagcaactctctaataagaatggtctgatcacatacttcaaaaaccaaattaatcctcaaaagcaaaagttaaagaaaattttatgcatactctaaaatttatacagcacaaaaaaaaa

SEQ ID NO: 69340 - DNA, 827 bp, Cannabis sativa
aaaaaaaagaaattttgtcatctattttgtagcattttggcggcatggccgagtggtaaggcgggggacttcaaatccttttccccagacattacctaggttgaccaagaaagtcaaaatgccaaatatttgttaaccccaaggtccatcaaaatgggcttggaagagagtaaagcccaaaacaactctttttgtcttttacgaaaccttacggttcccttgtttcgatcacaccaaatagggagatgacgctactgcagagcagttcccttgtgcttcaactccaaacatagtaggagaaagttgatgtagagggaacaagggtctttcctgatgttgcgattgttacgaaggaggggtcttcattggcagtgtatggatacaatgtgcttgctatgtgcggtagaaaactctataaccttgtgaaatgggacctgtagaaagagagggaaactacatggaatatgctttgggtgcaacttggaagggtccaatgcttaaaatgtttcaagtgcactggctcattaatggcctctcctcttttcaggaaatgaaattttgacggaggacgaacggagtttttcaggatttttctcagtggcgaagcatcgaaataggaatgggaagtttaggttttcattccttaggtacatttttgaaacccagatgcagtttccacatgaattttctatgttcctcttggttctagactggttgggttcatgggaaagggcaacttgctgtgggtcaagctagaattccctttcatgggtgtgttaatgaactattagtaaagatttcagcagtgtggtgaggaacatgaccag

SEQ ID NO: 69341 - DNA, 911 bp, Cannabis sativa
taactgcagaaaactgctaggaaattgaaaaaaaactcaaaaaaaccaataatggactttaactgccacagagcaacaattgggcagacgctcttattgttagttgagaaaaaaatatgtgaagtgattttcttttcttcatagatttggtgaaaaaattagcaaaaaaaataatcatataaacataaaaatacaatcttaaaatacatatctatacatattcataacaaaagaaactattattataacactaaattgaataaaaaaattaattaaaatttggacaaaaaaaaaaaaaattaattaccatccaactaatacataaatttataaatacatattctaacataactttacctgtatgtatcataacctaaatacatggacaaatcggtctaattcagtgggagaattttttttccaattgatttcacactacaaaaaatgctgatcgctactgccatgcttggggaagaaaccaattgaagtgaagttgtgctttaatttttgtatttagatcgctactcccatgtgtttggggaaaaaaccaattgaggtgaagttgcgctttaattattattgtatttaaatgtagattagggatatatattagattataatctatgtatatttaagttaatatatgagagagaatataacggaaattataatctatatatatctagattaatatatgagagtgaacatgagagagattatatctaacatgtatccctaattttgattgatatataggcgtggatagataatttagagattatatataatctttattaagtacatggttattaagtacgatttgatcaattaataatttttttgattttcttttattttaaaaaagagaaaataaattactaatagttaaaggacattttacaattttgtat

SEQ ID NO: 69342 - DNA, 633 bp, Cannabis sativa
cattcttccatatttttattttgtaaccaaacgttaccttaatgtaatttacaacccattttaatttgtatacacttaatggaaaagttgaactttcgagtagccccggtccggtccaacttgactcgtttgtattttttttatttgagcttgacacgatctgtttaataataaaggttgtgctgggcttgacccatattttaaaagcgagacccaacccaatccataagcataaattattcgtgacgtgttgggcatacacagaccaacctgtttatgtaaaatgggttgtctattttactatatgggacataacgaggcctagcggcttgaaattgcttcttgaaatctctggagagttgctcccagaaaattattgaatgacaagtgaacttgttaaaccagctactcgctgctccaacaagcgaggtggggaacaaaatatacagcgtaaattgttcgttacgttactcgctcgcataatcatgttaaagttattcaaatgcgagatcgaccggatctgtggttctgtcataggctgagacatacaggtttttgaatcctggaggaaaaggggtattcataatatctgggtgatagggctcaagctcctcgtcaaagtcatatccagat

SEQ ID NO: 69343 - DNA, 1163 bp, Cannabis sativa
tacaaatattaaataatcaacaataacctatgcaattaccattaccattatgcaatcacaacaaagtcaatactaacaaatattagttttcgagacttgttagaattgtaagatgcacggtaaggtgtgattaaggtgcatcatataacattaacaatattagactaattctaataagcataaacacaaattcctccgagatgtaagaacaaattttcaaccagcatttactatcagtatcttctacttaaggtcaaactgagtcaataactaaagtcaacactaaggatccaaatattgtaccaaatcgtgctcccgaacttttacataacatcagtttcattaaatcaacaatgtcaatagttaccaagaaaacatatcaaagttcgaatggcaaaaattctaattagccaaataacaataataataataacaaagagaagccataaacctgtatgatgccaccaatttgctgttccctaatagaagcaaaattctgaagagtaatgccataatccttaatcccatcaaccaattcctgaacccttattccagcttgaactctaaccctcttcttctccttatccacctccaaaaccttatccataagagccaaattcaccatcccagctctagaaagcccgatcccattaggagacaatccagacccaacaggccgaatccgagtcttcttctcattagcctctttcacaaccctctcaagctcaccaatattctcgggttggtgaaaaacccgggtctgaacctcatgggtcccgctccaattcgaaaccgtatgaagatcttcaggcaaaggagcgtaacgaaagatctgagctttcttgtgttttgcattttcggggaatgggaatgagtagtatgtggatacgccgcagaagattactaaagctccatagccaaggtacttgcgaagctcagcttgggacgatgatgatgatgatgatgatgatgatgatggtgatggtgaagtagacaagtgtcttgtaatattgggtttgctgccatggcgggggaagagggaatggagtgaacgcttagctatgaaagctctgagcatttttgagtttgtttgaggaatgagaagagtgtgtttgtgttttgggtatggccacgttcaatggttgtttttcagtgtttaaata

SEQ ID NO: 69344 - DNA, 691 bp, Cannabis sativa
atctccgaccggtttctgacccaaagccgaaacagcgatctccgcgagcttctggcaatgccgtattgcctcgacaccatgagtgacagcattacaaatgtccaaagatttcactgcccggtcgagaagctccggtacgagacgatccagcggggctttcgagatatgagccgggtcccgacccattaagagaagcaccttgaactcggcttcacagcagagataaacgtcgagaagcttccgaagccaggcgatagagaggagggcagtttcaccggcgccggcgataggggattcatcagagggtgaaaagaggttagagaatcgatcactgacacgtttctgaaagaggtcgaggtcttggagctcttgttcatggtttacatccatagacacaatctgattgcggcgtatactaattcggttcagaaacgaaccctggttgttctctgtggcccgcatattaactgaaatttgatttttctttctcactttctcgggaaaattgaaaaggagaaaaaggagagagagagagagaattgaagtgttctaaataaagattgatttttgagggttatatatgtaagcagtgcgagtgaaatggtccgagacgagaccgtttcttcttcgttttcgtgaacgctgacccggttttgctctttgcttcttttaccatattaccctctaccat

SEQ ID NO: 69345 - DNA, 525 bp, Cannabis sativa
caatggcgattcatttgaagaatttgagttatcttggtcttgataacaacaagcttgaaggtatagtaccaatggaatttggggttttgccattgttgaatgaaattaatctagagaacaataatttgagtggtaatgtttactttcctgaaaaatttggccaaaagctcaagttgggtggaaatccaaagcttaagttgtttaagaagaaaacattagagaggccttattcagttgccattgttggaattggaagctcatcatcatcctcatcatcatcatcatcatcaactaaggtgtttattgttccttcaatggtggttaatgtgtttataggtttattagttttgctttatttttaggagttaactcttcttattttagtattattattattagttctaacaagaaaaaagaaagagaacaaggttttatattataccttttttggatgttaaatatgtaattattgcccttgttttttagtggaaatattatatacatatcatttgacagttttgagaa

SEQ ID NO: 69346 - DNA, 528 bp, Cannabis sativa
agcatgatcaaaatacacatgtccaagaaaatgaactctaaatctgatcccttctagtgtttgaactctaagttagtttttatagttgtaggttaggcttaactgaattaactaactcaaggggagagccaaagagagaatgccatctgtaaattgactaagggacttagaccatataccaacaattcagagcaattcagtttgcaagctactaaagaattagacatcttaattattggtattggcttaattagatataaaaagcatacacagacacactttgtgtttgtagtttagaaaaaataatggaagattaaggttaatcaaattgatacataatccaattgaacagttgttaatgcataaaactaagctcaaaatacataattgaatttttcccaactccaggacaaaacccaaaagattagatttctaataattaacaactgtacaatcaattcaattactaatcaaataactttgattcatgtcagagtgagagaatacccatgcccataaacacacaca

SEQ ID NO: 69347 - DNA, 1642 bp, Cannabis sativa
gggactgccccgtcgggtcggggccccgacccgatccgcgaaaaagattcaatttgcgatgcctaaataaaagggtcaccattagcagcaaaacaacctagcttagccgataaacgtcaatttttgccaacgaagttcatgaacttcgccgatataagttgacattcttgtaggggctatacccaaactccttcacaaaccataaacccataattttgtttacaatttttttaaaaaaaaatgcaatgtatattagtcaaattttagtagaacagatttttaccgcaattaacgttgtgattcaacttggatctatgaaactcccaaaactgcaacctcaaatgctcgttttatactaaaatgctaaaaaaagggtccaatgctgacaatatatttttggatattagaatgagatatttttttaacaaaaaaaatgagccaaaatggccctaaaatagcaaatatagggctattagatgagggtttgctttgttttttctgtccagggctgttagacgaaatgaggaagatgaagagggcgcctgaaatgacgaagagggttataaaaccccatgccctaggttattttatgataacccacgccataggttccacgcgttaattatcgcatgcacctatggggtcggttaaataaccgacaacataaggttagctaattgcttccttttcctcaaataaaaaagtgtagctataactattaggtacactctatagctatggtttttataacgtaaccgcaattaagtgtcaattttcaatgggcgagaacccaaaaacactctttaaatgctttaattttccttttttattaatcagctacaataattgtctctaaagatcctttttgtagtaatgtctctttctttaggcactttaaagttaaatattgatgcagttatgaaaaggaaaagaatgatatttagtgttagagttttggttaaagataatagtggagcagtcattgcagggcttgcatcaaggtttacaggcttatatatataattcaactatggcttgtaaagttctttttagcaatttagatgctaaaatattttttatttatggtgagatttatttgtgctttcaatccgattttatcaactttaatattcgattttattgctcttttctattttaggaaagactgattttttagctagctttttcttgtattgaaacttcttgtaagaaaagaaattctcttatagaaagtttgtttttaaaggaaactttgactattattattttccttaataagttcgattctgtcttgataagatcagatcatacacactgtttatggcaggtatcaagacccaattcaagatcggactcatttttggcaagtttccttttctagtctgatttgttgcgacagaatctatttttgatgctgcaaatcaagttttttcttagaaaaattttgtacagctgtatattcgactttgtggttgtctctagggtttctatgttctataaatacaacctagagagcagctattcgaatcaactcttcaagatttcatttttttgcatttttctcatttgtgaagagagagttatttttgtgagaacctagttgttcatctaggttctagtatttttcatatctgttcttact

SEQ ID NO: 69348 - DNA, 598 bp, Cannabis sativa
tattataggagaagagatagtgagctatgaaatgccacgaccaaacataggaatacataggtttgtgttcttaatgtttaaacagaagagaagacaaacagtggtaatgccaccttcatcgagagagcgtttcaacacgcgcctctttgctacccaaaatgaccttggtcctcctgttgctgctcttttcttcaacgctcaaagagaaactgcatgcagaaaacgataatacatatctatatgcatgcatgcatgcatggggtttcatatcaataataacaataaatatatataattaagcttgctgctttaattaatttgtaattaattattatataagtgtgtaagaggctcgtggtggtacgtacgtatatatatacgtatacctacgtagtcttaatatatatataatatatattatgttttgtaattgtgttgtgttgtcttatatatattattctcttacgtaatagtacgtacattctcaattatgtgtgtgtttttttttcttcttatatatatatgtggagagagagatagagagaccatttttcaatatatataaaaatatgtgttcacgaagacacttcctctactt

SEQ ID NO: 69349 - DNA, 4379 bp, Cannabis sativa
tttttttttttttttgtaaggtctttacccttgttaagtggtaacctcgagttaaatgactaatatatattttctttcaattagacaatcatttcattcatataaactatatcaacatatagtttaataaagaacatttgcttatcaatttcacattgtcaactttgtaccctcagccatttttgtcaactttatagctcaacaaaccagtacttggatcttggttgagcaactcctgttccttctgttcaaccactcacagtactaaaaccgctttataaatatatatatgcagatacagtgttaactaataactacacaccacatgcaatgcaattcttcctctacttaacactgttgactatcataactaaatcactgaattcaatttttctgagcaattgagatattataaaagtatatatagtagcatgatattacaatgtagctaagtctaataataataattataacaataatatgacacataattcatagttttttattcctcttatttctttctttctttcacctccaaggagtggtgggggttgacaagcatgggtccatttaacttgaaaatcaacagttgtatcattaatgttgagaaaaatgttgctgacgtttttatacagacatagaccaaaattgtacatatcataaagcagccaacctcttctagaataaagcactttgaagagcttcttacttggaatctctactaacaatctctccatgtccctattattctttttcaatggcacgtttcatttgaagagcagctcttactacgttccctcttgtaataatcccaaccttagcagaataaacaagtctattgttagaagaccagtcgaaaattgaaaacatggtgggaagattgaacattgaaagaataaaaaaggattgcatctattaccagttttccatcagcatctacaactggaagtcgacggtatttcgtttcgagtagtaatctggcatttgatgtaatatggaaaaattgatgtttagtttttatctaatgggtgaattgaagttagaagagatagagatagcatgaaaataaaacctagcagcatcctcaaggttagtggtctcgcgaacaacaacaggagctggggtcatcacgtcgccaaccaccttgccgttagttttactgagcaagttctgcacctcgttaaaagtctgcggtaaaaattacagcaggagcactttgtgagactaagttaaatttgatgcccactcaaaatgatatttaccaaaaaagcacagtaaagatagtggagaacaactaaaatctatatgaactctaaatataactttctcaaatacccttcaaatagaaatttaaacgaaactcctcattaaaaagttgaaaataattttgacaatcagctgtattaaattattaaaccttaagaaagaaaaaaaaaaaacatttcacttactttccaagtgctgtctacttcagggaacataccagtgtcctgtcgtccaccacctattttgaaaattaggacattgtgaattatgtaagggatgacttaaagcatacacaaactttctagcctcgttgagttttaagttgcctaatactaaaaatccataatcaaatttctaatacaaggcccaattatatagcaaacaatagttttgtaatcaattaccgaagatagagtccagtgctagcaagtcataatcagaaacaagaccaacctgcaccaacaaagagccttcaaaattatttcaaacaccagtcaattcaataagcattttattaaaaaatagggcacacccaaatgaataacaaacatatgtaattcggaactgtgatgcagaactttgaatagttgacacacaaatttggaaacttcaaaaataatacttgaagattgtaaaaattgcatgcaccatttagtcctatatcaaagaagataccaatcaaaatttcacaaacatgtatttagcctataagtatcaacttcaaggttatttcaaacttcagcacttatgcataacctgacttagggccagcataagtatcccattcttcaaaatttagaatagactcatttgattgatcaaattctgaattaaatgtatgttttccaatattgtaaattaaaatcatttgacagtctggaactagaatctaaagagagttgagccaattaaatgatacatgagcacacatctttggattcactaatatatatttactaagataaatgacctcgtagagaaaggtaaattaccaacgtccaatcctcatcaatcacaggaaaaccagtgattctgttctccacaagagtttctaatgctgtagcaacaacaccacaagtaaatatgtaagaaaagatttaagaaaaaataaaagaaaaagaaaatttgcaagtagagtaaaatgatcagacaaagtatgaaaaataccttcatcaacagtggttgtaggcttcaccacatgcaaatcatcttttgttgtcataaaatcaccaacagtatagactccactttttgcctgaacaacatatgtaaattttactcagcaaaaaaaatatatgtaaacttataagttaagaaaatggaattgaatgccaaaaaaggtaaggggcaaaccacaactcaatgaaatatactatttcaaagttaaagctgatcacgtgtgcttcataggtgggtgaaaggaaagtgagggttcataaatatattttgaagtaccattgttgcttagcaaacaaggtttagtgagaaaattaggcagtgtatcacaaattttcattttaagcaaattttccattcttccaagtgtgtttagagttcgttgtacaaataaaaccttctcactcagtaccaaacacaattaatagaaaagtacagtctccattctccttctctcctccctttccttcatatctccctcccttaatacaaacctaaggtatatatactatattatcaccaaaattgaatctttggtttacagtgacaagttaaagaacccatctaaataacacctctcttaattattgtcctttttttgacgaggcacctcccaatatccatccaacacaatatttggaggccataaagaaaaaaacattatagaataaataagattttgttttccatgaactatgacacttattttattttattttttttgtgaaaaattctacttgaactttggaaataattgcaagcttgcctcttttgttgtatttcattcatttttgcaaacagtatcctggtgtaacactgatcaatctactgcaattcgagagtccagacaaaaaataatttcataaataatactattaacgataaaatttgagattgtgtatctacttaagttcagccattctctttctctcctctttccttcatatctccctcccttaccccataccaatacaacctatggtacactattactatattatcaccaaaattgaagctttaatttgatttgcagtcacaaattaaagcaaccatctaaataacaactctctcttaattcttttccttctctttaaaaaaatataggcaccccgtaatggctaatcctacagtatccaacaatttttggaggctaaaaagaaaaatttatgtaagtgtctaggagaggggctcgaatctgagaggagcaaaccacaaacatgaccgtttgatttgagatacccttactctacattgaaaagactccaaaactaacacattcccaagttcctagactacttacgctacaccaactcatttcgacaaaactacactaacccatcaaaataaatttaccaacatacacatttaaacagtcttctaacttcaacctcggaagaaaactcctttacagaaaagtaaaattatgcgaaaaaattaacaaaaacatcaaagaggaaagtgggttagaatgatgtaccggtacagaattggctgtcaaggtgctgttagcagcgacgagggaggacctacggaatcgtaagaggaaatcggaagacgtggcgttggatagggagggaagaagccggggagcgagaggagatagaaagggatatgggagacgggaagtgaaaggagaagaagaagaaggtttggtggtgaggtgagcggtagccatggccatggatagagaatcagcaagtggaatggagcccatggttagttggatttcagcttgaattctgctttggaaaaccaaccgaagaaagggtttcaaattccagagcttcgtttcctttcctttccagtccaaaactcccagaaatctacagattttatttctttttattattattattaaaagaaataaataaaataaaaattgaacaagtaaccgacttggcaacttgcttgagtgatagtgaccattaatcgtttat

SEQ ID NO: 69350 - DNA, 1899 bp, Cannabis sativa
tactctaaaatctgatggcctttttccaatagcaaaaggtttctatttataatgaaccattgcacctaaatatttttcaatacaaataatagtggagaaagtgcctaaataattgggagaaatggaatatacgtctggtgagtggagaccgtgattcagtctactatagtagtgggatctgcataattggagcttgcaacggtacaagtgccacatctagtcttgattggtgagtgtactgctgaattggtttgggtcgtaacttagtcactagcccattttgaaatttaattgataacacatgattggagagagaaacaacttctaccaaacatgggccaataacttgtgttagatttcacacccatcattttatgacatgaagtcccatgtacgtgatgtatatgccatatatatgatggtgtagtaaaactttgggccttaatgtttgtagtgaaatacaaatgttgagcccactttcaattaaggaagtcccgtccaaagcctcaaatctaaataacacaaaattaaaataaatcaaatattttcaaataatgtaattttacaattaaaaccatgaaaatatttaattaaattaattttatacatacaaataaaagcttaaaatatacaaatttcaaccttaatcagttggcattctatattttctttacttcaacttaattattgttgaaagtgtgaatgaaatatatttgtattaatattactaattgttatttttgtttcaggatgaagaatgcatgtactttaatattgggaaatttacatggtatactaatttttgttattttttacaaaaaatattgcgagacggtattttttactaattgtaatttcattttcacgcgtcccatatcccccaattcgaaaccctagcagacccattcccatttcgaaacccagtcacgccagccatcgtccgccacccactgtctgtccgttgcccaccgtccgtccccctcccttctctttgtctcagtacgcacctttgaaactcgctccctctctctctccactacaacaaaaaactgttatcagaagcgattttttttttgttccagattacctcttaattcattccagaagattatttggcgcaactagtcattccggataacccgtgcctgaaacttgatatcaggaacaaaatatagcgacatgcctgatgctaaaatatctgaaacgaaaataagttgttcctgacaagtaaaattcgttccaaaaaattaagagagcaactcgatttttacgtattattaggagcgattgttttgttatcaggaacaaaattgtcgttcctaaagtcatttttcaaaataattaaatttatttaaattaaattaaataatgaattttttttaatatcacattttttctattaaataatttctttaaaaattaaatatttatatttaatactaaaagagttcatacattgttttcatattcaaaagaatttatactaaaagagttcataaatgttcatactaacaaaagtaataaattaaaaatctaaaatgtggactcattatcatcaccaccattctcattccttcaatcaagtctgttgcgaaggtgtaggttgtactcagcatcatctgtggcatctattatatcggtattatcagcatcactttattgatataataaacttaatgaaactttattatatttaatacaacagcaaacataaaaaaaataaattcaaaaaaaaaataaaaataaattattacttaaagatataagaaatattcttctcatcccaaaataataaacaaatcatataaaagaaactatatatatatatatggaagaggttttaatggttacatttttattgtaattatcatggttacatttttttaagccattggatta

SEQ ID NO: 69351 - DNA, 838 bp, Cannabis sativa
ctctgattgattgtgtttaactaaacagctaccaattcgaataataacaatgcggcttcaaagatgggtgtaggagcttggagctggaactaccttttcatctcagttcacttagtcctaattagcgttggtcttggtctatgagatgttaatttcctgctctcttttttgttcaaaaactattctactgcgtacagatctgagtagtaattgaaacgcagggtatattgtgtatgtactatgtaggttttttttctttttgatgttgagaaaaaataatttattttctggagagaaaataaacatggcttttttttcgaatagaaaataataattttattaaccaacaaaatttgttactaaacaatgtaacaaatcggtaggaacagactctataccaaaatgacaatcagaaaataatatagaagctcgtgcaaagttgtgagctactacattagctgatcgtttaacaaaaagaatagaaacatgttttaactcaaggagagttgtttacattcatcaataatttgtccaaacaacgatatcattttaattgaacttcggaatgcttgaaccactattaaactttggattgactaactttagcattatttttggagttaaaaaggaaaataaataaattcttggcccatgaatcgtcgaatacgaatactggacagtttcgcttgacgattagactggattatgtataatttgtccagtctcatgtttagacacattgaaaatttcgatatctaatataattaatcttaggaattttacacaaacggctacttttttaagtttttatttttacaaatatttttaaattaaaata

SEQ ID NO: 69352 - DNA, 679 bp, Cannabis sativa
aaagtacaataacaaatcatatcccaatatatatatatatgtggagaacattgaaatgtcccttaattgtaagaagttgaagaagttggttgttaattgattatattttgtgttttatagtgataacaataacgtgtggagtgtgacgatgttcttaggtaccccacttcatgttttgttttcattgattttgtctctcttttcgagtttatcacctcataaatatgtctactacaaaacctacctacttgcttccacctcttacgtggcctagcctagtctttatatcattagcattactactaggtaactctacggttaattaacgataatctctaaaaattattattttaagttatatgagattcgatacttaattacattaatagtaatatatatgacaccaaaaaatattagacacggctaacagtgatggacccagaattttttctttgtgggggatttttattattaaaaaatatttatataaatattataatcactcttattagatttatttaattttgttggaatttttctactattttagtctataattatcaaattaaaaaaaataaatttaatttttaatagacaatatttttgttagtggagactatagccccacattaacataggtcgtgtccctgactgctggtcaacaagttatagcacccta

SEQ ID NO: 69353 - DNA, 791 bp, Cannabis sativa
aaaacctgcatggttataagattaatcgtaaacaataagcttaatgggggtacgatctaataaatatttatcatgaacgatacacttcaatcatgaggaactcactttcaaaaaaaaaatcatgaggaactctttaacactggtacaccactatttttataataagaaacacagatattgcaatgaaaaaaaatatattacaaggtaaatttctacttcaatccttgtttttataaattttattaactttgttgtttttaatattgagatttacacctagcaaagctaaggcaaaattcctggaccagccaagtaactttttaataccttctgcagctactaactaacaaaaaacattttcccccaagatttcatctcttcatagaaagaaagctatagaaattcaatgacataccgcagcaagcaattgccgtgtccttatatcccacagacgtagatagctatccaatcctggacaaaaaagaggggtaggggggttaaaaaactaattgcctgagaaaacttttaatgtagaaatcctaaagcaaaaccttaaccatttcagtgatgcaaaaagtgctaattggaaaccttgtttacaactatttaccatccttttatcccctagatagtcaaaattacaatgcggcccagtagcccagtagtaaccaacctttcaacccattcagttatctagcagagcaataattatcattcttttctctcctgggaaatcaaattacaatccaacccactttatacaaacctttcaatctattccaacctatttt

SEQ ID NO: 69354 - DNA, 695 bp, Cannabis sativa
gaaaacaacaattcttttggtgcacaccatgtgtttgataaattgaatgagtgaaaatcatattagaaagagtgaaaatgaacaacaagtagcatttcatttagttagctctttgaatttatggaggttttttttttggtaagtgaatttatggaggattttgtcaatttgttctagtgtagttttgtatctattattgtgacatggtggctgttatttattgctccatcaaaccagtcaatataagattttgtgaaaaaaatattttttttaaaagaaaaatcttaattttaattaaaaaaaattatgactaacgataaattttttatttgtactttatcattaaaatgtgtttgtctaaaagtattagtcacaaaaattataatttaatgttactaaatgtgtttttaactataactgattaaaattaaattagttacaactcgtatttaaatattatttagtaataagtaatttttgttgtgactaaaagtgatatttagttacaaaaatttatgtgtgattaaaaaattaccattaaagatagtatttaaggtaatgattacaaaattacaaaattaagaatttatagttttttaaatacttttacggacaaaaagaatatagacttttgttttttacaaaagggtaaattgcgacataaatacctgatgtttcagattttatacacttaa

SEQ ID NO: 69355 - DNA, 13719 bp, Cannabis sativa
  modified_base (743)..(764): a, c, t, g, unknown or other
  modified_base (13647)..(13652): a, c, t, g, unknown or other
gcatacatccccttgccaggtttccagagatcagccataacattttggaagatacgaaaatcagaaatcttacctgtgagcagtcgaccaaccaggcaccatctggtatcaatggccagatcgtcttctgcatcaggttcctcataaaaggtttcgtctgcttcctcttcttccaattgtatctttccatcgctcctcaatattccccatgtcagtactactggatgccatgaggggaacaaaacaaaacgaacgaaaccaatgcaaaacaggacaaaacgatttgcacccaaaaaacagagcaggacaaaaaacagagcaggacaaaaactcactcaaaaaagagagactgactgttcactcaaaaaagagagacactcagaacgaattaagttaagctaagaacataactaaagtgtatgagtggtagtctcattgttctcaaaacaaataggataactattgtaaacatgaagaccatgacgggtcaaattgatataggcctgcaaaaaatgtaaacttgctttcaaagtaaatttttttattttggggggaaaattgaggtcccaaagaagcttctatcgacaggaggaaccagaagaagttgattcttagagcttgagtaagttagtaacctcttaacagtatacatctcattatcactaaggcatttagttgggaggaataaaaatataagaataggaatgagaataggaataggaataggaatggaataaaatttnnnnnnnnnnnnnnnnnnnnnnaaaaaatcattaaatttttttttacataatacattggaatggtcattacttttttttttaaaaaaaaatggaatagtcattccaccaaaataatggaaagagcatttcattggaatgtcattccaatactttaaaatgcaaccaaacaaataaatggaatgaaaattatttcctttccattctattctatttcattacttccaaccaaacggcatcaaagtgtcaaataaataaataaataaaaataattgtgtttgaaattgcactaatgccttttgaaatatatatccattagccgaaaatagcaaacaccatagaagtactttattatgactattattattttctcttagttttttcaaacaatagcttttgattgaataaagatcaatatctataacaccattttgtgctttttgtaaacgtgtcattccattttcttgctttcttgacgtgcttcactcacccccaccaccaccgtccaccacaggcaccatagcttctgttggcacaataaaaaaagttcgtaattatttgactgaaaagcaaatccacgtgttgaattcccattgacataacaaattggcagctagataagttaatcttgatatgaatttatcattgtatacctatctaatcttggcttcatggaatgatttggttttacttattaggccattttggaaggacttaaccaaaaatgtcaataaagtattaaaccaataatggtcttaatattggttcccgtgagtaaagaaaatccaaacagaatcaagcaggtggtcaatcaaaccagctggaccagtgagtttaaaccacatgatgagctatctgttaaatttattcccagatgagatgtatcatccatttctttttttttatatgtacctaatattttttgctctaaaactagagaattattgtgctcaaaaggaaacaaacaaagaaagagtgtagatagatatagtgggatttttcattctcattctcattctatcctaaccagatacagaaaccacaaaatcacagatgaaaccaagacaacgagatacaagtcactaagttagtcccaagaaaatttaagcatgcatgttagtttacatcaaagttagatttttattgaaaaagaactgcccttgtctttttagtaacctaaacttcacggaaaaggtttatataaaaagctagtataagacaatgataaattcaaacgaaaacgatttattacattttcttaaaaaaaaaaaaaaaattatgtctctttctaaatagttaatttaatatgttatacaaataacttcctttatcttcttaaatattctatgttggatcccatctcctttctatcattatggtataaattttgaagcttggaacaaatgtaccttgttttatgttaaattaataactaaccaataatttttggacatgtattattattattaagctatcatgacatcattatcatatcatattatccaaaaaagaaccgactttaacttaactagcaaaaatagcataagcattaagcaatgtctctttcgtttacttccatggattttcagagctggttttgttactaaaaccagtcataaactgtagtataatctcaataaaagagacacaaaagccataacactgatcacataaactatttatatatatatatatatatataaatatgttgattggaaaaaccaaaaaaataatgcttaaaacagcaacttttatagccatagtcagctccttcgtcttctacctcctctcaccggttcccaaatccacataccattccctctacacttccttatctgataatgcatccatatcccaccacctatacaccctcacgcgccgcccccacatcgccggctcagccgccaacgccgaagccgccgcctacgtctattccatcttcacctcctccgacattcccacccacataacctcctaccgcgtcgccctgagctaccccgtttcgcgttcactgaagttgatccctccgccgccggatccgccccacgagttcgagctccgacaggaagtctacgacgaagacccttacgccgacgcggctaaagaagtcgttcccacgttccacgcctacgccaagtccggcactgccgtcgggccggtggtctacgtaaactacggacgcgtggaagactacgcgacgctgagggagatgggtgtgagcgtgaacggctccgtagtcttggcaaggtatggagaaatattcagaggtgatattattcgtaacgcgtacaaggctggggcgattggggcgttagtttatactgataggaaggactacggcggcggcggcggtggagctcggtggatgccgccaagtggggtccagatgggtactacttataatgcgcttggggatcctaccacgcctgggtgggcgagtacagaggaatgtgaaaggatttcggagactgaggttgaggaaagtggtgaagttccgatgataccttcgctgcctgtgtccggtaaagatggtgagttgatacttatgtcgatcggtggacaggtggcaaacgatgattggcaagggagcgttgacgcccctgtttacagagttggacctggtccgggaattgtgaacttgagttacacagttgagtaactattaattatatactgtttttttttttttttggtatggaattggtgagtgaattggagtgtggggtatgcaatttttcagggggagcttgtgattgggacaattgagaatgttattggtgtgattgaaggagcagaagagcctgatcggtatgttttttatatttgttttgacttttgtaagaactagataaagtcaaacgactttggtttgatttgagacttgagtagagttggcttaattaggaattattttgtagatttgtgattctgggtaatcatcgagatgcctggacatttggtgctgttgatccaaatagtggaactgcagctttactagaggtttgggaaccctattcatcctccacacacataaactggccaaagtgctatagtagacatcacaatctgtactaagtttgattcgtgtataatgtagatagctcagagactagggaagctgcaaaaaagagggtggaagcctcgacgaactatcattttgtgcaactgggatgctgaggaatttggcctggtctctctccctctctctgtgttcacaacagaagaaattcttagtatgtaatatagtcttggtcaatagccaatttaccaatgtttatttgcagcttggatcaactgagtgggtagaagagaacagggagttgctagcttcaagagctgtggcttacttgaatgttgactgtgctgtatctgaaccaatgttctatgcctctgcaactccacagcttgatgatttactcatacaagctactcagcaggtaatcacattaatactaccagacatgtgtactactcagttcttaatgtttgtttataagtttgagagtatcaatttttctgtttttttttgtcctgcaaattatgagactagtcctctatcatatcctaaattgaattctttcctttgaaggttcaagacccagataactcgtcgcggactgtgtacgatttatggctagcttcaagcaatcctgtgaaggtatgtaactaacttgctaactgcttcatattgggttcagaagagataaactgcatgcccctgatataaattaaaagagtgaagtatgactgggcactgatttctctattgttaacataacagtagtaattcaactcttgatcattttaggtaatagatgcccttttacatggttttcgtttcattgatcaagttctaaaatcctaatggaaactaccaactcttacaaaacttgttcttgtcacacaaaagattgggaggttaggaggaggagggtcagatttcgcagcttttgttcaacacataggaattccagcaactatgatagcttttgacaatggtatggacaatgtaatttttgacagttgttcaaccgtgtaaacttcagtctgaaatataaatgacttgaaaaattgcaggattccctgtctatcattcattgtacgatgactatgtttggatgaaaaagtttggggaccctatgtttcaaaggcatgttgcaggtcagacatgaaaacaccttaaatccatcatattattattgttttcacttgttgatccatgaaaaaattcctttcaatgcatagaattaagagaaaatataacattttattgttgtatactatgttattattaagtttcgagtaatataaacacatctgaaaatagttctattcatactgagaaacagtggcaagtgtgtggggtttggtagctctttggctagcagacgcggaggtcttgcctttcgattatctatcctatgctgaagagcttcaggtataaatggatttagctaatgtagcaaattatgcataagataaagtattttgttataaaagtttttagcaaaattatcataatgaattgaatttctgaactcagaaatacacaaaggaattggagattgagatcaaaggtaacaaggatatcagcttaactcctctcttcaagtcaatagaggagcttagaaaagctgccaccataataaacaaccagaaaaaggtactaccactgcttaaagttttatgatagtgcataaaatgggcattgtcacgtattgaaaatgtgatttctctcaaggcagtggtagaaaacaaaggttggaaatccatttggaggaaagatcaatccaagctgagagagcttaatgacagactcatgatggctgaacgagcatttacagaccgagatggacttttagaaaggtcatggtataagcatttggtaagtttcttctttatttgctcttttcacattttccaactagtgcattttacttgagaaaagaataactttggttggcaatggcaggtttatggaccttccaagtatgatgactatggatctaaatcctttcctggcattgatgatgctgttgaaatggcaaacaaattgaacacagctgagtcttggaaactagctcaacatgaaatttggagggtctccagagctgtcaagcaagcctcgcaggttcttaacggtgtactcacatgagaatgtatgcgtttatattgggagcattttttctctttttggtgaaataggaaacatgttatgtattataagatttgttttatgtattagattatgtagttagacttggtttgatgtatttatacttctaatgattaaaaactttccaatgtccactcattccatcccatccattgatctgacggttgcagttgaacgaaatgcagagaatcaggtttctcccttgaaatgatttcgtgtgttcataaggaatgtggttagagaaatggtttaatacataaataaataacaccacaatagaatttagtgtgaagaataatcaagtaaaatcatattgacaaccgtatacacatgagttggaatggcgtcacgctcccacaaaatgaagcaatataacgagaggatttttataaataataaaaaatgtaaaaacctatatccttccaaactgtacaaaatgagctaaataaaatatgcccatatagttgatatgaggtatatttgtgcctaatcaaaagctttattagaggcgagatatatatatgtacaacttcaactgactaaattatatacacgaggtcaaataagacttttacagtttgtttattcacttccagaccttgatagctccatctctactgcttgatattaagagtctttgattgagtttgacagaagccaatgagagaatggaatcacgatgacagccagcagtatcagtagcagcagcagtcagaactgtcttggctgagttcttacctgctgaaggaagtcgtctctttttctcctgctcgacacaaaagaaatattgaattcagcatcatgcattaatagtgaataagttcaagggaactgctacataaaaaattcaatttctcttacaaaatcaaaacgtagataaagagcctaccaagaacatggaataaacttgtaatttgtatagtaggaattaaaaagagctaacaggggaaatatatgtaaaggtattactaaatattagcagcaaagcagtggattgtgtatgtactacatgtaaattacactatctactaacctaacaaacttaaaaagatcctcaagtaagaagccctattcatctacatacctgtacaatttgcgccccaaaattagaacttgttttaaagaattcatcattcacaacttcatttccatttggcccacatacagagtaacttcgatcaggactgcaaaatttagaattatgaatgaaaattaagtctccctttattgcaaggaatggaacaaataattcagatcaaaccaaaccaaacctgcaatgatcccatcgacgaatcttcaagtcagtacccccagttaacaaatcacccccaggtaagggaatcagtgaacgaataccaggaagacgtggtgggggttcttgcaattcattaactctgtacttggggttgacattacgcctcacgtccggtttagaatttccccgacttagtggtttgcccaaggcccaaagaatgtctgacatttcagcatcgctgtcgtagtttgctaccttcaagacctgcaagaaaaacaagaatatacataagaataatatatgaaccgtcaccaccttaatccttatgaataaaaaagttctctatacctggtggcaaattccatcctctgcattccaaagggaaacttcgttgcaacctgcagcaacatagacaaggggccttacagcagtagatgtagatgcatttggaggaggaacaaaaaggcacatcttctcaatagggcacacaagagggtactgccaagagttcacaggtatcaagaatctaagatcccaaagagtaagttcaccccttgaagatcctgagacaaaccaattaccacaaggacctgtgaccaaagaagatacatagccattttcaggaactgagtttaaagtccaggaatttgaacttgttcttgtatcccaaagatggatcccgcaattttgggtgctgtacataactgtctgacttgctgtgttatcagtggagtggttcaaaaggctaagtatggcaccttccttgatatccttctttttgatatcggcaataccagaatatttctcaacaacattaccaagacccctggtgatgtaatcaacagaaaatatatggatcataccatcacatgctcctactacaacttgagcagaaccccggagcattgtggcacatagggcccggcttccctctaggtgataagttaaccttgacctgaatgaaatgtccttctccaacttccttgaatcccataccttgaccgtagaatcatcagatgcactcacaaaaaaactatgatcagttgaaatagctaggtcattgacagcagagcgatgctcctgaaggtgagcaaccaataccccacgaggcctccaccctgaatctgaaattgatgatgttcgtgtaaaagatggcaatcctgttagttcagtttgggaggaggcaacttccaagggaacagaacctccttttgcagaactagataatcccatatcttgaaacttggtactgacatatgatgtttgatcattttcccggccatctggttcatgtacaactctgtagaactgtttagatccactgcttatgctgaaagaacctgacacaagcttaggtgccggaactgaactagccaagctaaatgatttatttgaaggatccatccaaggcaaggacgatgcaccaaatccaccagagttcacttgtaacagagaatcagatgctgcagaaggatttcccgctgcccgtttgtccatgctaaaggagtacaagggtattccttctgatggtttatctcccataaaactattcacaccacttccttgtggcatcataaaacctgagaattgcaacttttcagaactcaagggatcataaagttcaacagcactagaagaattgtgtattaagcttcccatagttctcaacttagcctcaccatcatcatattcactccgctcagcttgttgcatcgaattgaatgcaggcattgagctttcataattttgttgcttgtcaggccaactctttgcaggattaaaatcagcaaccactttctgaagtaaatccaaagtttcccattgttttgattgtggtgatgaattgtaccatatctttctttgtctttcaagcatgtctgaactcctggcattttctaagacttggtaaaatatctgtcttgagactgggggctttaaacatgaaagtagagctttttcagaagctagtgatgatggttgtctccgcaggaatggccggataacaggggcaaggaagacataagaatctactgcacctaaactttcactactagcaccaatgaaagtgacagctaaccttcgtacccattgactaggataacatatcaatggaaaggcacgctctatcatttcgaggagtatcctcttccttagaaaactgcttttgcatagaatggccaaacaatccaatgcattgacaatgacagcctccgtagtatcaattaaagcctgctcaatgtaaggtaaaagatactcctctacacttctttgacccacaaagaagcagacatacacaatttgtccgtaaaatactgttcttagttgttcatcccggtcatttagaaaagcagggaggataggtaagagaaaatcattactctgtctctggccaaagaagcagcataggttgctaatgtcctgaaggagtgctctcctgatatttggagtttgctttggacccataacaagttcttgaacaacctcagctatagacttccttaattgggcaagttgtgcatcactgttagccctctgtagacgaccagaagatctactagatgattgaattggcttctgttcatcaagaaccccagcctcactcaagcttattgaatgaattaagaaaccataagccgttagtgctaattgagcaatattgcttgcataacatattctcacgctttcctctgggtcatcaggaagcatggaaagcatgggaagaatgtattcaggaaatattttcgcatcactaggaggaaaatctcggactaaaggcaggatgtcacacaaagtttccaaggctgcacaacgtacaattgctgctgaatcagaaagcattgcaataacatatggaagcactcgttgcaagcgatcctcatcatcaatgtataatgcagagcacttaagaaagagtattgccctcctccttaaatgtggtaacttgacattgcgtatgcaggaacatagaagagaggtaattaaaaccatgccctcacatgtcataccatcttcaggaagtggcaaaaaaggcacatcaaaggtatctgtctggctgtcatgcttggacattaacaaattcaaatcattcaacgtaatctttttcataaaggggtgatcatttctcctgaatgcactggaaatggtttgaagtagctcaccaggagattgcatgccgtagttcctaaaattttgggaaagttcagaactatgaacatcttcaaggataggcttattaccagaatagtgattacttttttttacatctctcagcagggaattgatatcaccaagagtttcaatatgttcactatttaaacctttatctatttcatccctctttaaggacgattccttttccaaagttgggttctgctttgcaatcatctcttcagattgtataccactttcagtgttttcttttggaatcatagccagtcctgtaccattcccttcagtagacctagtgctcatcatttgcttcagaatctcatggaaaaagctttggcacagaacaacctacaaaaaccatatatacagtaccttttacacagctgaaaattacaaaataataagtctcaaaaaatgttacattattatttaccctcatatcagaattaagaggattccagaagcagaagaagttatgcagaaacggagagaaatagcttggaaacacaatggtcatataatcctgcagatagttagcagcagaaagtcgtgactctggttccaactgaatcatatgaagaatcattttgcggattccagaatcagggatctgcaatcatagggtaaacagataaaagaattaataagagaagagtgaaagagaaacataagtgactttcatatttatgtccacaccaacaggagtgaattagaataagccaaataaaagacaataagatgcatgagcgcagtgaggtagagcgcaacgtgggaaaataatattcttcaagtttttagacgaagaggagagggaagtaccttttcaagaagttgactgggatcatattgccctctgcgataagcaagaagttgagagagttcaaatagtggctgaccctcaagaaaaagctctgcaattacacacctgaaaagggtaatataacagaattatacacattgtaggacatgatttaagtcataagagaacacaaattatatagtatttaagcttaaaacactcactagaaggttctaagtcatatctagtgccaaaatctaaaaatttatcttgacctaaaatctcaaaagtcaaaacacataatgagctaaagatgataactataactcaccctacagcaaagatgtccatagaaggccttaaaggtgcatcttgtgcgacctgcatctcgcctccatgctcataaaatctctgaaatttggagaattttggaagtaattaattaacaactgatcaccttttagaatgaacaagtagtcatgcaatcaacaatatttaagattgtccactgtccacacaaataaaattgctaaaaaagtgaaggatgagaaaatgaaagtacagtctagatgcttgataatacacagaatgtaaaaggactttcatgcttaaaaattcagaaatcaaccatacaatcaaatccaccagcatcattgcctcgagaaatatcaagcacgacgctgtctcaaaaatttatgaacatgcaactacatgacattgacttaaaaactacatgttcatgtaaataagtacatcagaacacaaataaatagaaggaagattctccaacaaataatggcaactaacataatcacaaggttcagttctcaataatgagtcccaaaagttctttcaactagcacatataacaaaaaaggtaagtagataaaagaaaagtcaagaaccaacctcgggagcaagataacaaagccttcttcctccggtatcaaagaaaaacgagaaatcagaagggtcatcatagggaatgtaagttggtttgaatgatgcaaagtccacaaggtaaagccagttccaggaagtgacaagaacattctcgcacttaatatcacctacaaattcaaaaattgaacaaacttacataatcgtgaagatggtatactaatactaccaatagaaatttcctaatcaagttagctcaccgtggcaaactcctttctcatggcattgtttcacggcaagaagtagctgcaccaccacaagtatataacatgtttcaaggaatcatacatagacatagtcacaacatacacaaaacaaataagatagtaaatagatacctgaaaggccaaccatctcttctctacgagactcagaaaaggacgcgtacttaatcgatcatgcaggttattgaagaagtattgcctcaaaagataggctgctttatcagtttcttgccagaactgccaaaaacaaacacctttagcaattcaaaaatagcaactaattgtcaccaaaaatcataatctcgttcaacttccagtataaccaaaccgaaaccgaagctggaagcatgaattgtccattcaagtacttctaagtacatcacacaagtataaatcaacgacccccgagaaagcccaactttccgttcaattcccgtacaactttctcggttgccaatcacaaaccaacaaaatattccaaaatcaaacaataagataggaattgaacctgaaatggccagacgtgagggaattcaaggccacgtaatgtctccttgatgtgaaagagacggcgttcgtactcccgaagatcgatattgtcgccacgcttgaaatataccttgacgagtaccaaaccctcgtcatgcttgcagagaatcgacttgaggaagcgaccacgccctagaacctccttgaggactaaattgtaggaagaaggaaggtcgtggaggtagtactcggaagccgagacttgggtcgtacgagcaatcttgttacccatgtttcggcggtcaatttcgcattattcgccggttagttccgttctcagatggccgcagtcgccattgttaatctttatcagggaaggagagatgagcaaagaggaagacgatggtaaagctggggtggatgagtgcctgcgtttgcttctggtttgggtcgtctaatacttttgggccaccttcggagtttcgaaacgggactccgtgcgttttattcgaagtttcttccttctggactagattcacgtttctttacacgtggcgttatgtgattggttttaacatagactgggcccacccagagaaggcttaggtggaccaccttctcttattattattatttttttccttttttttatggttatttttctgattttctgatttatatttattagattttttagaagataattggtttgtgattataaaattgttttttttttaaaatagtgatgttgaaataaaaattaaaatgtgattgattctaatggcatttattattggaataattacataaggtactattttttgtaaaatatttannnnnntacgttcaaagaatatttttttacatttttacagttttccaataaataatacgaaaacaacataaaa

SEQ ID NO: 69356 - DNA, 585 bp, Cannabis sativa
taatgactgataagataaccaaaaaagatacaatggttcaaatttgcaagggtgttagttaacatggataattcatatgagcctcaaagagtgattgagtttttgaatgaacatggtcaattaatagagcagttagttgaatatgaatggatgttggttgaatgcaaatcttgtcgtgggtatggccatttaatggtagattgcaggaagaagaaggagactacaggtgttactaagaaggagttcaagccagtacaacaaacagctgttactgcaggggtaaaaccaatattgaattagttcctagtgcagatcaacaatagagaaaggagataacaagcaagggggatactcagataattaatacagagaatgctacagcccatggtgaagttggagttgccaaggatgactggcaaacaccaaagggactaattcctttaacattttgcgagctcaacaagggagtgagaaaatggaggcttcaattggttactttgccaatggatagttgcaacatattgagctggaacataaagggcctcaatagtaataacaagcaatatgctctgattgacttgtgtc

SEQ ID NO: 69357 - DNA, 639 bp, Cannabis sativa
atatattattattaaataccatttcaaaaaaaaaaaaaatatattattaattaataaatatgaaatatgaaaatgtctgcagtatttcttttaattattatatactataaagtcctattaaaataaattaaatgtgcaatcattctcgatttatagacagtaccgacatcgagcatcagaatttgtaatctcctcctgcctaatctatatatatcaatagcataccctaaaatcaaatttattatcaaaaatacccttaagttattaaattattaatttgttgcctagattagtctacctccgtagattttaaattttatgtaagttaaatacattgcatgcttcatggatttactgcttaggtaaatgagttaattattgaggacttcgtcttgattacatgtaatagggagattgagataatttaactgcttcagctttacctgcgagaataatagtttaattaaaaaattgaaattacattctttaatagaagttaagaatgattattgaaggttccctcaaaaaaaaaaaaaaaagaatgattattgaaggtggagaataacctttaactatttatctcatatcatagtatcacttttaattcgttttttattttttatttatgttattttattc

SEQ ID NO: 69358 - DNA, 1054 bp, Cannabis sativa
caccaggcggaggaggagggggaggcggtggctcatcgggccgagtgctgtatatgcctcggcgtgtttgaggaaggagagaaggtgaaagttttgcctcagtgttgccattgctttcatcccgagtgtgtggatcagtggctgggtactcattccagttgcccgctttgccgagcttcgctccgagttgagacggttgttcctaagattctcgtagaatgagcaacggacccattcatgattgcataatacgacttactttttttatttattttttttagctgtaaattcagttattgtggtgtataatgtatataattgattgatctttgtataatttttgctgtaaagcactaaatgaatttggaatgaaatcaatgaatacaatccgtatattttacagaaggaatagccacaagcatatattttttttaattattatttagttattttaataaataaaatatatatttatttgtactaggaagctttgttctctagtttttagttttgttgagaaaatagatacttgtttctttagttggatgtcatgcgtatggggaaagttctggaagaagtctttgctatggttgcaaagcaccctgttgcctatcaggggagagatttcctaatacaagaagatttgaccttatcgatcaaaacggtgtgttttgacaacattaaaattatcatcgtcatcgatatcggagattcgcttattgggtgcttatccaaatgtgggacctacctatctttgaggtgtgaaatgtgtaccgtggagtttggtgaggaatttagggtatcattcaatctaattaaatctatcaatttaatttaattataaaaagttagatatctaattataattggattgaattagatattaaaagttaggttgtaattagattaaatgagttattgaatgtcgatctcaaaatttaattaaaaaccgatctaatctaattatatttatatatgttaaaaaataatttatataataaaaaaaatattaaaaagtattaaaaaatgcttagatagaatcacaaaaaacgtc

SEQ ID NO: 69359 - DNA, 821 bp, Cannabis sativa
  modified_base (775)..(794): a, c, t, g, unknown or other
tttaaagtttaaaaattaaattttttttttttttttgaaactgaccttttagcattaagtaccaatatatttttacaaaaatgtgtggaattgaaaaatggaaatcgattgacaatatcaaatcgaataattgtgtagaatttgaaattgaaatgtctgtagatagtgaatgttatgatctgctttgacccctccattctcttttaattaacatacgaattgtacattttgatgttatataatcggaaaaacgaaaaaaaaaaataagaaaataggaaactatgaaataagtatctatataaatatatctatctaaccaagaatggtaagtttgacaattctttttagcttttcatttgtacttttataattgatttttaattcatttataaaataaaaacaacataactttgaaataaaaacagcatagcctcaaaatgaaaataacttttataaaataagaagaacttaacctcgaaatgaaaatagcataacctcaaaatagaaccaactatttttttaaaaatgaaaaaaaaaaaaatctaaaaaaaaacgtaaaaattaaaagaaaaaaaaatacagtatacatggtaattctcttttttctgttaaagttaacggttaaaactaacacagttgaatcaatcattaattgtctttttttttaaaaaaaaaaaaaaagaaagtatatatggaaattccttttcttccgttaaacttaacagttaaaattaggctaattaagatttttaccccctgaactttgacatgtacnnnnnnnnnnnnnnnnnnnnttaaggtcgttaaaaatgtcccttgaa

SEQ ID NO: 69360 - DNA, 738 bp, Cannabis sativa
caggggcgctttgctgatgctttattgcgggaactagctggagtaacaatacctccagaaaggatatttggcttgggtaccgggtcagtgctagaacctaattaattttcttttcctgtatgcttgcttggacttgttcctatggcttgggtaccgggtcagagatttctttctgactttgaatttggttttcagtcctaaggtagaagtgttgaagcaacttcaaaagaaaccagaacaccaggggatgaaactacagtaagaatccttttgcttcttgatgcaaaaatatgtaatgcattctaataaaataaactcaatttcaacttgtgaacatgctcacatgtttttatacacatggcaattctgttaagcacactttcatatctagcacttctattggttaaaagctgaaaatgttgactgtcatttcaccagctttgtggaagatcgactggcaaccttaaagaatgtcattaaggaacctgagttagatggttggaacctttatctcggttagtacctctctcatacttgtctttaactgtagctagctatgttctttctttttcttcaatttttctttccttcccttttttcttttttttttcttttttggtctgcattgttgttataaagtgctaattgcttaactaaaatcattaaatcaggggattggggttacaacaccaagaaagaaagagaggaagcagccagcattcccaggattcgtctcct

SEQ ID NO: 69361 - DNA, 1357 bp, Cannabis sativa
tatatatatgtacctgtgagtgagcataacgcccttggagagtcctgtggtgccggaagagaatgggagagcacagaggtcgttttggtggacttcctctttgatgtgacacgtcccagctcgatctgctgcttctagaagcttgtgccagttaatggctccttccactactacttcttcctctactgctatgactggcacctctagcccttttacctgctctttttttcaacccttacactttaggtatgtaattatgtattatatattgattaattagtgtgtacttttggtgttgcaactgatcaacaactagttacatcacttttatatatatactaactttcaaagtgaaattttatagcataaataaaaagcatacattcatctacaaaagtgtgtttgtatattcttaaaggaaaatagtaaaacatgtatagtgtttttgcagaattgttgaaattaaggcttctttaccgtattataccttatttatacaatatttttatgtaaaaatatatgtgtggaattttcttttacaagtataaaaatgtataataatttagtataaattaaatttcaaccgtattataatataaaaataaaatatataactcaattaatataatataatacaatgccatataccacctaatataatgcatgtaccaccaaaagagtcttaatatatacactactcaaagtcatagcagatatatataacacatgttaagaagatctataaagcatataattttctcatttcttgatggataattttctttattaaatagtacaatgcatatgtttgactagaataccaaatgcatgtgttggaaaattatgctacgtacaaatcattatcaaataaaaactatatttaaaaaagtcttaagattttcaccaattctatggtatgggcgaagagtagtagcttaattattaggtatagtgtactgtaccttgtcgtagaaggaggcattagtgacaattagcttggcaccagagtcctccacttgcttcttaatttccaaaacatgtgcagctgggtttgagccagaaaagacaccaccagcagccattatgccaagagccacaatagcatattcaaccacattaggcagcacaacaaccaccacatgccctttcctcagcccaagtgaccttagagccgcaccaaacctctttgtgtctctcaccacttccccatgagtgtactctttcccactcactgcatccacaaatgccactttatcaccatattcttcacccccttggagcacaaattccggcaaagtcacgttctccggcacctccaccgccccgtaccgacttcgaaaaatgtgctcctcatgat

SEQ ID NO: 69362 - DNA, 568 bp, Cannabis sativa
agagagagagagagagagacctcagatagcggaacacccccagccttgacaaattcatccttaaattgaccctaaacaacatgaaaaatatttcttattcccagtataaataacaaactgatttcgacaatcaaaagaaagacaagaaattataattatagaaaaatcactttaagttcagagtttcaccttccctgtaattctgaagtcacaattcttcaatagagaagcaacagaagccaaagtattatttggaatagaagaccacaagtcatctccagagaaaccctgcaaacgtaagtataatatatgatgatgttctattcaagtaaactacatatgaagctcaagagaaggcgtgaaaacctggcgatccaatatatatttccagaatctcttcacaagaccgaattctggtggatatgagttggacactttctgcttctgcatagccagaaaagaaaagcaattgacacttcatacacaaagagttatgattacaaatgaagtcatcaccaaattatcttgcgtgtgcactgaagtgaagcccaatattgagattaacatc

SEQ ID NO: 69363 - DNA, 863 bp, Cannabis sativa
tcttcatcttcatcctactcacctttcaattttcagttctggttttttcccaagattcttgcaactccaaactcaacctcaaaagtcgtttaccctttgatgcaacttcccttaactgtctccccatttggagtaatgaagatttcgtcctcagagtaagtttacaatttcttttcccgaaattttcacatgtaccaaatcatgtccccgaacttaatttttgtatgcttaatcagtacggacagagcaaagcaagtgggaacatatggagcttcgttctctctacaccgaatccgaaatcgttcgtggctatggggttttcgaccaccggaagaatggtgggttcgagcgcgatcgttggatgggttgaatcggacggtacagcgatgatgaaacggtattatttgggtggaacttcgccggctctggtggtgaaagaccaagggaacgtgagtttggtggagggttcttcttcggtggtggtggaatcgtcgcggttttacatgagttttcaattggatatggatcaaccttcgtctcgactggttttttccgtcggaccaaatgggttttctcctatcggacctgattaccggttgatggagcaccggaacaagatcgctacttccattaattattcaactggtaagaaaacaaactttattcactcttctttattcaaactcaaatttttgtcatcttttttggttttagatttttttttttgttgtctgaagtagttattttttttagatgatctgtagtagttatttaagatatggataattatgtaaaatattaatttttttttagagtaatttgcggcataagtacctaagtttaacttccagttgcaaataaat

SEQ ID NO: 69364 - DNA, 591 bp, Cannabis sativa
ttttttttttaatttggagttcagggaagtggcaaaaattggagaccttgtgaactttgaagcatgcatggacattatggatatcctttatgaaaaaggagagatatctacagagcattgttcttctcattcccttgctgcctcaactttggtatttagattaagaaaagtttaaatgtcgtaataatttctcgaaaatcatctactgctgagattttttaatgcttttaatccttttacaggttgcttcatatgtcattacagttcccaaacaaaggtgggagtttcccattcttccttggggtaagttttaaaatctacttacacaacctgtaagttttcctcttattttaatttaggctaattagtaaaattgaatgaaattgaacaaaaatctttaaattcaacaatcccaatagttctggggagatttttaacagctttaaaagttcagaggacatgatttggtatatgtcaaagttcggggacaaaaattctaattagtctttaatttatgaaatcccggaagatgtttcttttggtagcacattactagtttctatgatgctaagttaatgtttatgaatgttg

SEQ ID NO: 69365 - DNA, 776 bp, Cannabis sativa
ttcttgatattgaaacaaaacaaacctatatctctcgggatgtagtcttttatgaaacaattttttcgttgttttcaactacatctccttctaaggtaagcactttgtttcctgacctcgtgcttcccactatacaacctgtgcatcaaccaaatgctcatcctactatgcacacacctgcctgccaatctgcaccactatctggtgcacaaccggctctccattcaggcaatattactcctccatcttaccctgctgattccacacctacagctcctacaccagcagctttaatcccagaattttcacccatttctggccaaaaatcagcaacaatacctggtatttccataccagatcccactttatagcagaacaatatttctgcatcccctggaacaactattcccacaccaggctcttccacaatctcacctgcattaggtacaaatgatgcccctacagcagtttctaaaccagcacgtataccagatgttcatgcaacttccatgacatctacaagggctggccgaaccattacaaaacccaagcacctcacagactatgtctgtcatgcttcttctactcatcatcctattgagccttttctatcttacattaaattgcatcctcaattcagagccgctgtccttgcagcctattccgaagttgaaccacaaagctatgctgaagcatcccagtttcgacattggctactcgccatggataaagaaacggatgctcttgaaaaaaacaacacttggattgtcaccaag

SEQ ID NO: 69366 - DNA, 596 bp, Cannabis sativa
aaaaaaaaaataataatttttagagaatattgcaaacaaaattaatatttaatatttaataacaatgatctatatactttcatatgaaaaatattaaaccatactttaaagtattaaacattacaaaaaatggcataatatgttattagtacatggcgttccacacatttttagtttaataaataagactaattaaaatttttactccaagaatttgtaattgtaagaccttaaatttattttgaattgttgagattgttaaatttaaagactttcgtccttaaattgctcacaacacgctacatcaatctggtaaggtacatatttttttgtaaattttttacctttttacgtttgaagatttttttttatatatattcttacggttttttatagaatcgaaacaacacaaaacaacaagaaaattacataaaaataacattcaaacaacaataaaaataacatatatataacgaaaaatgaacaacaaattaataagagtacaacataaaaaatttttattttctgtaaaaaaaatcataaaaattataaaaatatttaaaattttgtataatcgtatttttataatttttttt

SEQ ID NO: 69367 - DNA, 2517 bp, Cannabis sativa
ttctttttatggtaaaccaaacagttccaccgaattttccctttcaaaaaaatgtagaagatttagatttttattgttgaaagcttatatgactattattcttatacttgttcacaatattgacaccttcctatggattgtcttgctcagtttttgattagatggtctcttagagcaatattctttctactctttaatttattgcaatggctgatttgactgtttaatgaagcttcattttcattcaaaaaataaaatgaaaataaaaaatacaagaaaatgtattgaaaggatggtaaagttgctcatttatgtaatctacaaataatggtaacgcatcttgtcccaagttttcaaaagccaaaaataattagggtaaacacttatttgttacccaagttttgctaaaatatatctttggtaccttctgttttgaaaaatttaatattctcaaactaatcctattttaatatttaatgattattataaatcccattatatttaataatttttttcaaaaattatttctttctcctccatctgtggagaccccattcccgccacccccattcggtccgatcttacccaacccctctggattttctgggttaatttgttctgcttgtgttgattccacatgttagtgaaaccaactattttcttcatggggatcatgtcttctctgcatatgtcagcttgcgtagtaatacatatgtctgtaccaatagttaagatttcataaatctaaacaaacttattggctcaagaatgaggaaatacttcaacaaggacgagaaactatttttttaaataaagaaagaaatataattggatatgtaataagagttaaatattaaaagggtgagtttgagaatattaaaatttgaaatgcactcaggtactaaaatggtagtttttggaaatagagagtactaattcatcattatccaaaatgaaaggtacaaagtgtatattttgataaaagataaagtaccaaataagtatttatcaaattataataatagaaaaaggtaaaagtaataatgatatgaactattttagcttatcataataatctccttaaaccagtaaggcagtagcaatgtgcaatgcactgcaattacaaccaccttgcttctttcaagagtaggtataaatacagttcaaaaatacttttcacaaccaatggtttatcacatcaatgtggtgcctactacacatatattattttgagtgggtataaacaattaagggacaatgatgttcataaatttcctcttggcaaatgctaaccaccatttatttggagtcccattatgtctgtaagcaacactcaataatctaccactagtctcctcccttatctgtttcagatagttcctgagtaattctgcatttcacatcagaaaagtcagtcaaaacagattaatagagctttaggtggtccaggaaaaaggtcttaacaacaatataaacaaaaacattgcatcttggccaagagaaattcctaagtcaagtcattgacacttacttaaaatcattttaagaagtaagaccactactaacctatatcaatgaaacagttgaaaacatcattgtttctatggagctgctatatcatcttcagtggttgataggaactaaatttatgtttaagctatcaatcagaataatagatcaggtatagcttggccttgaactttcaagattcatcaaataaaaatatattatgcatgaccatagagataagccaagaaaaacatacaagttcatatgtcaaaaaaactaattcaaacaataatgaaaacaaagaggttacagctaaaactacaagattctaaaataatattgaactcttcaaattgtcatgaatgcaaaggtcccaaatgagtatgttatgtgttaaaactaaaggcaagcacaaccaaagaaagagtttcacctgcttccttcttggttagaggaaggggaaaaagacctggaaaaggaaaaccaggttctcctggaacaggtacctcttcaagacccaagttaataattgccttggttccttcagccgaagttctacaaccctcaagccgcttcaaagccacattaatatagagtgtcagataaataaggagcttatcagctgaactcttgatatcaaagtttctgaagaagacattggctcgaaagaatgtaattgcttcatcaataatgtcagtttgatctgcaaaagatttatcaaacatgagtgatattgcaatcttctttacatcaaagatgtaacaatacattaaaaagtcaaaccttgatttaaatctggagcaggaccctttatatgggtttttagaggcaaaatgggacatccacaagctttagtaactctttcatcatccacaaaacttgagtgataaacctatcattggaatcatctttgagtaagtatcataagggaaattctcccaaacatcattgaagacaaccagactgaatgaacagactttatgaccataatcaaggatttaatttttg

SEQ ID NO: 69368 - DNA, 503 bp, Cannabis sativa
aacacgtatttatttggacccaactgagaatgattatggggagcaaattgtagcaggtttgactgggaagggaaatgtttcctatgtgttggatttgaaccctaacaaggatgatagattagcgcaccatgcccagcagggccatcaagagccatgatttccttattctagaatgtccaagggttggggaactcttagacgatgaattcccttcagtccttggttcgtgagcatgttttgagtgtgatctttttgtgtgaaacaaagacttctttgtcctaaatggagtgggtttgtgtgcatcttggctttacgagtttcttctgtgtggattcgattggaaagagtgatagtcttgctttgctttcgcgtgatccaatggatgttagaattctctcttacactcgatatcacatcgatttgaatgtaagtttggtgggggacattgattggaagtttacaggattttacggtgacttagatttgagttagcatgtgaattg

SEQ ID NO: 69369 - DNA, 1358 bp, Cannabis sativa
atatattcatcgtcactgtgtaggtttacattgtttagtttctgttgctaaattcaggatgcttgccaatgtcaaggcttacacaactttgtcaatgttacaggtatggaagaatatactgtcttcaagtcgatagggttgcaatgcttctccactcctataggttttaccgtgatgctgttgtgcaacaggttatatatttactttttttgggtgtgtgaatagagcaaatttattagtaaatgtgttggaagtttttatagcatacaattatactgatttatgaatgtttttgtatccttgtaatttttttaatgaatgttttgccaaataattttgcagaattttcagtttacacagaaaaatatttaactggttagatgggtaaatgtgagcagtgcagctttcgagtctttgcaatatatcttgtattttttttttcatttttttatgtgtcattattttgctcctaaatgtttatgtagaaaaaagtgaaagtagaagaattattatttgtcattgatgctatttttttgtttgaactagtgctgttaggatgacctttctccctttttatctggtctgtcagtccaacacatttatttttggttacatttgattcttagatcctatgtgagaaatttaatctagtcatagtgtggacattattatacaaataatgtttgtttatgctttgtagggttccttgccaatatattcaagcaggattgctgtgagtgcggttgataatgtgctgcttgttcaccaaattgatgcaaaggttgttatactgtatgatgtatttacagattctcgagcacctgtatcagccccacttcctctgttattgaggggtctccgcaggtctaatagtgcttccctgcgatcacatagagaagataatggaagttctgtggatagtgctataaatagtcatgaagtagttgtctatggagatggctggacctttcttgttccggatctcatttgtgatgttgtgaatcaattactgtggaagattcatattgatttggaggcaagtttcttttgtatgatctacaatacataatttcctcttgcattaccagtacttgatgtctcctttcttttccaggcaatttctgcgagtagctcagatgcaccagcagtaatagaattcttgcagaggcggaagttagatgctagtaaggtatactctcttctctattatgaatgtgctgtatgcatattattatttggttgtttagtagaaattttgctgaccaaataaagttaactaattcgtttcttagcttttgtgacatacttaacttttactaagaaagccagttcctatctcatcaaaaaaaaaaaaaaaa

SEQ ID NO: 69370 - DNA, 1048 bp, Cannabis sativa
ttaaaaggatgactcattgattcattcattcatctgagagtagaagttagagagagaaaaacgtcttcttggcaaggaatggtgagacccatatcgtgatcgaagccaaactcctcctcagctttatggagtaaggtttgaaactcaggacgattgaggaatgagatgggtagaatgtatctacttctattctccccaacgtacaccacaaaatgtccctttggtacatctagagggaggccttgttcgtcgtagtcttcgttgtgttgtttcttacccaaactagaacatctcttcaggatttgttttagcaccgccgtttgtgggagcactgatctgctgctggattttgatcggatggccatggtctgagattttggttagtttgggaatattggtttaatttatttaagggtagtagtgaaaaggttgtgttgtgaatgagtttttaggatcaagagatggtgtgtatttatggggagaaagggttagagagagagagtataagggcatgtgggggcataggacagagaccacgggtgttttggggtagtgaagagagagagagaggcaatcccattgggttaacttccaaagtgttgccattgcaaaggacaactcggtccctctctatctcccatatctctttcatgtacctctctttttttctctaataacataacatttcttcccgtactatttacttctttctcttctaaataaataaataatttcggaagcatcccaccaatttcccatgttatgttatacaaccttatttatttattattattattttaaaaaataatactatataataatgaaaaaaaatctgttgtacatgacctccttgaaggaaaatttccgtaaatatttttatttgttttgggcatttagatgagctttttattctaattattttcatgatggtatatattataatcaatgttagactaataaattttagagatttttttatttttatactttaaaatagttttttatttttatttttatggaagtctacgtagaaatccatattgcaact

SEQ ID NO: 69371 - DNA, 732 bp, Cannabis sativa
ttctatacattacctacacagagtattatcctatttctaaatatttatcttccgatttgatgttatcttgatgaataatattgtttgtcagtatatgtatttttacaacctgaaacaatgtgttacttttactaatagaagtttgtttagaccttctctttcattcctcgatttgatcttacattcctaatccaagtatgagccgtagaactagaactagttttcttgttctgtttctgtgatagaatgatcacacatgaaggtaatagttcttcccatacaaagcagtttcaaaacagttccattcatcattcatcagaagaaactaaaacttgaaaaaaaaaatggcataagtagtcaactcttgaagcagagggggaacaacttcgaatctctgtatctgtctaagtaacatgtcttaatttgtttcaagaataagtaaattagtaattgggattatttcaaaaaaacatataaaaaaataaaatactaattttaaacatttttatagtttttaagattttatttacataaaatagtcttttaatctatttttatattatattttttttattttgttatttttatattatttttttatgttgttttgatattatttttttgttactataattttttttgttgtttttttttttatatatttataaaatattttaaaaatatatataaaataaattgaatgcaaaaatgtaaaaaatttaaaaaaaaaaa

SEQ ID NO: 69372 - DNA, 573 bp, Cannabis sativa
gcaacatgaaaattcaagaaaacattcttaaaataataatataaaaaaggaatcgtgattcattcatgcaaaaccatagttacatttttacggtatgatttaagaatcaataaagactcataatggaaagatatttattcaaattattcctacgagaatcccaaattgattaacaaaacccttgatcaataaggaaagtaaaacatacatctaattaaaattatttccctaaaaatcagaaattgtaatttaagagaaagcaaatcctacatggtaaactcacaatgaaaagaaaccactccaaaatatgcaaataagaatcacagattgatcagtaaaatcctcgattaataagaacccgagtataacatacatctaattcatattatttccatatgaatcaaaggactccccgcatcaactgctttatctccaattcatatttaatgtcacattcgctttttttccacaggaaccaaaattagaatcaaacatgtagaaagaaaaaaaggataccaagtttggttaggcaaagccaagcctatggaaaattcaaagccggaagcggtccaa

SEQ ID NO: 69373 - DNA, 1465 bp, Cannabis sativa
tcttaaattttttgtttttattttgtaaaatatggccacgtaggataattttttagtgacgtgctattgccacgttggcaaaattaggacctaacgatgctgaatagacgtcaccttaaaaatgtaaacgaaacagtactttgaagggtttttccacgaaaatatgaggttggatggttttttgcaagtaaattgataattgatgagattttaccgcaaattactctataaactatggttctgagcaaactaatttataaatacccctactcataagagtttttatcccaataaaataatacagccacaataagctatttccaaaaagccaaacattatccttcctaataaaaaggtgtgtggaattcgtacactttacccaataataaggaatgatgccagtagcactacataatttaatatttagttcctaatatttctaaaattatatatctaattactaataaaaagataataacaaaaataaaaactactatatataataaatcaatatgtaatttttttaaaaaaaaaatcaaataatttactaatttgggaatacactaagattaatctataaaaaattaagaagaaaaaaacataccgggcttcgaacgataagagaggtcttagcaccatgattagcaagatcaagagaaatctccataccagaattaccagatccaacaaccaaaaccttcttctccctaaactctttcccagatttgtacccagtcgagtgaagaatcttcccaggaaaactcctcaaccctttaacttccggcacataaggctccgccgtttcaccactagccacaaccaaaaaccttccgttatattcctcaacaacatcttcgccgttaccgttaactctggctttcactttccacttctttaaatcctgatcgtagaaagctgattcgacggtgcgatgataaaggggttggatttgaaatcgagaaacgtaatcgtgtaagtattgaaggaaaaggtgtttgggaacgtagcgagggaaattggaagggaaaggcatgtgaggaagctcacagacttgttttttgagatggagatggagtctgtcgtaggcgtattttttccagagggaagcgaaacagtcttctctttctagaaggatgtatgggattgatagttgggttagacaacccgccatggccagtcctgaaggtcctgctccaactattatcactgccattttttctttttctttttgtattgttattgaggaattgttgattttgttggtgtatatatattgataagaattatatatattgtgatagcactagtttatgcaatcttatcccatataactatttttaagtttatttaaattcacttaaattccattcaattatatatttaagaagtaagaggcatttgattgggaggaatgaaaatatagaaatgggaatgggaatgaaaataggaataggaatggaatgga

SEQ ID NO: 69374 - DNA, 645 bp, Cannabis sativa
  modified_base (53)..(69): a, c, t, g, unknown or other
  modified_base (604)..(613): a, c, t, g, unknown or other
gtctacctattagtaacctgctattacagattaaagaaaaatgtaaccatatnnnnnnnnnnnnnnnnnaaccattgaatagtcaccctttactaaatattagaaaactttcaaatttatttatatggttttcaatatcataattgctattagaggatcgttatatattgagataataaacttaaagaaaatgaaattatcaaatcttcaaattatttactcttagtagagtccaatgtagctagcagtaattagctaccaacatttaattagtagtaataataaatattattttgctaccaaattttagtagccaaatattttagtagcaaattctaaataaattagaccaaatatttttactaccaaaaattttggtagacaaattgcttttttagctactaataatttttgatagccaaatatcactacaaaaaaaattatttttaactagtcacaataaaatttgtgatcaaaagtaaaaaaattataactaattataaattataatttttacattgtgactaaaagtatttgtcaaaatcacaatgtattgtgattaaatgtgtatttagtcataagtacttattgtgactaaaactannnnnnnnnnaatttgtatctaaatattatgtttagttacaa

SEQ ID NO: 69375 - DNA, 550 bp, Cannabis sativa
cttcaactgtcactatcttaggaaagtcacttcccattttatgatattagtgcacttctaggggaagagaggccgttgcaatcctaaagatcagaaattactctgtcccaagagaagtcacgcacaatcccagaattttagtgagaatttttagacggtcttaaatttatcccaatagcaaaaagatccttaaatattaatattatatctaaaaaacaaaagctttttttttaatagccaattattttgctttcttgcaatgaatactaaagatacaaatcaatcacattttctttaaaataattacatgtcattatataattacgagtgaataaacatcgtaataataaaaaatatataaaaaaatataattaaactattaatactatcataaaaaagcataaaaataataataatgataaaaaataaatgtcagcaaaataatttgaccaaaattcaaaatcaacaccatttatcttcataaatattgtaacatccccgcttcaagcctctattgggcccttatacccacggactaatggctcttata

SEQ ID NO: 69376 - DNA, 5145 bp, Cannabis sativa
taacccttaattaccctgcctagtaattacacagttacgtccaaacacacccttaaagaaaattggttgaaggatttggttggatttaccatttaaaatcactttaaaaacctgctcctcaagctctaagtttgaaagagtaacttcttgcaaaagtgctttatattttataattttaacaagtttgtttaagtttgtgttgtatttagttatatattgattaatactcgtttaaatcaattaaattatcaatctacaatcaatgataaacgagatgcatctcctcacaacagaatttgtattttcttaaaaataagttgatttataaatataaaaatatttcctaaagtaacatctataataagctaaaggaaattgaaataaatatattgctagtttattattcaatatacttatgctaataacaatatattagtatgcatgcaaacaaataagtagtaatggactttttttaaaaaaaaaaaaaaaaagtaaaatatataatatgagaaatgctaaaaaaaaatactttgggtgagcataattattatattctcaagagatgtcatattattattcatctaattttgtattttataaaaataaacattaattatttactaaaagctattttatgatagtatggcttaataatattaataacgctcatataataaagtctcaagttataataattagacaactttcattaaaatgaacgttgattaatgcaacaaaacaaatcaaactaaagtaaagtatattgaagtagtggcaacatgatagaattagaaaatgaaatgtgacaagtaatatacttatttatgtcgtttattgataagaatttattgttgtatttgtatagatggttgcgaccaaggctgcagtagtgtgtttatgcaattatgctattgctatgcataagcattttttagaatatatagttagtggggagtgttaagtcaatgttgggtcgccgcgtcatcctacaaacaactccaatttctcttcacatcaataatatgttcaatttttttgacctaaacaagtaccacaaaaataataaaaatgaccattcttttctttgtcaaatagtaatatatgtttgttttcaagttatacacttttttctaagtacaatattcttgctattatattctatttaatggttgttaacacccattgtttttggagacaaaatagattatgtatattttgtccattactaactagatccgacatcatgttgtccctactctctctacaaagactacatgtatatatttttctcttttttttaagagtaaatatacaaacccagaaaataaactaagttaactaataaactaagaagattattgttacaaaatacacatattttacggcaaaattggttcataattcaagctcaagtctcagtatgattgttgaggtctcccataaatgtcatggtgttttattttgatgggtgtaaaatttatataagaagaaaaaaaaagtcggtcatgaagatgtggagtgtatttttaggtgtaaaattgtggcctgagagagaccgaacaaaagagcagttaatggatcgagtgaaggaaagtagtgtgggactaactaacaagcttcaaccgccgcacgtacaggaacatcaacgtgtgctgtcgctgactaaactagtcaacaagtcaacacaaagaccataacaaccaataattataaaagtaacaaaacaaattatgcaacaacatcatccaagtgtcagcaaaatataattctgaatatatgacagtaattaatggtgagggatgaattttgtgatgtggccctgcaaaaatttcagattaaccaactaaactaggaagtaggaatttataacaatcatcttataacttaataataacaacacttgagtaacaatagattggttttgtgtagtcagaaagaataacaacagcatatttaggagaaattttggcacaaactacttaaatcaatagtgatcaggtcaattacattatatacatatacattttcttgcctcaaggaaaacagtgttcttgtataatacagctaatttgtaagaaataaagaaaggggccattcttttttctttatttttttttcccttttctgatacatgacttgacatagagaagaccacaaaaggttgcaaaaaaaaaatatgccaaatgagaagtcaaaaccagcttagtaataatacctcttaatgacttgaaatcttaatccatcaagcttattacctgccagtgctgcctcctcatactcattggtaggtagtagtggtagtggtagtggtaaaagaaatggatggtgttgtaatgttagcataagagtgagtcgtagtcaaaatcagatcagttctacacacgtgttgtcaggctgctcgtacttggtacacgatttagttgtattatatgcgttctcaagctacaatccttcacctgtcccaaccatttatggtgaaaaattatttatgtttctttcaagggtccaaacactagatttggaggaagttaatataaggcacacttacctgcatggctgctacagtggacaaaaaatctttgcattgttcaagcagaaaccgttctttcccagttactttcacaagttctgccaccaccgagttcatttcctccatctgtagatgacaacaaaagtcatgacaggtgacacttaatgctagctcaacgattgagtgggtaagttagtgcatgtgaaaatgtactgagttataatttcatgtggatactaaaagaaacctcctccgtagtcatcaactgtggtttctctataaaactttagaatatgtgaacttttggatcatatggtctttatctttataaattgaaaatcaatttacgctttatgtcaaggattcttcatcttttagattcaaaaactagcaagaaaataatagagagcaatttcttcgtttcagaaatttgcctgttttctgtaaacaggcagaaatatcactctaaaaatgaggcaacgaaatattcatatttcatcatactccggataccaaagtcataagaactctttcacatcacataaaaatcaaggtagtgcagttttgttgttatgtttagataacaccccaagtataaaatttctttggtgccttgccagaaatcataatattttctcctcaaagtaataattgttgtaactagtaaacattcagaagaagaagaaaagaaaaagacaaattaccttgagagaaagagagcatattgatgatcccattgcctgcatcacatcaacggcagaacccacagcatcctttaaattttgaatgtcagcctgataaggtggaatagaaaaagcattccatcagaatgatgttaaggttttacattagaattaatatctcattatcaaagaaaagagaagagaagcacaaaaagaagacatactactgttttcccaacaactggaagacgtagtgtactggcttttaaggcttcagtcgctccaagcaaggaactagaatgatctctatctagaagagcccaatcttccaaataagtaatctacatccacaaagtaaaataaacattatgagcaaagaacatcatttgaccgagaaagtagcaaaggtcacaagtaaacaattatccaagatagttgtctgtataattattacaatacatacaaatatgtatttatatataaatacaaaaatattgtatgaaattgctttcaaatccttgcatttgcttccacaatatcttgagtgtgtgtgtatcgatacaaaagggggagtcagctgtccaactaaatcaggatatcagaatacacaatctaagctcctacgatattgcactaagagttgccaatatgataaaactccaacataacagctacaagaataaataattacaatgtgtaaatacatttgctagctctcaaattattgccaaattccgatacatgtttagagacaatagcatattggtccctgttgccatgttccaatacaagtttagacacagttgcatattggttctaaaatatctccaatcataaccacatatgcattcatgtattgctaaactctatttcgaaaaaaaaaccatatatggttagacaaggtgggctcacgaaaaatgtcctgattatatttctactacagttaaaaggtttgttgcttaagccctatgtagttagtaatatattttattttaagtgaagatacttccaggtaagcttttagccttcctccatttcaaataacagaaactggtttctttcaaataaataaataaaataacagaaacttgtattttttagacaatgggtgtcttaggaattaagtgattataaaccaccaattaaattaagagacatataatgatttgaatcatacttgtcccttgatgatggaagtgagcttcaatttttgcctcagcaatagtaacttgatccttttaagtgtgacagaatgtcgtaactctgagattgttacccaagcattccataaatttttctgttaccaaaaagagaaaaaaatatcattagatcattgaacccccaacaatgctatagagcaaaacaagtagtttatttcattgcctccaatagagccagagaatgcagtgggagcaaaggttttccatacttcaaaacacgtacatgcaaatctaatctaagcaaatgcaacatatgagatacaaagcaaaaacatgtattatacagcaaaaccatacattatacagcagataaccactggctcattctccatgtgttataaaggtcaaataaaaccacataagcatctagagacagcctgaataaagtatagaggtcacttatgggtaagtttctatgttgggcacagtcagacatgttctcaagctcaagtattatattatcaaaaactaacaaaatcacaagttcacaagacattatttcttcatctacttttatttattttaactttcttatgggactaaatagttcagacaagaatcaaaaaaatctattaccatcacaaattaaggttcactgtatgcatactcgacaagtagcctatgttcgcagaaagattcgctataataccaccatatatagcatatgttacttggtagatgattcatacaagtttaccaacaacccctaatt

SEQ ID NO: 69377 - DNA, 909 bp, Cannabis sativa
  modified_base (857)..(870): a, c, t, g, unknown or other
attgattttattaattggaaaaatgaaatttaagatttgaaatttgttggagtaaaaggaagggtatcctatctagtctgaggatcagaatcagagaatttgaatggtgtggtgggtatggtcaatttgggggaaaagcatgcaaaacgagggtccacttgtacgaccctgggattaagatctatcaagaaaaaaccctactagtataggtttttttgggaattttatttttttatatacatttaagtcatacctaaatattttttatcataatttgtagggtaaatagtattggaaattcctgcataagaccatctaaagggtagttttggtaaaaaaaaattatctgtgttgccatttacaaaaaattagtttaaatttttgtttttattgtgtatgttgtagctatatattttgaattttcgaataatttatagtgttgaaaataaatttaaatactactttataagaaaaatagttgcacccgcgaacaaaaaatttacatagtcttaattaactataacttataaaaaatagaaagattaaaaagttgtatcacataacagataaagagtctatcgaaacacttctttagaagttgtactgtagacttaatgacaattcaaactctttattttttaaaatggtacaaaaatagactccaaacttaatttttatcaaattaaaatttaatatcttaacttaaaagtgttataacaaaattgattatatattttttatctgtttcatactagaaattaatctttatattaaaaaaatcgatgaaaattgaatttaaagtatatttttaaccatttaaaaaatacataatttgaagggtaaataccattttggannnnnnnnnnnnnnaaagttaccaattggaccctgtgttttgttaaatgacaa

SEQ ID NO: 69378 - DNA, 961 bp, Cannabis sativa
tactacttcttcccatgccctaagaagctatactagttttcttttaattttatatggagaaagtccatgtatggagatcatcattggactaggtttattaattaaatccattttaatttgacttttgagtattatgtttcattagacgcattaataataattaaacttaattataaaaaggaaaagagtatatagaaataggaaaacagtatagtatcaagaccaaaattagctatatctacacatataaaatatgtatatatatatgtaagtgttatatacgtacgtacgtacacatgaagtagttattttttcttcatatcagaatatggagtagtgtagcattgcaagaaaggaagagataatctgcatcccaaggtctagaaaatattcattttattaacaaaatatatatatgttaatttgatggtctaaacctcaggatgcagattatccagtcctcactcaacattagaaatatatatcaaatcaatttgaggaaaaaagaagagaaaaaatgattattattattatatttttcagtatataatatataagtataagcttcttgcatggtaaggaattgtaggttgagggcttatatatataatatggtaggaatattaattaatgggggaatatatatatattttatatatctatatagccaaataataaaatgatcatttatagcatataatggaggaataaataagacatgtatatacatatatatagcatattcaataaataataataaggttctctccaatgatattgttcttcccttagccaatcatatgtataatagggacatttctttaattaagaagaattagatgatgatatatatgttactctaaacttttttgggaattttattttgacattttctttttgcctagctagatagttatatattgagaataaaaaatccatctttttttttttctttttgaaa

SEQ ID NO: 69379 - DNA, 992 bp, Cannabis sativa
acggtttaaaaccgtcgcctataggcgacggttttaaaccgtggcccatactattttcccgacagttttggaccgtcgttaattttatccagttttcgtgacgctcgtataggcaacggttttatgaactgtcgggaattctttggccgacagtgtaaaaccgacgggaattgggaattttttagtagtgtaggccgcaagaggtataatatttatgttctaagagaagttttgatttagttagtgctatggttttgagtgagggtttgagtgtttttgctctaattttttgtagtattatatttctttccatgatattagatgttatgctggggttttttgttttaggtttggaagaaatctaaagtttctaccaaatcgaaatataattatttagtggcttaatttttctagacttgactttcaatgagtcaaagccacctagaatatttcctgttattatcttggattgcatgatattttattttttattttttatttttatttttacgaagtgtgttaaaaaatgagcaagatgtgatttttacaaaatgcatggttaaaactattttctgaatttttagcagaccaatgtttttataatagagttttggaatttttagcagactaacttgaaaatttaggaaaaattaaagtaaaaagattagagttttattctccacggattggtacatatagttgtgtaaagttagggcaaaaatttatttttgtacaacatgtctttcttgcttgtaaaaatggttttgtgtacctacacctgtctaaatgagttgaaaatttgcataaagttaacttttgaaatattataatcccagtaaaattttcaaagaattcggcttcatagatatttaattatgatattttttaaaaaagagggtttaacttcttaacttttgacgagaaaaaataaattaaaaataggattttaattatcaaagttacatagatggtattttctgaaagattgtgaa

SEQ ID NO: 69380 - DNA, 751 bp, Cannabis sativa
ttttttttttttttaaatatggttaattgtttgcaattggagtagtcatatttgccttcacaaaccccaagtggactaagaaggttaagagaagaagaattggaaaccctaagagggaatgggagaggagaacgtaaatttttcgaacgaatttatgattacgatgtatacaatgatcttggtgatcctgataagagtgaagatctcaaaaggcctgttcttggtggtaaaaatcgcccttttcctagacgttgtaggaccggacgtcctcccactcaaagaggtaattacataaaattaaagttgaatgattagagttaattatatttttcttcttaaactttgacatgtataaaattgtacctttgagtttttcaagatgttaaaaaaatctccctaaactactgaaatattttatttatttaatttttatgtgtgatacagatccattgtctgagcaaccaagtaggactatatatgtccctcgagatgaaacattctcagaaataaaacaactgacatttcaagcaaagacaatatattcaggtctccatgccttggttccttctcttcaaacagttttgactgattcttcacttggattcccttattttagggccattgattctctcttcgataatggcctaaaactacctccgtctactaaccaaggacttctcaaaaacattttacctcgactagtaaagactgtttctgatgctaatgaggctttgcaattcgaaattccaga

SEQ ID NO: 69381 - DNA, 820 bp, Cannabis sativa
agtaatcacgagcaccacctcaataacaatgctcctcctctcaatcacttttaaagtcagttgttgcggtgaatctcatatatttacacaccattgcaaatcgcaatagtctaaaacgccacgtgttacatctaagaaggattacgagcggtacggtgtacacatgtctattgaacagagaaaaatacacagatactcctcaatggcatagattttaaagacatcttagacatgaggttttgcacatgaatcgtattaattgagtataaatcttggcaacaaaaactaattatatatattaaaattagataagtaagaacatctaatggttaaattttaaaaaatatttagtaagatgaatattttaaagaaataaatattattctaaaaatttgtattaatatcatattatagtattaactagtaaacaacctgcgcttcacggttgatgtttcaaaaatttaaaattatatatataaaataaattatttatttcatttaatgataattaagtaataaaattacattaaattttaatattattaatttttcatataaatttctttaaaaaatataaaaaaattagatgtaaaatcaagttaacccaacccaactatttagaatttgagctttatatatgtgcattatttaagataataatagagtttgtagcgacaataacgaaatctgttaccgtctcatactttagttttatatatacatatagacaaattaataaaattatttttaattaatagtgttatttatagagattttaaaatgctatgtcatcgtcttatatctcttatatatatatata

SEQ ID NO: 69382 - DNA, 684 bp, Cannabis sativa
  modified_base (614)..(637): a, c, t, g, unknown or other
aaaaaaaaaaaactctatgtattctttccctatgccacttcttgtcgagacccaagagttgttcttgtacaatatgctttcgatggcatttctcctatttcttattatggcagagataaagaaaagctgtgagcatttacctccatctttaatctaggtaatccaggaggcacgagctctttgttgtcagtagacagctttatgattaagaacttcattgagagcattccgaacctctacttcttggccccaaacacgagatcccataggcaagcattgtaattgaacaagctgttgttcaagcttcttgatattaagttccatcttaccaaactgttcctaattccatttgctaagaactacccgagtagcgcacactctcttaaagactcaggcaggggtccaaaagtgattggtagacccccacgcattttccacgaccaaagagctccacgggtctcttgtctagtaagcttcaaaatggaactaacgagtgatcttggcatcgcttccccgaaagaacacacataacgacctatggttttagttgcaagtgtggagagacttaataatagctttgggaaacaactgcatgttgggaatattttaccagnnnnnnnnnnnnnnnnnnnnnnnnttgattaacatcctaaatatgaacatctctaaaacaatgaaattaaa

SEQ ID NO: 69383 - DNA, 1195 bp, Cannabis sativa
aaaataactatgtctaattaaatggaaagtggtgtaccagcttataagtacaagtttctatactgaataaagaactcaataagttcaaataacatttgtgacaaaataaggatgattcaacaaaaagtaaataagctagtttcgaaatttgccacagctgcgaggcacctcaatgccttatagaatatgctactcatcagctttcataaatctcaacttaaaataatgatatagttccacatgtaactcatgattttagaattctcttatcactgtttaatgttgaaagaatcgattttcaaaaggtattagtatgaagtaacatattgtacttttctaactaaaattcctttcagcaagtaaaattgttctatcacaatcacttactaagtatctaaacagagaaaccaagagcaatgggtgatttctcaacattttatgaatatcaataccaaaagaagcaatggaagtacctattaccaaaccaatcacatatgacatatatggcagaacaataaacacaatactaagacaatggtcatggtaacttgccaaaaaataaatgacagtgtgatgcccatgcaatcatattaaaaatacacaaacaactaaaaaatacaaaagaagcagtgtaatttctttagtaaagaaatttaggcgaaaaaataaagtatcccttatttcaataatccttaaaaagtagcatctgctttcttaataatctaaaaaactggaatcaaaatttaagtgttttgagttgaaacccagaggtggacttaaaggggtttccatccattgacatagttgaatcaatcaatccaataatccaacaagaaagataatttagtacctctcgattatcagtgaccttcaaaaccaattttccatcacaatgtctgtatttcatcacatatcgtgtctacatcaatttggaaaaagggaaaaaaataaacaatattaacattaacataaattggagcattgtattcataaagagagatggaattcgtgagaaaacaaactgacagattcaggatcggcacggaacatttgtagagatcggtcagcgaactcgtcccaagaagttatataaaccattctgtcttcgaaataataatctaacaagaatctgaagaagaagcaaatcaatgcattatcagatgataattagtattgtaagatcagaattcgaaaa

SEQ ID NO: 69384 - DNA, 1915 bp, Cannabis sativa
  modified_base (1878)..(1878): a, c, t, g, unknown or other
gaccttggctaagtccacttccttttgaacaaatgcctcctgagaatgtaagagttggccttgagcttagttaagttagtcctgggcttgggtaagataatctcggtcttgttgaagttgatcctgagcaagatgcaactcctcctccaacctaggtgatttctttaattctcactcccatagattcttctcctccaataggtaatcctcgagctcctcgacctcctctccatcctgctttaatttagccatggccttactaggacctccaaaagttgtgacctcataaccttggtcaataaggtttttggccaagcatcctaccaaagttgaagcatgtccgaaacaaaagtcaggaaatgtgggacaagagaaataaaaaagaaaggaagacaaagatttggacaagggtcttactgaagccagttgatttcttaagtctcaagcctgagtggggaatttaactatctctaccgcaatggaacttttcatttcagtgtccaagggagctaagtccaaacaaacgtaatccttaaaccagttggtcatggtatctatgttgagatcatacaccttcccagagtattacctacaaagtttgctatctaacgcctatctaaacacttggttagtaaggaagtctcaacttctccttttgacatttcctccaaggcaaagttatgccttaaatttctcaacttcctatgagcatagttaggtggacatgcattagtggaatgggggggacctctggcatctgagtctcctaacaaggaatccctaagctggaaacccttccaaactaagccttatacatgtagcccttagagcaatacctctttaatgagctaggtttatttggagaggagtgcttcttgtgcttggaagttttgctttcaaagggaacaatcgcctcctccactaggatcacctcttttgctcttacatcgactggatggaccccttggggttacaataacgttcgggatttgcacaattagcccaagctctaaatctactgcatccattgcattttccatgtcaaacatcttaaacatctattgagccatgggatctgcaatacaagagaagtgttagagacgtaatttaaaaaaaatagacatggaaaagtttaatagaagttgtaaaatgaaaaatggttagaaaaagagggtagtccttacctcgatgccctatttcatcttttacaaaggcataatcatacttctagaggcatcgtcctcgagagagctatcgaaggtaagaaaccaactgaaataatgtgagaagtgacatccagagggattaggattagaggctctgattgcatatgggacttgcctaataaattccctaagtaaatatttgtttacccccaaacgggatcgcgacatgtgtagcttatggagccactcatcaaatctagtagatataacttagcatattcccaaactgggggtgcataaattatagataaaagagacttactggtaccagtagcactggcttcgggaccctccatgttaggtaagggaacaatcgagaccaggcggggagcacctaatttcttggctactttctgggcatccttacaatttgcaacactttaaacatgagacacctgatcctcctcctcgtaaagcctctgttaggctttgtacttcctctccaccttggcaatataggccttcatgtcatcatcttctttcgttttgtccttaacattcagacagatgagttcagagaggtcaacatcctcgattgtttgaggagccactaagatactaattttcaaactatgggcagtagtgaccaagtcaccaacattaagttttttgtaatatcccaataagtctaatggtaaataattagggtttntatttatattatgagttaatcaggtaataagtgggat

SEQ ID NO: 69385 - DNA, 5113 bp, Cannabis sativa
tgtgaccctctagtaagtagcgttaatggttaagcaatctgtcaaaagataaaggaaaaccatcactaaccgttctgtaccgaatatccataccagcctcgcgtgcccgagcgaagatgtctacgacattgttatctatgtcgttttgggaggtgctggagagagacttagttatatgatggtggatcacttgcgtgttgacgaaggtgatggtgaaccccttagatgctagcttgattgccaaatgcacggctgggataacatggccttgtaggggaatgggaaaaacaatggcgtgtaggggttttggggctgtggtagtctccttcgcctccattgcagctcccttctatcttatatgtaatatatacacttataaacgcttatagatatatagtatatataatagtccaggctgtaaagagaagaagagttagttagtggttctaactaactttctgttgtttgttgtttcctgtaactaacttctgttgcattcttattttttctattgcttgctttcttctcttgtacatatactcaagccattggcttcataaatcaatatacagaaattcttttctctgtcttcaattactttacatggtatcagagctgattctttctttccttttttctttcgttctgtttttctgcaacttgagctttcgttcatggctaacaatggaggttcgtctccaagtactggttctaatcttcccagatcgtctcctgtcacattctctcattcactttcagttcggctagatgaacacaactatctcccttggcgacatcaggtgtttgctgcaatcaaaggaagtcgactccagcatcatcttgatccaacaaaaactcctcgaaaatttctcactaatgacgatcggcaacaaaatcgtctctctgcagaatttgaatcttgggatcaacaagacagtatactagtctcttggcttctatcatcaatgtctgaaaagatactcacacgcatggttgggtgtgaatcggctgctcacatttgggacacacttcgtacctactacactgccttaaacagagctaatgttggcaagtacaaaactcaactcagaaatttgaagatgaagggttctcttaatgatttcttgctaaaaatcaagactcttgtagatcttcttgcctccattggccatcccatgtcaactcaagatcacattgaagccattcttaatggtctttcaagtgaatacaatgtctttgtaacctctgttaatactcgattggatacctactcggttgcagaaattgaagcactcctcatggctcaagaagtgcgattagagaaagattctgaagatctagacattgctaaaccagaagcaaatctggctcatacaaaacctttcacaggaggcagaggtactttctccactcattactatccatcttctaacactccacatcactcttccatgtacaggggtcctcctggttcattttctttcaataatccccctcctggcttcagtaatcaaatgaactttggtcagtctcgaggccttcctactggtcgtggccaaatgcaatccaacagaggtggtagtgtccaaaaccgtggtcagtattcagcttggggccacaaggttcaatgccaattgtgccacaagatgggtcacacggtccaaaagtgtttctacaggtttgataaatcgtttacaggtccagaaacttttcaaagttttaatggtagtgctaatcttgctgaatgctcccatctatatccctctcctgaagttgtgcaagataacagttggtaccctgactctggagccactcaccatctcactcccaatgcccacaatctgagttacaccactgaatatactggggatcaacagattcatatgggggatggcactggacttaacatccaaaacattggtaagacttttattctttctccctttcattcccatcagcttgtattaaacaatctcctacatgttcctcacataaccaaaaaccttcttagtgtgtctcagtttgccaaagataacaatgtctattttgagtttcatccttctcactgttgtgtcaaagatcaggtcactctgaagaccttgttggttgggaagcttgatcaaggtctctacaaatttgactctctccaacttcaaagtcttgccactaccaaaagcagcattctttcccaatccgagtcttccacatcaacttcttccaaccataaagatcaatgtaataatactgtcatacctctaagaaactctcaattctctctatggcacaataaactaggtcatcctagtgctaagattgttcaaagtgccttatcttcatgtaatatcacattaaataataaaactgatgctcatttttctgatctgtgtgcttcttgcagtttaggaaaacttcataaattccctttttctaattccactactgaatataatgaacctttacagctattgcattcagatttgtggggtcctgcccctatagtctcttctagtggctataaatattatatcagttttattgatgcctatgaataggcatacttggatttacatgttaagaactaaatgtgaggccttaccaacctttgtcacttttaaagctcaagttgagttacaacttggatacaaaattaaaaagctacaatctgattggggtggggagtatcaagcttttaccaaacttttaaatgaacatgggattattcacaaactgtcatgtcctcacacacatgaacaaaatggtgttgctgaacgcaaacacaggcacattgtggagagtggtttaaccttgttagctcaagcatccttacctttaaaatattgggatgaagcatatcgtactgctgtctttcttataaaccgaatgcctactcccaaattaaaacttagcacacctttggaaacactttttcatgtcaaacctgattactcaatgctaagagtctttggatgcttgtgttatcctaatcttagaccttataatagagttaaactcaattataggtctactccgtgtgtttttcttgggtatagcttgtcccataaatggtacaagtgtctatcaaaagagggtaggttatatgtatcacgtgatgttttatttgatgagcacatattcccattttcctatgctgcatattcatctaaaaacactcatcttcctacaccattacctactgttgtacctctccttacccaaaataatatacaaagtcctcctactgtaccagctacaccgttccctactcctacttctcatgttcattcacctcataccaactttaccatttcacctactgtaccaactgttgtaccttctgcacaacaagacacgctacccactgtaccaactgtccttgaatccccttctcagcacggttctatacagcctcaccctgctgtatcatgtcagcaacctacacataccacacaacctattgctacagctgacaccaccacattacctgctgctactgtaccagattctcacactactccaacggtccaaaatgaccatgctatgtgtacaagaggtaagtcaggcattagaaaaccaagagttctaatggcctctctttatcctaagacagttcgtgcagctatgcagaatgaaaaatggcttaaagccatggatgtggaacgggttgcactactcaaaaataaaacttggattcttgtcaatctacctgaaggaagagaacctataggctgcaaatgggtctacagaataaaagaagatgaagaaggcaatgtcattcaatacaaagcaagattagtggcaaaaggttatcatcaacaagaagggtatgatttcaatgaaacctttagtccagttattaaacctgtcactattagaattgtgttaactattgctcttacaaaaggatggattgtaaggcaattagatgttaataatgcatttctaaaaggtgatttgcatgaagaaatctatatgatgcagccacctgggtttattgatcctactgctcctaacaaagtttgcaaacttcaaaaggctatctatggtcttaagcaagccccaagagcctggtttgacaaattatcttctgttttacttgctctaggctttgcttctgcaaaaactgaccattctttgtttgtcaaaatagattcatcttgctgcttgtatgttttggtctatgtggatgatattttgatcacaggttcaagttcaacccaagtttcctctttgatcaccaagctgcatcagtcttttgctcttaaagatcttggcactttaaattactttcttggcataaaagctttgtcaacagatacaggcatgattttgtctaaaaagaaatacatacaagatttattgtgtaaagctgaaatgcaaggtgctaaaacacatagtactcctatgaatagtggactcaaactatctaactatggcagtgatcctgtgcttgatcctactcattataggtccattgtgggagcactacaatatgccacaatcactagacctgacattgcttttagtgtcaacaaagtatgccagtttatgcataatcctcttcaatctcattgggtggctgttaagaggattctaaggtacttggcaggtactcttgactatggccttcaccttcaaaaagtctcaaattttcaccttgaagcctactgtgatgcggactgggcagctgatcctgatgatagaagatccacaacaggtttttgtgtcttccttggtgaaaatattatctcttggcagtcaaagaagcaacccaccatctcgagatcatccacagaagcagagtttagaagccttgctgctgtggtatccgaaatcacttggatacagtctctattgtctgaacttcatgtgcctactgtatcttctcctatgatctggtgtgacaacatcagttctgttatgctggctgccaacccgattcttcatgccagaacaaaacatatagaaattgatctatattttgttcgtgacaaagttcttagcaaggccatccaagttcaacatgtcccagctgaacatcagcttgctgattgtctcacaaagcccatctcaagcagtcgatttccactcttaagaagcaaactcagtgtctctt

SEQ ID NO: 69386 - DNA, 911 bp, Cannabis sativa
tgggcctaagcaatatctaataacagttgtgaaattttggcgctcctgtccatgagagtttgaaactttcactctagacaaatcacgaaaaactccatctctttagtattattctatataccaataaaacaggcctttttttctttctaaactaatgaaaaaaaaaaacttacacgataattataaattgactaaaaattattgggtggttttataatgcactcccttaagagggatgtactgatgcactctctatttatttcaacatctagaaaaaaaaatttattctaatttttttttcatatttatgtacattatagctattaagatatcgtaaaaatttttaggaaatttgcaatcatttacaatatagaaaacaatattcaaacagtctacactgcttgaacgtaatttttggcgtgttaaattttttcgaatttcttaaaattttgcaggatgtcttaaataagtataataacttctttaaaatttatatattatttaattataagatcagatattttaatattgggtatattttaaattaaaagatagcattacccttttaatttgaaatattatattaaaattatcttataggatatattaaataattataaatattttaaaattaacctagatatttttatagacattctaaccataatatttttcaaatttaaaatttgttattttattaaatatttaattattaataatttataagtgagaaaaatgatattttatatcattttacttatcagaagtttataaatagtattttaaatatctaaataacctatacatttttgtaaaaaattaaaataggcttaatttgagatattttgatatataatttgaaaaattattattttttattattttaatcttaaaatgataattgtctaacc

SEQ ID NO: 69387 - DNA, 1245 bp, Cannabis sativa
  modified_base (1115)..(1116): a, c, t, g, unknown or other
cgtacatctctaattgatacctataaacaacacaacaaaacaacattataagaataaaaataaaaaaaccttactttagccacacacacacacacacaaaaaaaaaaaaactaataaagtgcatatttaagtaaaaaaacgttgaacgaaaccttctagggttgatggagggtttaggagaaacatgggaattgagttgcagaaaatgatcatcacaatcattaagagttttctggttctgggtttggtttggtgactccattagcagtacagggtaaataagtgaagaagaagaacatgtaaagctaaacgcttttataggaaaataaaaatggttactttattttccactttacgaaaaggtttttttttttttaagaattttttagggataatttcaataaaacacaaaaataaaaaagaattatttggcttataaatatttaattttaattttcgattgtaaataaatatgtaagtttaattttttgcgcaagttatatttctgacacttggttgttattttttattagtatattttaattatttttttaaaaaaaaaataaaaaatttatgatatagaccaattacaaattatcacgtggcaatttacttaagtatttatttgtaagctagagtaaatttaagtatttatgtcgtaaattactcaataaaaaataaaacattataaaaatacggttgtacaaaattttaaatattttttatggtttttaagattttatttacataaaataaagttttttgatatatttttatattgtactcttgttattttattcttgattttttgttatttgtatatattctttacgttgtttttcagttactttcatgtgattttcttgtattttataaaataccgtaaaaatatacaaaaaaaactttcaatgtaaaagtgtaaatattttactaaaaataatagtttattatgcaatttttccaatttttttatgtggcttatttagatcatttcagtgtaaattttgtgttaaatttgacttagaaaataagttaagtttatatttggcccaaattttataattgtgttctgtattatgggtaaaatatgttgagttttgtgtcctaaataaaanncatttcaatataatcagatttatgaattattaaagatcagaaactacattttatgttgcatgtttacatgatttatttcatgattatttaatgtataaattctattaagtccataacatatataaatat

SEQ ID NO: 69388 - DNA, 889 bp, Cannabis sativa
tagtagcaaaataactacaattgttaaagcataagaagtaaatttacctcataaagtaggtgtttcattttttcacttatcaatttactctcatctctcaatgccaaactaatggcaggatgcaaccactgagcattaccgagccaactgtcgatagaagggtgacctgcagacacatgacaccaccacacgggccctgcaggacgctcccaatagggagcagctaactctgcaacagtgaagttgtattcatcatccatcgaatcgagcagctgagatgcccaaccatcatcaacttgtacggtctgtacaagctcggaaatcctactccatcctataggtacccaatggctaccaacatcatatttttcaaagctttgaacttgtcctggctgacgaaccgggctacctctatcgtcatcaaaggaaggaacactactggctctttgctcagtccttgactgattatcgccattgatgtgttgtctattcggggttttagaaccgggtttggggttggttgatttattatggcctcgaataaattcaaaagcacaaattaatccatcattccagagttcatttccaggcatggtattggtatccctacttggataaattctatggctttcgggtttagttgttctatttcctagcaaataagttttgttatcaactgtgaaaccctggttgtgtttcattcaagcatgaatataaagatcaaatgagtctcaaaaggatcaaactggattataacccgaccaaactgaccgatgtaagaactgaccatcataaatataagagaaaagaagtgactaaattagctataatggcatcataaatggtccaacaccaaagataagctacaaaaatgtcatcttttcatccc

SEQ ID NO: 69389 - DNA, 1068 bp, Cannabis sativa
tttatttaggccataaaacccaacaaactcacccccctctctaaatacgattgttgcttctctgttaatcatactgatgtagcttgtgagaggattaaggagaagagtaccagggatatggttgtaagtagtggttccgttggacgtgagctcggaggtggtgcgatggtagtgtgcctggcgaaatcgctgattccacttctggagaaaggtgtgattcctccgaccatgggagcgggtccgttaacctgtgctgaagcctcgagatctatgcgttgccggtctttgaggggacagagagaaggtctggtacaatcggcgtggcgtccgaaggcgactggcgatgagattgtgactgttcctcatttgggtgtccattccctttcacccaagctgaatattggaaagccttctgaaacttttcctttaaaagagaccattttgaatttggttgggattgacgaggctaacgttgaggatagcttgaggtgtcaaaagaatagggtcaatcggttgacccctactattgaccacgtggcatgtgagaaagagggcccggtccatttaaattccttcaataagtcttgtgggcctcctatgttggcaaataatgagccgcttgctccaagttatgggctgggagttaataccaatattaattctaatggcaagttattttctaggctttatgatataggctgcgggagtggtgttaagaccattgaaaggaaggttggtgggccggggcctattagtgttgggccggttcataacagtgatttgataattacgcctatggctattattgccaaggaaaaagaggataacaacatctctagtacctcagttttgggacaggactactatgagcaccttgatgaaaaaagagctcttacaaaattctttcaagctcaagaaggctatctccatgaactggcggagtttgcttctcatggccctattaaaagaaaagcgggtctttgtgacattggggttcaaccatcttcagaaactaatgagagaaccactccggtgaagaagcgaagactagatgttgagtctcactca

SEQ ID NO: 69390 - DNA, 1487 bp, Cannabis sativa
ataagcataacttccatgaagattttaaataagttacctcccccgaactgactccctcaaatggaacaatcatttcaacttcttttccacaaacttcagcctgcttggctatcacgctggagtctgttcctgtagcccaaaatattgtggagtcgtctttcacatacattaccttctcaaagtggaaaaattgccaatttagttggaagtaatataatgacaaaggaaaataaataatacatgtatcaatagttaatagatcatttgtggaagtactaaaataaaggtttagtccagagaaagcttatgaaaatgaaaagcattgatccaacttttcaacttcctctagtgctgtgctagaaaattgaatatcacatgcataacatggagtgcaggcatatgccttttttgaaactagtgcaccaaatatgtaaaaatttaaacccacttttttttaaatatttacacatatatataataaatcttgtgaaaagtcttaacagaataccttaatttcacaactacccaaatagtcatacttcacattgtctggtgtacactcgtaaagatggaaccgtaaagttccatattcttcatgtaaaaccatattaaacgtcgaatcccatctaggagatgacccagatcttgcactggttctcctagtcaaatcttcaagctctacctcaacaaatgtctgcaaatctcgattaactaattgctcttctgaacttttatcatgacaattatcttgcttttttgaggggcttcctctcaggctacttcttaaaagtctatttcctgaaataactgttacatatataattccaccaacagccttcttctgtaagtccactgctggcaatgagaaacaacgacggcgaggttcaaccattgttttcactaaggtttcagtaaaaatcttaacctaaaagagaaagaaagaaagtgtttaaatgtttagtgagatatgctatatgagaagctagatttgcaagttgataatcaaaatatggaaacactagagaaaaatatgaaagcacgatcatttttgaaggcaggtgtaccaccatggtgatgcataggaaaaactagtaagaataagtggtaagttacaaacatgaataatacatcgggctgagattatttgaatttttgttgacaaatttttcttaaaggtattttgaaaaattataaactaaatttaaaaataattagctgctttatcatcatttctaataaagtatttctgaactagcagctaatcatatagcctttatagcatgttcttaatttctatatgcttaagaatcataccagccaagaattgacaccggggagctcagttgcaggtaatgattggcttccaccactcccaaaggcaactccaattctcacttcaggagctgctataaatgagtacaaaactgctttcccatcaagaattgggatcaggagaagctgtaagatcaattttgaaataagtaaca

SEQ ID NO: 69391 - DNA, 4484 bp, Cannabis sativa
  modified_base (222)..(225): a, c, t, g, unknown or other
  modified_base (1933)..(1944): a, c, t, g, unknown or other
tctctctctctctctctcatgctcaacccctttctctctctcacacggtctcactcttactctctcactctctttccccatcaacggtgaccagacccagcagcttgagtgcctcccttcgattgtcagaccgaacctaacaaccaccatcatccctttccacccggattgagcccagcagcccccaactgcctggtaagtgttctctctctctctctctcnnnntctctctctctctctcaatttcattttgttttgttttcttttctaagtgttgatgtcaacgagagtgatattattttggatctaataattttcttttcaataaatagaaatgatattgttatagattttaatattattgtttctattgtatttatttatggatttattgtattttaagaatttgagtttgttatttctgggtccttattttagaattgacttagaaaggtttgtggctacatttgttttttagggttacgccggtgcaaaatcgacgctaataaaaaaattacattaaattttattttgttattagcgttgatgtatagccgacaaaagtactctattagcgtcaatcgagaattgatgcaaatgttatcttttagcatcagttatagcaactaaaataataaatttatttgtcggttcaaaaaattgatgctaatggagctttttgtagtagtgattgataatttctattatttttatttttcaaaagaaatataggagagaatttgatcaatttaatttttcctacaattattttggggtaatagtaaaatattttagtttaacaaaaaaatgttttaatgatatatatgcacccatatcatagaaagacaatagggggtaatcgtttttgtcaattttgttaaatgatgaataaaatatatttaaaaattttattaacagtaaaataaatataccatacagttcttctttatacttttgtaattttttcaaattcagtctttttaatttatatctgtatattttctttacaaaattcgaagcactttttaaaattccacaagaaaaaaaaaaagatggacacttacttgtagggattaattatttatattgaaaataaaaaatgaagtgattggagtgttcaatcgagcaagaaaaggcaattatatcttcatatatttatgttgaaaaatgagaaaaaaaaggatatttcttcagattttgttgtgcttttctatctaatcatatatacaataataagaaccagagagacaatgctcactatattagtaggttgatgttacgtgtattatcgtacagttagttttctttttaattaaatttaattaagtgatgttaagtgcaatacatatatgtttaaattttttaattaagtaatgtattttttttaatttttaaaataagttttaagattttgatctttaagatttttttttagttattgcggctacattggtgattggtgtgctctttagatgtaattatatatacgtgttttatatatacaataaaagaatgaattttattgttatacgtattttatattgatctctatacataaagattatattagagaatattgtgataaaatttgagtttgattagaaaattaattactttcaaaatacattttatatattatgtatccaagcatatatttaaaaaaaaaataatgatagtgatagatacattcttataatttatagttaggagagtgtggttataataaagtgtacaaattattaaaaacatatatatatatcattaattattttttttttaacaatatcattaatcatttttaaaataaaaaatttgtcgtgaatttaaagtttaaatatatatattttatatatagatatagtttttatgattaaatatatataataaaattaatttctttatatattgcataatttttatttttaaatatatnnnnnnnnnnnntaaaattaataaagaatattatgttaagtaattgagatattctgttaaagttaacgtagagaacctaaaaccaccgttaaacaaaaaattctgttacatagccacattttatatagaatagatatatgagatttttgccaccaattgttgagttaccgtctcatcttctttttctaatttcttttttcatatcatatatctgttctcccattttcttttctttttctaggtataaattgttatagtgttttctctccttgtcttgttaaatcttcgtgtttgattttttttctctacagatcaatggataatttgttctgtacatggtttcattaaaatccctcatgtattttgtttatttttgaaatcaacaactttacatggtacaagattaatcataaaatagtattttcctgaaattcatacaatttatcataaataatatttttctaaagacattgagatttaagtatttggtaccacccttccattgttgacttattttagagtatatccttctcttcttaagacttcatggatttgataaggtccatctcagagtgactcgagcttcttggggtctttggttgctttttaacacattcaccaactcaagaggttcttaggttgactcaagctcggtaaggcttctctatcgctcttaagtacttgacttgtcttagttgtgtgatttttcatacttcctctagcaaatcaagattatgagaaatatgaacatgattttaatattcgtcttctgaaatttcacttcacagggtcggtacgcctatctctgttggaattatagcttccatcccatataccatagtaaacgatgtttctcttgtctgagttcattttgtagttctgtatgaacgcaaaccctttggaagatcttctaaccattttgccttattgtcctccaagtctttctatatgttattgaaaatagtcttattagttgtctcgacctgcctattcccttgtgaatatgtgacaagagagaagcttagtttaatattcagggtgtcaaaaagctctttaatttttttatttcaaaagggaaagccactatttgttacaaattcatgtggaattctgaattcataaattatgtgtttccaaataaaggctagggtttctaccttcgagactataacatatacttctattaccacctatttagtgaaatagtcacttgctaggagcacatatctttttacatctacaactcgaggtagctctccaactacatccattccccattttgcaaaaggccatggagctaccacactatttaacacttgtgttggtctatggatggctggagcatggcattggcatatgtcacatctttttgtataaaatgtggcatccaccatcatgtatggcccacaataccatgttgtcaatgccttatgagtcaggcttctttctctaaataattaccacacattccttcatggatatcaataaacaatcactaagcttattctggccttaagcatcgcaagtatgggccattaaaggatttataatataattttcctgccaggatgacatatcttgttactttatcttcaagtgttttcctcttctttatcctctgagatttctcctttatcgacataagtaaacattggatccatctagcatggtttcgactcttctatctgaagggcttgataaggttgcaactgcttcccgaggtcacttgagaccttcaaatgaattcctgctagtgtatttgagtgaagctcttttcgtgagcttatatgccctttggttcatttctcttggtaccccttgtatctcgaactctaaaagaacagataagctcatctgcctttatctctcacacttttctctttttcaccttccaagtgctttaggtatgttgcgagagccttctaattgatatttctcttcttctccagcgatctcttttatcactgcattgaccttcctcatcagagtacaatatttcttagcctatttttgacatcctttaatgtcgactatgtgagtcccattgggagatgggcatcttaagatctgaagaagactggatgctacaccctgcattcgatacaaccatcctcttcccattattgtgttgtagctcgatacaactttgattatgattgttgaccgggatttttggcaaccaatcaaatgatataataaggagagctatgaaagcattaatgcaggtggtttttacgtggttcaggcattaatgagtcgtagtacacgagtctttgttatttatgagagttcttatacaaagaatgttctaggtgagtctctctctcttttttactctctttgattcaataatccctccagcgatccctttccattctgttttttggggtatttatagagtttttgggagaatcactagaaagggatcacttgtctttaagtgtcaaccccttaggggcacaaattcctagcagatataaaataggacatacatcaccatgctgtaggtatcttagggattaggtgaaagtaatctttatccttccttgatt

SEQ ID NO: 69392 - DNA, 1221 bp, Cannabis sativa
gtggagagggtcttttgaaatggaaaagaagaagaaggtaaggcattttgtagtagtgagtattaatatgtaattagtttgtgtagctcaacccccaacaacgcctcaaccaactactccgaccaattcaacatgattattaaaaggatactttgtccagatcataattttgtccaactgttcatagaaaaaggactgcttatgagttaggttgggcagcttcaagctattttaacgaggagtaagttgaaaaatactcattttattaatcaattaattaaatttacctttaattttatatttatttgaaacatacctctttttatatgtattgtcccaaaataccctgacataaaagaattacataaagagtatctttaagtgacagggaaaaaattggtacaatatttaaaaaaaaggtaaaaatgatagactttaaaaaagagggtaaaaataaaagaggacaatataagaagggtatagagtgtaatttcctcttttaacaacccaattcaattagatgggcctatgaagtttcatatttttttggggaatcttacaaaaatattgagttttgtacaaatatttacaattttattgccacaaggtaaaaattacttatatattgtcttgggtttttttttctttttatattgaacgctgaatattaagaacaatgcttccattttttatacctacgtacaaaaccaccacagcaacacgaacacacttgaaaaaataattattaattctggtgagattgaacaaaaacagtaaaatcaacgtcaaataaataatcatggcaaaataacacttaaataaataaaaaaaacaaaagaaaaaaaagattaaagaaaactaaccatcttttgcaaagcctcgacaccatatgcaataacggctatatttacaagctcagtcttgaaaatgagaatagaaaaactactaaaatcaatctaaatcagcataaaaacaaatgtaaaacaatgaagcggaaataaccacttagaaaaccttaaaagaactacacacctaaaaatcattttgccaatgagctcatcaaatgtatttataagagaatcaaagtaaaaaattacaaaaacaaccataaaaaaaaaaaagaaatatatttatagcctccatcttccacatccacggaccaacctaccataacaatacgagaatacttaggggccagattggtttgtgatttgaaaattg

SEQ ID NO: 69393 - DNA, 2226 bp, Cannabis sativa
aatagctcctaatttcctttccacatttgttatcatgagattttttgacctgtttcgtttgtttcttcctcaacaatgaaaagaaattaaatcatttcaaaagggtatttctctttccctatactggactcaaaatttgatgttattaatataaaggctataaattgtataatctaatctacggaattattttttttttttttgcctctctctctcttaaatttggcgctttttagaatatagataattatatcaaagggaaggtgacaaaaacaaaaataatcttttttttttttgatgaatataaacatacaaaaataatctgaagtccttaatattgattcctttgtgtgattaaataaaataaaagatctagggagcatatcaaacaatttcctattgctggcaaatataagggaaaaaaaaaagcgggctagctagtataggtcattatttttttataatataaatatatatggtcaaaattgctgttgtaatattgtgccaaaggttttaaagaatttctttatttttattatcttcactattccaggccacgcttaaaatgaaacaacaaatctttaagatttcaaaatccttgtgaagacaagtaaaataggggttcccctcataatatgcaccaaacattatcacaattcacttgactattcaaattatgcaaaatatttagtataaattgtaagtattaattaataaaaattgattaaaaaagaaaaccgttctaaaatcaagctaacaccttaattgaaacatgagtaatgtccaatatatagggctttaaaccatgaggaagaaaggttggaattgatatatatgataattatatcttattaataagttggcgatgtttgtaagatttgagataatatttaattaacataaattaaggagcaaaataagcaagtttttgaaagtcaataataatgtacaaaatgatgttcacaatctcttgttcacctatatattaggcttagaaaggtcagaccaagacactgagattgaagacgtgggaccaatagcagctgtatttttgtaccaaacttttggctttataatcagacaacataatttttttaacatattcaagtttttgtagacatttttcatcaacaaatactcacatcactgtttcattttattacaaatagtaagaaacaattatgcatacattgaaatagctctctaatccaattctctgccataacctttccacatggggaatcttattacaaaagtaagcagtatgattatatgatatttaatattttatccaaatgttgagctatgaaaggtgtacctatttttacttaatcaaagccacataaggagaccttcaatagacaacacatagacctcacagtaagctccgtgtgttaagttttgagagctactccttagaggaatcttgtgtatcaaaactttcttggaggtaatgactccaaaggtagactcaaaggcacaaacacagtttggagtctgcaccagagtgagatccacaagtaatacttttccatagtacacgttgttagagactcattatgagtctgttatttatacacttaaatttagttatttgttagctttttgtgttcttgttttggttagcttataactaacttatacttgtatatacactgagcatcttgctcaaatcaataatagaattcatttcagctcattctctctttctctatgttacattctattactctcacatggtatcaaagctctgctcatttttttttatcactagtgttatactcgaaattcagctggcacttcagaggatgacacgtgtcaatcttggagaatacgaatcaacgaatatgatggcaattatattaaaagatactaaatagaataactcatcaaatgcggagattgatagagcatattcataacttgctgactgtatagttataagcgagaccaaaatgtacaaactattaactaatgtattgatgaaaaaccatttcgcatctgaagacacaaagatgacaataataatgcataacgaggcatcaacctcgttatatataaaaagatattgacgagatgtgttggcagtcaaaacacttggcgtatgttatggtgagaattttccacttaaaaattcgagaccaggctcccataaaaatgacatgtcgactcactctcctcgaggagggttgagatgtcaaaaggagacctcttgagtgtgaacct

SEQ ID NO: 69394 - DNA, 669 bp, Cannabis sativa
aatatcttaaataattataacattaacgatcatacaaaaagaaagagatttaaaaatatgctccatgctagaattgtaaggagtgcttgagtgcatgttttataaggtgtaccatagaagttccttgataataaggaaggtttgctttttccttgatttggaataggtagagtgctctcaagtacaagtttattacttgacttgcatgttttcaaaagcttaaaataagagaaaggatgcttaaatttaggtgtattaaggatgtccattttttgcttgtttaattttttagcaacatgttgaaactcatcagcatctttttctaggtgcaagtacagtcactattacaaaaatgatttatatatatatatatatatttttaaacagtcgtttaaagtattcatgtcagtttctataatcgtcgcctatatgaccgtcgcaaaacgggcagaataagcgacggttcaaaataattactaatgtgaaaatcccaaccgtttaaaatcgtcgcctataacagagtagcgcacagttttaaaccgtctcctataccctgttattggcgacgattttaaaccgtgccttatagtactgattacgtttttttattataaaatgttttcttcaacgacaattttttcagtcgttacattagaaaaacaagagaaa

SEQ ID NO: 69395 - DNA, 583 bp, Cannabis sativa
ctgccgttatcggccggtgccgatttttttacgggcgccgagggacctcgtttggcggtgagactgttcctcttcggaagcacctggctgctcatctttgattaggttaggagttggcgatttctggtccggtggaattcaaatatttgaatccctgaaactgaaactgaaactgaaagaggagcctagggtttacgcccagggctcctttgccacttatcgcccttctttctcctgtggtctttacacgaccacttctcatcactatcccaaagggcaatattggcctttcaacatttccccattttattttaaatgaaaaaattatcacttcaaaacaaaaaaaaaaaaaaatagtgttctctagaggttttcataaaatagtccattcattctaatctacaatgcggatatctgcacttgtgcaaattggattagattagaaaattcaaaattcccagatgttgattaacttgtaaaattaaccgatctaatcaaattcacacatatttatataaaaaaaattatatatacaattaagattttaatgtaaagaaaatagttatttaaaagtctaatacat

SEQ ID NO: 69396 - DNA, 937 bp, Cannabis sativa
taaactcgaaaattatcatgtatatttaatttcataattgagcggcaaatacacgcgacgcagagacaaaatactgctcgctagacgtggaagccaacttatctacttaacttaacccatataacagtctaattgtacatgacacgtggcgtaattatagtgcgtggttaggcaccgcctcgggatcctaatacgtccacctgtacacccgacaggtcgagtggatgaagtgggtggctcacgtgaccgtaacgccacgtgtcgataaatgagcctaatcacatgttcgagaacacttccctacgtgattcgttggccaaaattttttttgcctagttggaggccactacgtcagtctacccaataaaatagggacacgtagataaaattagcggtgtgattggcggaaattcaaggcggtgaacgcgcgggggccgagtccaagataagaatatctctatatctcccttttgtggctaagtcctctgaacgagggtataattgtaaaaaaaaacactaaacagaattagaaggcttacaacggaaacatactagtagtactcctaatttgaacgcgaccaacggaaaagaataacgaaaattcaaccctcgttttcatatttattttttttaatttagtggatagactatgaaaattcacagatatggatgaaatggctgcttaatatataattattaaaaagaaaaacttgcggctacgctttattaaatatttaaattattattttttagtattataattctatttttttttatatataaaatgatggtgcaagaacttcagggtatttattcttattcattgaatattgtgggtcttgttttcaaatcttacagtcagtcagtcagtcagaagtgatatagttcatgcattattatacagctattttcttgttgttttattttattttgtttt

SEQ ID NO: 69397 - DNA, 4530 bp, Cannabis sativa
ttcccaacatcgtttcgctctgctgttggatcggcacagctcaaactatcatctcctctagttcaggccgaatctcaatcccccatacccaacaacagaccttcaaagtccagaccttcagccagaacaactcgaaaacccaatgactctaccgaacccaccaaatcaccagctcccttcaaatcccccaatctctcagacgccaagaatctcttcaacaccattatcaccaccgcaagatcccctcttgaccagcgattccataactccctcctccaatcctacgcctcaatctccaccatcaacgattcaatctctcttctccgccacatgagcaaaacccatccttccttttcccccgatcgatccacttaccacatattgttaattcagtcctgtaaagcatcggattcttctctcgcccctgttcaccaaaccttaaatctcatggtcaacgacgggtcaaacccagataaagtcaccactgatatcgccgtacgagctctctgttcagtgggtcgaattgaggacgccattgaagttgtaaaagagttatctttgaagcacgcggtacctgatactttcacttataattttctcgttagacaattatgcaaattcaggacacttagtactgtttatgattttatttatgagatgagaactgaatttagtgttaagcctgatcttgttacttatactattttgattgacaatgtatgtaatagcaagaatttaagggaagccactaggttattaggggttttagctgaggaagggtttaagcctgattgtttcctttataatactattatgaaaggttattgtatggtgagtaaagggagtgaggctattggggtttataacaaaatgaaggagaatgggattgagcctgatcttgttacttacaatactttgattttcgggttatcgaaatcgggtagagctaaggaagctaggaagtatttgagtatcatggctgagatgggtcatttccctgatgtagtaacttatacttctttgatgaatgggctatgccgggaaggggatgctttgggggcatttgcgttattggaggaaatggaagacaagggttgttctcctaattcatgtacttataatactttgttatatgggttttgtaagtcaaggtttttggagaaagggattgaattgtataggtcaatgaaagaaggtgggatgcagcttgagacagctgcttatgctgcatttgttaggacactttgcaggcacggtaagattgcagaggcttatgaagttttcgattatgcggttgagagcaaaagtttgactgatgttgttgctttctccacactggaggttacactcaaggggttgaaaaaagctacagaacaaagccatgttatgtaaatggtattttatataaactcttgtttaaagaatttacgaagttcacaacttggtcattatttcatgactttgttattcattttaaaagtttaggtaatcataatttcgaactacttggaaaggctgaaagttagtggttaaacaaagatcaaaatattgttatgatgctatttacttgcttcaaacttaacaagacaggatcatctgacatctaattcataaccttgaacttagttctattcacgagttatgtccatgtcgttgtttgaagccattaatacttgaatattgggtcttttgtaggaacttttttgttttcttaagatgtcaactattgtcttctactccttggtgaaaagatgcagttatatcatatgtgtatgaaaatgccaaaggccaattctgtctagacatgattggagcccagctagctagctgcaaatgcaagtttgcaacaactagaagttgaactgttacaattattttctaatggggcagtgatgggctgcagcagaagcaaaccacaggctttaaggatcatgatccaaaatataaaaagtcttgatgccatgatgatgattaagactactagcacagctgtgaggacactggcactagagacagtaatcactagcatatgattacattggataaactatactccctctcttcacataaaaactgtaagttccatcatattgctcaggcaagttccacctttcactcaaagttgtaaaatcctgtaagattttaagctcttacatttatttctaaaagattcactggttttcatatcttggtttgttagtcccttaaactcatagatgttgactaaaaatgattagcatggaaaaacaatgagaacatgagtatttaggtaccatctctgccgtacaagagttagctttgattgtgtttatgatgaaatttttgcaattaaacaatgtttatgtaagctttgctaggtacaacccccccttctctctagtatgtatgactgactgagatataacataaaggagacaagagaatcatggtttgtgattttggttataaaatgaggcatgtgatgatataaaatgtgaaaagtccttaggatcattagactctctattgtgattcactagatgccaaatatttgctgggtctctcccaccttataagatatatgttactataatatatatatttatatatataaatggatgagaggttagcaacgttttccaagagagatgatattgatatataatataacaagtgtttacttgtctctcttaataaacaattgttatagggttatggctactctgtcattcctaaatgtttatgtggtacactttgattatacggaatttaatgcattggtgtctacaatgaatgaaaatatataaaaactaaagttagaattagtaaatgaatttgtaaagaaaaacaaccatcttggttagttgaaccttgattattcttttacatcaatcctagattcttaaggttagatttttgctaaatcttgtctcaaactttgtcaccatttttttttacattgttttcttttctccttacttcttggtcatctaccttggtaccttgctattgttttataaaaattagttgataatctattgccagcctattgtgattatataaaaaatctttaagggaaatgattggacttttggttatgataaaataatagtagaaataatgattggggaggcaagaaagtatatggctattactacctccacaatgttccttgagaaatatttaaaaaagggtctagtgtcataaccatatagaccaataaaagatttataggctgcaaaattgttggctagaattgtaacaaaggatcttttagaaagaaaggcatggtgacccacattgttaaccctacataattagagcctaaaatcaacttaaactaattctatatatatagtgttgaaatgagttattgttattcaaatttcactttcaattcaagctaagtggtgtctcaaacatggcaagttcatcttcaaaacttggctcacaccaaccttcaaggtcaattagcttgccatctaggctgaatcccaagtcccaagggattgaaacacaattaaacaagctcaaaactcaatgtgatttctcattttcatcaagagaaactcctattggaagtgacacaatccaatctagcttgacttctcttgcagagttgtatgcttctactaaagaactcattcactcaccattaacccaacaagctcttctccaaaaccattcgagacaaacaatggaagagacgctcgacacgtcgattggattattagatgcttgtggcgctgcaagggagttgcttctcggtatgaaagaaaacgttcaatcccttcaatcagcactgcgacgaaaggtggttggagattcgagcatagaaagcaatgtacaaacctacatcaacttcagaaaaaacgctagaaaggaagtttccaagagccttaaagcattgaaaacaatgcaaaagaacaataatctttcttcaatccattttgtacatgaccaaccacttcaaatggttactaaagtgttgagtgagctaagcaatattgctatctcaatctttggtgctatgtttgtgttcttatctatgccaaaaataatcaatggatggtcattgatctcaaagttgatgcctttatcatcagacaaaggacacaagattttcaatgaagtgggcagtgttgatattactctactctctttgcaaacacaaatgagaaagaatgacaccaagattgatgttgagattgtacaaaagagattggagagtgttgatggttgtgttaatgtttttgaagcaagattagattgcttgtttagatgtctcatacaacatagagtgtctcttcttaatcttcttaccccttgagaagagtaatcaccattttgtacatcttgtaactaacttttttttttttttttttgtagtgacaaacaattgtaaaatcagtgaatatattataatgacattcattatttaatctcaatagtctcacttttttcttgtaccatattgattgaatatgtgcgaaaaaaatgtaataaatctataaaagaaatttaaggattcataacattatagaaaattta

SEQ ID NO: 69398 - DNA, 1120 bp, Cannabis sativa
ttgttttatggttagtttaatttaaatttatggtttatgcttatcttggttggtctatttattttgattttctgttttcagcattggatggtttagagtttttttttcacaaattataatatgttcatttgttcttgttggacattaattgatacgatattttatattatcatataatatttgtcaatttattttttgaatttataactatataatattctagcaagtattaccatgaatgaatagtattaagaaaatttacatttttatatttattttttttatctaattaaaaaaaatattatttttacattatataaattgaggttgttctatctctaaaaaaaattaagagaaaaaattaaaaaaaaaattgattttaacttaactattttatatataaatatattttttaattaaataactaattatagaaattaaaaattttattttattatttactattaaaaatctattagtttaaaagttaatatttataattaatgtttctatatatatatggaatacttttcaatactattacttaagtactaaataaatttaactataaatattaattttaattaaattacttaattaagaaaaatatcaaaaaaatactctttttacactatataaaaaatatttaagtgaaactcatctttttttatccttttttttttgcaaaaaaaattatttaattatttatttttcaaccaataaaacaatctcagtccatatactgtaaaaattaaaaaaaaaattaattaaatacaaaaattatgcataaaaactcaaattttcctaaagaattcatcaccaataaaacaaaattaagaagaatgagttctcaatcaagcatcaccaataatagtgtccaatagcaacagtcatttcactactcactggaatctacatcagtcccacctaatgatcaaaactaaagattatcataaaaatctcagtattcatacatataaaaacaatatatgatcaagataaagaaacaaaagtagcgagattcaagcttcgaaagtgaaaaaaatgagaagcagattgaaagtaaacagaatatgaacctcaatgaagatgtagaagaagtggatgcttagaatatgat

SEQ ID NO: 69399 - DNA, 752 bp, Cannabis sativa
taatgatgcttgggacgtcatttttcccgcttctcgtcttgatcatggcgatttttttggttcagatcataggcccctaattctcactttgcatcaaccgaacgatcagcgtaatcatcccccccgcttcatctttgagaagctttggatgtctgaaccggggttcgaggattgcttgcgagatgcttggacgcagacaactcctactgatcattcaaatcctttaaggggtcttcaccaaagattatcaaattgtgcttcacggctcaaacaatggaagcattctttgggtccccggcttgctattcaaatctgggatgttcacacccaactcaaaattgtcaattctcttccccaacctactaatgaccaattaaatcaaggaaggcaacttgaaaacgagttaaatggattattccaaaaagagaaagtctattggcaacagcgctctcgtgtcacatggcttcagcatggtgataaaaacactcgttatttccatcgtgtggcttctatgaggcgcaacaccaataaaatactttccctgcaacgctgggatggctcctgggccactgatacaccatccattttgaccaccattgaacaatatttcactcaactgtttcaaagtcaatcccccgacaacgaggtcatcgagtctgttctctcaggcatttctgaaagacttacccttgctgaaattgagcttatccaggctacattctcggctgctgaaattgagactgctactttcc

SEQ ID NO: 69400 - DNA, 1148 bp, Cannabis sativa
aaaaagaaggtaaaaataaaaaaggacaatataaaaagggtatagagtgtaatttcctcttgattcattgatactctaaaattgtacttagcaatatatacccttttggagtctctcaatcaggactgttttgaaagtttaataatatattgttaagcaatggtattttatacaagtcaacgtttaccttgtgactagtttgtagttgagctccatcatctaaaatttgatccaaaattatgtttgactctccaaatagaataaaaccaagagagttgacttcccttagcatcaatacaagatgatgatcaccaatttctttcattccttttctctcaaattgtcaacttttttattgttatgaaaaaagtacgaaacttctcaggtttttgcattaaaaataataatgaaattcccaaataagaatcttcttctaatgctcgtcttcattatctgccaaccaatttaattgccctaaactcaactcagctcccaacaacttgttttgttgtctttaaggctcaacaacttggtgttgcaccagtgttgaatcataatgcttacatttcaaggatcatcaaattcaatcaaccaacttcatcgtcaatgagtgtatttaaatatttctagttcaaccacttcttcaagcaccagtttttgcctcttacaaagctatctcactctcttatatatttatattcaatgacacgtgtaacaatactatattaattaatatgaaaaattaatttagtagactcgtaaatcatcgtttcataaacatatatctatttcagtgtttaagggagttaaattttttagtttatttctttttaaaatcacatatattgtaattattaaagattattttgaaattttatgaatagtttatattacaaaaaataaaatttaaacaattataagaaaaataatcgcgcgtgtaacaaaatatgtaaatttaattttcgatattataaattatttaaatttttttaaaaatttacacgtaattataaataattataacgtacactatcataccaaaaaaattcaatttaaaaattctcatatgaaaatctaccgaaacttaatttttctttaaaagtacactgtacacttgccttataatatatactcaaattccgtttctt

SEQ ID NO: 69401 - DNA, 1854 bp, Cannabis sativa
gttcagagcgctgagtcgtcgtcaggtaacggcgttgttttgtctccttcttctccggtgaatcacaagaaaacgggccttattcttgggctttcgattgggtcggcctttgtaatggtgattctattgggcctattctcattcgccagggcccataaatcaacaatggcttcttcttctttttctccttcacctgaacaaggaccttcatcacatgttgaaaccactcgtgaaattacggaattgccctcgaaaacaaaggcagtagaagagttacagagagttcacaagagtggcaatttggtctttagtgctggggaagctcagctctatagcttggaacaattgatgagagcttcggccgagttactgggtaggggtacgattggaactacttacaaagccatacttgataatcagcttattgtcactgttaagcgtcttgacgccgttaaaacggccgttattagcggtgaagcctttgaaaggcatatggatggcgtaggtggactccgtcatcctaatttggttcccgttagggctttttttcaggctaaaggagaaagactcatcatctttgattaccatcctaatggaagtctcttcaatctaattcatggtaagtcaataataacttgttaataaagttatcaaattgattgaaattgttattaattgcatttattaacatgtttgtaatcgaagataattgattggttcagttacactctccaaagttctttcaaaaaaaaaaaaaattcactctccaattttattgctttatgataattgagtttagtattagtgtaattactaactaccctagtaattacatagtgactttacttccaaacatgccccttagtaatttgtgtgaattttggtatgaatatttaggttcaagatcaacaagggcaaagccacttcattggacatcatgcttgaagatagcagaagatgtagcacaaggccttgcttacattcaccaagtgtctagactaatccacggcaacttgaaatcctccaatgtccttctaggacccgatttcgaggcttgtttaacagattacagccttgccatcttggcagattcatcagctaacgacgatcctgattcagcaggctacagggcacccgaaacaaggaaatcaagcaggcgagccacggccaaatcagacgtgtatgcatttgggatactgttgttggagctgttaacgggtaagcacccgtcgcagcatccattcctgttgcctacggacgtgcaggattgggtgagagccatgagagacgacgatgtcggggaagatggtcagctgggaatgctgactgaagttgcttgtatttgtagtttgacatctccggaacagagaccagcaatgtggcaagttttgaagatgatacaagagattaaagacagtgttatgagtatgactgatcaaaatgcttatgctggatattcataataatcatttcaatactggtttggattctaaattaagaacattcttattattataattatcatgaaaaaggtggttttaattgtatatcagggtaggtgtgaaaaagcaaagaaagaaaagtttttattggctaagtttgaacaacttgtttatggccaagcaaaaccttaggagttcctttttttttttgtgggagaggttgatttcattctattaacacaagcaatattattattatttagttttgtatgtaatttggaatttggattggtttggttggtagggagtgttataattttgtgtcatttatgatggaaaaggtttaagatgtgacaatgtggtaatgtttggtgggctacgattcaagaagtttcgcactactattgggtta

SEQ ID NO: 69402 - DNA, 568 bp, Cannabis sativa
  modified_base (26)..(28): a, c, t, g, unknown or other
acaatctcaatagttcagggggaatnnntaacggccaaaaaagttcaggggacacgatttagtacatgtcaaagttcaggaagaaaaattactaattagccttaaaatatttctgtattaaatggaataaatgatgaaaattacatgttacagctattatttgaatgtacaaaattaaatagtagaacataaaatgaaacaaaaggtcaataatgcaatatatatcatatctataaaaaaatccataaaattgatgaaggtattaattaattaatatgtataagatctttattttagtatatgtattaataataggggaaccttaacaagaaggtcgttgtagtatagtggtaagtattcccgcctgtcacgcgggtgacccgggttcgatccccggcaacggcgaattttttgtggtttttcattttcttctttttattattatttcaattatttaactcatcttgtggttaatagaatctatttaccaaaaaataaggtgcatttttattctgatttcttttcttagccagataaataatctgtgaagcttttttttttttttttt

SEQ ID NO: 69403 - DNA, 1112 bp, Cannabis sativa
acttttaatatataaagattcatttatcaagaatttgtttttgtagtctcagtttttttttttttggtaacaaagcagcttcacacgagcattctttctttatgtttatgataacattaatgggcctacaaatatttaacacatcctcttcgagtaatgccacaccgttgtctttgtttgggccctgcatgcctagctggatcaggacccaccaaaattactttagagaatgatttatcaatttctcattaatttgatacaaattcccttttttaaaattaagatgattgattttaattgtagactaattttttattttttcaaaaaagttaaataaattaggtagagcaataaaattgtatcatgtgtacaccgtatttacgtggccaatctactatgacacttaatagcaaaaattagagtattgctattgtacacgagttgggtctaacaccttctagatgtgtcaccctacaattggttaacaatactctttaaaagttattaaattaaattaaattatatgtgagccgatacttaattgtactaataatcatattcacacgtaagaagatgctaagcactactagtacctttgagcatttctctaaaaattaaatagaaatatgaaattgctaagagaacccgaatttttgagttttgacatcaaaaattagattttaaggaattaattgctagcaccgttaaaattttggaggttttgctttgcaatccctaatcatttgtttgttttgcatattagataactaaatgcaaaagaaaacagatgaaggactgatctgtaaattattaaggaatatagatctgattaaaaataaaagataagttttgttttttattagagaattgccacgtgttaaagtggggattaaagtatagcaacagctgtgtgaaccgaacaattccagtccctttggcgttgaaaagccgttaatcccgccaacttgagatgtcatttgtcacagtaaaaaatataatatcaaaaacaaaagaaaaaaaaactaaaaattgaataatagaaagagaaagaagtgggagagaggtcagcttcttcattgcttcaaccttccaactcttcctgcaaaccccac

SEQ ID NO: 69404 - DNA, 1115 bp, Cannabis sativa
gtaattaaaacataaaaaataaaaattagctgcaaacttaataaattttgttgttacatctgacacaaacaatagtagcgggtctcactgctaatacctgccgctattaatatttattaacggtggatgctaagttcaccacttataactattaatagcgactgattaatgcaatgaactcctgccgttattatttattagcggcggacccctctgcagctaatgtgtataaaatattgtagtgatacttcaatgttagctttttactatcaattaaaatagaaagtttttccctttaacatggtatcatttgtcatcctccctaatcctaaccctatcaaacactaaactgtttccatggctcctagaatctatcactttccgcctccgccacccctcagttccccttccctttcgctcacactgccatccacaaccccgacgtcacccaccatcattgtcttcctcacgatgaaccaaacaactcattcctccctgtcaaccttggcgtatttacatacatggactatcttttatctaccagttttactcaatcactttcaaatcataatttatccatcaaaaacaacaaaggtacttttcttgcacttttaatctattctgataatattatggttgcttctaataatgatactacgtgctcttagtgcttttaaacaacaacttaattcagtattttaacttaaggatcttggtcatttacgttttttcttaagcttggagattggtctttcttcaagtggcattcctgtgtcacaatggacattcaccttaaaacttttgattgaaggttacttgggagcttctactctttctacacccatggaactcaacattaagctctcttctaatgttgggaaaccattggaagatctgaaagtttattgcaacatcattggtataaactgatttacttaactattactcgtcctgacatttcttttgttgtcaataagctaagtcagtttctttctacccttagagctcctcaccttcatgcagctcaaagaatattacaatacctcaaagacatttacctcaaaggcatttatggtcaatgattatcttttcactcagcttcacatgctgtaaaa

SEQ ID NO: 69405 - DNA, 748 bp, Cannabis sativa
tgaaccgaaagcaaaagcgaagccaaaaaggtaaaaagagagactaccgacaacagcgtcgacgacgttggtgagcattatgttcattgcgtttttggctcggactgagccagcgcagagcatggcgaagccgagctgcatgatgaagacaaggtaggcggagaagagaaggtatatagtgttgatacaatcttctacactttgctgccatggtgataaaacactgtccatgagtagcaaagtaatgtataatagtaatagttagctcttggaagatataaagctaaatagttaagataggttgaatggtagctacataaacattatatggtgtgtaattggagttgagcattcgttgttgagctacataaacattatatggtgtgtaattggagttgagcattcgttgttgacttgctgttcaattctacttcattgattttttcaactgaaaggataggctgtgggcaacatataatacaactccatcctttaaaccatacatacaaatcatcttaccgtacttgatagttgatatactcggaaaaaaaaattgtattgcaattaaaaatattagagtggtttttatatgaaatattattattagtttttattttttattttataaaaaactttacatttatctatgaaactcaaatttttatatgtttaaaagaaccccaagttgggattgaatgtacctaagatggcgatttctaggactctcaagaggcatgtttcccttcct

SEQ ID NO: 69406 - DNA, 908 bp, Cannabis sativa
tttatagttgattccacacaagaaaagcacttcccctttccattaaatgcagggttggtggcattaactaactccataccgacaacaaaagacaaggcaccaaacaccaaccttaaaataacaataaaaagcaaacaaccaacccaccaaagacaccccaaagaaccacaaaactacacaatctccccccagagaaacagaactaacccacccaacaaaggaaaccaacaaagtcacaaaggctcacaatagctacacacaacaagacactcaagcacggccactaaccaaaacaacactgactacaacgaactagacccgaagaaacaacaggaaggccgaaagcaacaagaaaatggtagaagaccactctccttgtattgttaagtgttaagtaagagtttttagcggctaaagcctcccaagtataacattacttgcacttaaccctccaagtgtggtaaaacccttcaaactattgaaccgttaacaaatttaatgtgtcatccatttatctcagtttgataacatagactgtttatgtgtacactacacgtagcacacatatattgatacacgtgatataattatttaaaaaacacaaataaataatttcaaaattaaacattttattaataataaaaaaaatactttgaaaattaaaaaattcaaaataattttttccccaactccttctctcccattttaatatcaaggaaaggaagaaagaaagtgttgaattctcattagattacaaaactgttacatgaatgcttatatacacacactgacagcaaaggaaaataaaatagagttagttattgggacaataactaactcagttgacacaacacacactaactaactcaaatacacaacatcttacaatctaatacccccttaagata

SEQ ID NO: 69407 - DNA, 6404 bp, Cannabis sativa
attcattataagaaccctaagtttaaataaaataaactagttttcaaacgttaataattaaatgccaaacaaactgtaagaaaactaataaatatttagaggtataacagctttaacataatcaacgtacaattaatttatagctcaacggaaactgaagaaatccatgaagtaatcaaggagaaaatatgtgcaaataatggaaaaatctatcacattctaaggtagataccttgtcttctagagaagaagaatccccgttcagcatgctgtgtctgttctcataatcctttattagcgctttaccgtcagcattactaagcaaagtataatccaactcccaggtagcttgctcatagccaagactgcaccattttacaagccactcatggtgcccatctagcttagtaaaagtattctggttatgcccctcgggggaaatcaacaatcttttctgcaataaccgatggggaaccttccattctggcttccacacctaaaatgaataaagaatacttcagaaactaactatactttttttttttttaataattcataaacaaatttaactcataataaaaatagaaaaatctttaaattaaaaagcagttaataaattctaaatcaattataagactacccctaaggaatctaaaacatactgaggcttcaattactcactcagtactcgtcacaattaaaatgaaactcagtaataatcctaagaaacgctaattaataaattgttatataataaaatgtatctatctaattctacatcattcccgtgagttcaatctgaactccgataagttaaaacttcaattcatcataaagaaacaacacaatgtagaagcaaatgccatcataaattatattccttgacgaagaggtgtggtctagaaaagaaactctgtacataaatattgaagaagatacaaaggtcacatgtccatgagtgatctgaatttatttctcaggtcacatgttcatcgagaagaggctaagcctcatgacagtaaggtgtacgaggcatcctttgtaatgggttttctaaagtatgtacacctaaacttatttagcagtccaaaactgggctaagggaaaacacctcagtccgtgaattagctatttaaaactttgtttggtagtcatctaggcaatttcctcgtcaagatcagatttcttagtttggtccacatctgtttgagacatgaggaatagcaaaaatcacattcaaaaggcagccatgaagtcatctgtaggttgcttgattggtcatttatttattagaaacctaacccaagccctcaaaaggtagcccaaaatttaaaaaaaaaaacaccaataacatcgtctgcttctacaacccaaacaacaaaaaaataaaataatagatagacagcagaactgaaggctttttcaaaaacaggttttcagaggaaaagagactcatctacaatactaattgttgtaagaagaagtcagaaaacagaaaagaatagaaatgtcaagaaaaagagtacacagacatcagaaggtggttgatccagttaatgagatcaaataaagcatagttttccagattcggtgtgagagtggtgcaatgttgttttgtatgctctgagttttctatttcaggcacaccttgtctttaagaggttcttattgggtctatgcaatagaactctctttgtttcaatgtttcaaaagaaaataaataaataaatcaaaaatcaataaataaataaataaataaaacagaaaactatatagaacagaacaagaaatgatgaagaattagaaacaaaagagattatagacagactaaatcttaatgagttataaattcataaacaatcctccaagtactcaaatcaatacaactcaataataagtctcaaatatgctaattaatcaataataatatttaatcatccatgtattttgtaccttcaattctaatggtcactaaaagacaagttcgtaatagaaaaaggaagggataatacaccaaaaataactacttattaagcctaaataccacatcacactcaaaaagcatctcgtcctttggattcgaaagaagaaaaatactgatgtaagaaaatggctgagcgggaaaaggtaaaacatgcaaaagtacaaaataaaatataacatctaaataaagattaaagagaaaacagttttcagggataataaacctggctttctctgttgaatttttcaacaagtgatggagcatcaagaagcagcttacattcgggtacccaaatattgtgaaaatgtgcaagccctttgtatttaacaaaaaaaaccctctgttcttgggatgctataagcaaaaatcacaaatccaaaggaggaaatcagaaaccaataaattgcaatttgcaatcacaaccaaattccatgcaagcaagaacagaagttaacacactccaattctcataccatcaacatctaatacttccacaaccctgtcatcaaagattgcctctactccctccgacactgaatgttcaccatagtctaacttcttcatgacacacataagacaataccaaactccaagaatgacaccatccataggaggatctagacacgtgggatgatagcttcttttgcactcttttccatggcagcacctgatgttgaatgagttttttttagtagacatcaggaaagcaacatctcagagtcaaagtatgttatgctttttctataataaattcaaaaaacatatttttaagtgtaacaagacaacagtactatgtctagatgctatttgaccaaggcttttctatacgaagagagtatggaagtctcccaccttcaatttgcagatgatactattctcaacttaatacatgaataaaagccagttattaagacttaatctaggcgaggggtggtatgaagctgccaacgatagactgtggggtggactcatggcctttgaaaagcgcttacctttctagaggggggaagcttacccttattcaatccgtgttagcttcaattattagtcattatacaataccccaagatcagttgcgtggaaaagataatgagggacttcttttgggagagacgtgacatagattgaggagaacacttggtagcttggtaagtggtgtgcaaaccggaatgcaaaaataatacagattgctatttttgttcaaaaataattatcccaagcatttaactccaaattttactccggtgtttgaaatctaaataaatgacaaagtagaacaaaagcaactagaatttatagaaaataaaatgaaatatagacatagatttgcatagttctcatatattgctaaactatttattaatggccaaagatagttgcatgaatcagtgcgcaaataaaaaagagctactcacaataggcttcccccgaccttgcatttaaaacatgtattttgttcaccaactgtctgaagatctccagatgattccttttgctgcatatgattttcacaattctcagcggtagtagtactagcttcacactcccctctatcctgattcaatttaataatgacgacattcataaacatttttcttatccatatccaataaatgtagaacatctatccacgaatttatatatatgtatatatctttgggtcttatttaaagaaagaaaaaaaaatacaaaagaagaagcttcatcataatcataatcattatatatggccaatgatatatataactgttaagagttttactatcaaatatcaatttctaagaatacctcctaatttctaagaaaagtatggaaaaagacagggtaattaaagaaatcagtttatgggcttaagcaatctccacgggcatggttagaaatactaagtcaagtcactaaaaaagtacagctatatgcaaggtcagtcaaattatacttctttcgttaaacacttaaacaatatggttgcaattttaacagtttatgaagatgatatgacaagggctaaagcaattgctatgtaaatttatgaaattatccagacaacacctgtcaaaaaacaaacccacaattctatattggtctccgtaacataaaactgtcatgataaaacccattgcatgctcaaggtgcaaataactattgctccaaattcatagtaaagtgattaaattggctataaacatacaagttacaacctacagtgcactcatgcatggcagcacaaatcactatattccatagtccatagtccatacattaaatttcttttgaaagaacaaaagtaacaaatttcataaacttaatagcacaatcccaataccccaccactcttgattttagcttcaataatagcaaatgtattaagatgtataaataaatcggatgataatagggttagcacttacaataaaatgggaacaagatcaaatacgtgggaaacggataatggtacacaatagtataagtaaataaatgacaaaagaaaaaacaaaccaaccgttgttaaaatggctgcagctatttcttgatttgagttgacactgtctgaggaaaacttgccccctgttgagtctaggttcaccctgttgacattatctgaggaaaacctgccccctgttgagtcgaggttcaccctgcaagatgtataacaaaattgatgaactctgagtagttcctgggttggaaaataagacaagaggctagacacaatataaaaaataaacctttttatgaaacttcaaacttattatccatatgtggatgggcatcaagattattcaaatttagaaatattgaacggaaaaaaatctccttaggtttgcatttgtatctagtatctcaaacacagttatttagctagcttatcatgagattttgtggtgtattttttttaagtgcctcagtttctctgttttgtttattagaaaaagaaatttatataataaggacctatgacaacagtaaggagatcagatatcctcaagaaattaaaaaaaaaaatccaaacttaaaagaaacaataacaattttaagattaatacagccacatgagtctagcccaagtggtgttataaatggtctgcggttcaaattccatctggtctaatttaacaaatgggcacttactaattcttatttaaaaactaatagtaataaataaagattagttggacacagcattcttcaaaattaagaacaccaaatagagtggaaaatctttaaactcagtctcttaagtccattgagaagctagaaatttcacccattcacatgaagaggccacccaaatccattgtcttgtctttaaaataggaacatttaccctccaaatactattgttgtactgcattatgagaaactagcacccaaaaaaagaaaaaaaaatgatgactttgtaaatactaacgaaccttggactagtagaatatgtgtcaagtttctccacaggattagagttctcgtccaacatgttatttttacttggtgaagacatgatttcgtggtcgctttccatcaactctattgggtcaggttcatcaatatcctcctccactgtggcatcaatatcattgaattcgccaatgctaaaagctcccgatccatcaccaatttcagcctcaccaggcttcatactagagccggaaggctcctctccaccattgttatcttccatcgtcttgttagcttaaaaatttagaatgaaactattcagcattgccataaaaacgataataaatcataaagtacacagaacaaacaataatacctttaaccttctttgcttttgggctcttgaaagcccccatgtaagcatgagcatccaatctcttcctcttctttttcactctatgacattctaaatccggttcttcaatatcaatttcctcatcttctttacctttttcagcttctttagcttctaaatcctcagttaattctctaacactcttctctttcttacttttcttcttcaaattcttcaaactcgagctaatgccagcatttttcgatacagaagaaggtgatgccgagctctttcccctatcagaccttctaagaggactaacagtaggcgtcaatttcttctccggagaaatcatcggaactcgcctctcaagtctctccgacttacgaacactcggagcttccttcgtctcagatacctctctagaagatcttcttaacccaaacgtattctcatcatctttacctttccgactaggtcgagcatcattccccatgctctcataaccagaaattcttcaattcaaagacaaaattcaaaaccctacaaaccctaaacaacaaattacgaaatcaaaggcatgcatttccaaaaaaaaattttttaaaaaaaaaacctaatttatcgatcaaattaacgttacagaataaaattgttcgaagattgagctta

SEQ ID NO: 69408 - DNA, 1725 bp, Cannabis sativa
agccatgcttcattgacaagtactctatcaatcttcgaataaatccttttaccagcctcttgtttgttattccatgtaaaatagctccccgtaaacttcccatcttccatttaacaagtagcaacagaatcttgaaagtcttttgaagcaagctgccttttcttccccctattctttcttccacactaaagatatcgttaaaatcccccataactatccaaggatttttcacctccttagctagatctttcaagtcagcccatagtttccttctaccctcctcatcattgaaggcatagacaaaagttgccaagaaaaactcttgaccagcttttgaggatacctccaaatgcattagttggctagttcattttttaatgttaatagcaaacatgtttggattccaacttatcattatttttccacctttctgacaagcattattagtagagaagcaccaacccgagaacatatttatatatacagaccccaatttagggacctgtatttttgtttcaaggagaccaactaagccaaccttcatagagtaaattaaacactttacatcctcttgcttatggcgtttgttgatccccctgacattccaacataaaattctatccattctcggtaggaggctcccccctcctttcttactattctcttccgaaatctccttggaacattctcttatatcacttaacactcgaaaatgattagtagtcgtcactcctttctcatctgatcgagtattcttaacaccatttcttacttgttggaacccctcttcatctttctcgatttgtcctgctgtaacttcagaagctttatcttgtggaacccaaatttgtttaacctcccctttcttcttacaccactctgacttatgtcccattccatgacaatggctataagaaataggtaaccattcatatttaacaggcagtaccacctcaacattaagctcgttcttgaaggatatttcatctggaaaatcttggcgcatttggacttcaatcatcaccctgggatagttgagtctatctttatttttagtcatttcctccaccatgaaaggagttcccagctgacctactatcttgaaaaatgatctttcaccccagtaacgaagttccaaacctgggatttgtacccaagttgggactgatcttacatcttctcttgtaaaatctgtgtaaggatcccaagccttcattatgacaggcttcctatcaaaaaacaaaaaagctccctccaaaatttcatctctcagctgtactaattggaatcaggcaatatgaacacctttagacagtaaaccaactttaactaaacctttctcattccacattcctttagcaaagccatcaaaaatagggaaaggagggttagcccccaatacatagcatacaattgatgaattccaatactcaatttcttcttctatatcatccatttcaatttgaatccctgaaattttcttcccctcattttttgattccccaaatttagcacttaaattctgaataacagtgtttgatcgtagaataggtggagttataacagtacctgactgaataagcttctcacactggattgttgcttcaagataactagtgatttccttctcacaaaccggagttaatgcatcagtttcttcccctgattcttcatcggacccttctgcagaaacagagagagcttcgactcacaatatttctccat

SEQ ID NO: 69409 - DNA, 988 bp, Cannabis sativa
ctggggtccaggatggaatcagagtctgggtagggatttgggtctaaggcggggatccaaagtcgggaccaggttaggggtctggcgtccaggtccgtgttcgaggcttgggttggggtcaggctccaagtcgaggtccggggttgaggctgaggtttggggtctgaggttcgcatccagtctagggtccgattcggggtctaggacggggtttggggtcaggtccgatgtccgagtctgggtctaaatctggttctagtatggggtctagggtcctagtctgggtcaggtccggggtctggcgtccagatccgggtccgtggtctaggtctaggtccaggggtataggttcgggttcgaggtctgcatcaggggtcgggggtccgggttggggtcgggatttgggtccatggtcggggtctgggtccaagtcggcatccgggtggaggtataggtttagggttcgagtttggagtccaaaatattgataaaaaaaaatgtgcaaaaaaattttgaaagtgattttatttatttttaaaattttcaaaaatttgattctcaattaaaaaattgaagagtaaaaataaatttataaaacaagattttgaaaaatattttcacgtttgtaattttaaaagcaaaaactgattaaaatttttttaccaaacacttaatttagtaatattacatcaaaaatttacattacaacttccttcaaaaaattttccacaacttcactatgtgaggaacttagttgggctagattagcaaaggcttaatgtcaaggttataaaaggaaggtagcctcccatgtggtttccaccttttcttcgtcttagtttcaacggaagtttattcattaaaagaaaccataacatcatttacatgtaatttatttaggataaatactattttgaatcatgtattttacaaaagttattgattgaactctctgttttattaaatgataaaatagactctgtatttt

SEQ ID NO: 69410 - DNA, 1567 bp, Cannabis sativa
cctccgccacaagtgaggctttctatatatgtcggaggaggggtcaatcttagtcattggcctctttctctttttcaaaaaaaaagtttgagtgtttgtatgttagggatttggtatcttaatgtgggtgatatatatatattttaatttgtgtttggtgtaatcatttttttttttaatatggctaaatttttttaatagtccattttgtctaaaagtcccagcaattccttaagggctagtttggtacgccgtatgaggattgtattatattaaataataaataacactatgtttggataaaacaatgtattatattaattattacgatcaaattttttaatacaatatatattgtattatttaatacataacaaatggtccgtattagcttgtattataatatttacaaaggattcgggtcaacaccaatctccgactcgaattcggactcgggacttggacccagacccgaacctgaacctaaactcggaccgagacccgaactcagactcagattcggatcccagacctagaccccggactcggacccaagcctggatccggaccccgacccgaacccaggacccctacccgaacccagaactcgcgacccggactcaggcttggactcgtagttggtgttggggtcgagtgcattgaaaatatattataactttattacacaatctattagtacaagtcaatatcaaacattgtattatattaaataataccaatacttaacaatacaccacaatctaacacaatacaatgcaatacggtgtacaaaacgagccctaatttcacctaaacccttgaaaagtttacttaacatttaacaatattaagttctattagaaaacaatattaaagaaagcccataaacccaaaacccctaaaatttaccaaagtttgttaaagcccataaatcctaaaatcctaatggaaattttcatttttatgctaaaaaattcacaaaaatatatattttttttcttttaaaaaagttattttatgaaaaaaaaattaaaagtgtgatgaaaaccgtataaggtaaattgattaccttaaactgtttttgtatatttttaatttttgttttgaaaaaaaggcataattttgggcacattctataaaatctaataaaatgtgtaatttctacaaagccaattaaatactaatcctttattcctaaaatttgagactactaaccttaggaataccttttagcaaaaaaggaaagaaaaaaaagaaaaaggtttaggaatatgtttcataaattcaaacttaataatgctcttttagactaattaattagtctttaaaaccctaaatcttagcataaaccctaatgtatttcttaaagctaaagtatgtttcataaaatttaaactttatagagttgttttgaagactaactaattagtgtttaataatatgcttttgagcagaatatgcttttgctattaatgatttcactttaatgggatgacgttttgaccttgttgttgatgcgtggttaagaaattacaatacatgcttgtattttggccacttattagta

SEQ ID NO: 69411 - DNA, 1076 bp, Cannabis sativa
ataattttttgatgatttatgaactgcaggctgggagatatgataacaaacgagacaggtaatctacagtctgcaggggtgtctcaagttttggatgtgggatgcggtgttgctagcttttcagcttatcttcttcccttggatatacagacaatgtcatttgcacctaaagatggtcacgagaatcaaattcagtttgctttagagcgaggaattagtgcaatgatttctgctatagccacaaaacaacttccgtacccctctagttcttttgagatggtacactgttcaagatgccgtgtggattggcatgagaatggtatgtaatcaattttttgtcttttggttttgaaatgtaatcaataatttaattttgtttggtttgtgattttgttgtcatgtggttggttcttattcattttttcattttagggggtttatgttttcgggttccaatggtgtagattatctattattagattttgctttggcattggatagaatattttgcatttgaaggccaattatgaatcaatgcattcgaaccccagcaatctcgagtacttacagacattcttcattttgtgcagatggtattctactaaaagaagtgaatcgccttttgcgaacaaatggatactttgtctattctgccccacctgcttatcggaaggacaaaaactatccagcgatttgggagaaattggttaacataacctctgcaatgtgttggaaactcatagctcaaaaagttcagaccgctatctggaaaaaggtggatgatcaatcatgtctcatgcgtaatgctgatgataacattttagatatatgtgattctgtagatgacaatgctgcatcatggaatacaccactcagaaattgtgttcaagtcaagggtgcacaaacacatcctcaagaacttccttctagacccgagcgactatctgtgtattcacaaagtcttagcagaataggtgctttttctccttccctcttttactgtgaaaatatttatagttttctcagctcattgtttataaaactattacagttagaattagttaataaaggctaca

SEQ ID NO: 69412 - DNA, 3306 bp, Cannabis sativa
gaacccgccatacataagttttttggtagcaaaccaccttcttggtccatattctcttcttcatcacacgttcagcccgagcctaactcagtattttgctccatttcaaatcatggcccaacccattatccatctttcttttctgtctccaaaatggcaatatttagtttaggcccctaagattgaaatgccacctcctcatctcttaattggccagctgtagaacgttgaccatgtgatggcattaatatgtttttgtaaagtatatcatgtccacgaatatctccatccccatgattgccgtgatttcctgaaacattaatactaggattttgactctgattctgtgtcatcggagacaccaccgggcagccaaagtttgttgcatggaaggtgttaaattaaactgtagtccctgctgcaccagatcactactctattttggtgtgctgtcaaatagatatttcccaatcatgagctgtcatgattcctcctaaaatcgtgggattctgttgtatattagccaatcattgatcgagagaatatcttcttgttaggaaaaatattccctttcttgtattatatatacaccccctattacatgtaattactcactgagaaattgaatacaatacatcctgctgctatactctgcaatattactctgctttagtattttagctacctttaatattgttcttcctgttttaacttggtatcagagcgggtatggcgtctccaggagattcctcagtcaataatgctagatcccaagctgttgaagctcctcctcaagctccagctctcgcaccagctgcaccagtccagcccgtgcctctgctgcaaccattggcacccatcaacattcgtttggacagggataactatccctattggcgctctcaagtcgtcccagctgttcgtgcacatgacctagacgactttcttattggtacaagaccagtcccacctcagtacatcgatgttccagatgaggtaaatcccgatttgcaacaacagcaggtaaatcctcaatttactctttgggttcgcactgaccaagccatcttgagctggcttttgaactctatttctgaggccatgcttggccatgtcttacgctgtcgagtctcttatgaactctggtctttactagaaaatctctttacaacacaatctcgagctcgcatactgcagctccgttttcagttgcaatctctcaaaaaggggtcgatgaccatccatactacatcctcaagatgaagtccattgctgatggtttgaactctgctggtcaaacattcagtgatgatgaccttattctatacattttagggggtcttggagctgaatatgactcagatgttattaaccttacatctcgtgcagaccatttaactctgtctgaagtgcagttcctcttacaaagtcaggaaatgcgcattgatcaacttaacaccactgctgcatcagatcttgctgccccatctgcaaactttgctgctcgtggaaggagaacctttcctccttctaactcaggcagatctgccggttctcgaggccgtggccgtggccgtggacgtggaaatcaggggcgtataacatgtcaactgtgcagcaagcctggacactcagccagcaagtgttattatcgtttcgacatcaacttcacaccatctgcaaacaacaacaacaatcagagtcagaacccttctttcaacaccagcaacaatcatcacaacatgaaccagtaggcctttgttgctaactcaactcagaaccctcggccagatgacaatagctggtatgtggatagtggagccactaatcacataactgataatgtcaacaacattcaagcttcaactgaatacaatggtaagactcgcttgacagtaggtaatggtcaatctcttgctatttctcatatgggcaactcggttataaaaaccagcaacagatccaaaccagtcaaattaaacaatatcttgtgtgttccaaacattgctaaaaatctgctgagtgtttcaaaacttacaagagataataatgcttatgcaaaattctatgctaactcttatgttttgaaggacatggattcgaggagggtgcttcttcaagggaaacttaacaatggtctttatcaactcacaacaccagcatcacaatctaaaagtcacagcaatcacagccatcaacctacacctaaaccacctaatatcagccctagcgttaagtctaatgagtcttgtttttttaatttctgtcaatgaatcaagtttgtggcatcataggttaggccatccttcctttaatgtactcaaacatgttttaaataatgaaaaaaaatctttaccttctaacttgcatttttgtcaaagctgtcaacttggcaaggctcatcacaagccatatcctgctgctttaaaagaatccaaacaacctcttgaattgatacattctgatatatggggtccttccccaactatatcaagacatggttatcgttactatattcattttatagatgactatagccgatatacttggattttcccactcaagacaaaagatgaagccttacacacgttcaaaaactttcaattgcaagttgaaaaacaactaaacacttccattaaaaccattcaaaccgattggggcggtgaataccgcaggtttgaaccataccttcaatccataggtgttaagtttagacacccttgtcctcacacccatcaacaaaatgggaaagccgaaagaaaacaccgacatatagtcgaaacaggactcactctcttagctcattctagcatgcctcaaaggttttggtgggaagcttttcaaacagccacattccttattaatcatcttgtcacacccgttcttcactacaaatgtcccattcaaaaactatttggtctttctcccaattacaaatttttgaacgtctttggttgtgcttgctatccctatcttagaccctacaacaccaataaacttcagtttaggtccgccaagtgtgtgttcataggttatagcccaagtcacaaaggttacttgtgccttcataattcaggtcgtgtctatgtagcaagtagtgtttcatttgatgagaatgattttccctttgctagtggttttacctatcctagtgcacacacagatccgccatttcaacctagtcactaccctcaatggctgccttatatctctaatgtgacttcagattatgatgcagttgctcgtgtgagtaatgaagatgttgcctctgttgtcccaacagaaaatccctccttggatcctaca

SEQ ID NO: 69413 - DNA, 1006 bp, Cannabis sativa
caatttatcgcacgctgaacacttagatggcaaccattcatactccaccccttgttccaccaattatttcttttcattgacataagagattgtttttggagggtcattcgaaatctctatatcaacaagaacacgagaaaatttgatcatagttctttgttgagttaccttgtctatcatgataggtttgccaatggtgctaactaaagtactcaaattcttttttccccaatattgcagccccaagccattcaatcggacccaaactggaactgaattgaccatccttatcgaataaaggtctgtagtccaaggccgtagcaccaccggtttcttatcgaaatgaataactctagcctctaaaatgagagcccgagtagcttcatctcgaaagttcacaagactaaacccagagtgcattcgcacaaccttctcaatgcccaagttacctcagattctcttgatgaatccttcaaacaccttgaatgggggattatcacctaaaacaatacaaactatggcatttttccaatatgaagcctctacctcagcctcctctagatcaattttggccacacgttgatcaccaactataatctgttttgtgtaagtaagtttagacgaaggagaaggtacctggttcgtcttaaatttactccatagttccctagcattggtttggaaattttcatgttcaacttccttagcccaattaactggtttcacgatctcaagctcagcgtactcaacttcgattccttcaggttcattcctgatcaccaagttctcgcaagaatcatgaaattcttctgtagcttctggttcgacattcttttcttggatcaaagggaggtccacttcgacttctttgctcacttggtttgaattggctggctttcggccaacccttttcttcttcaccatgggagaggaaagggagagctcgcacgcccctagtacaaaatatcgaatcacatgaacattctgttaaagttatcaataagat

SEQ ID NO: 69414 - DNA, 860 bp, Cannabis sativa
aggatcggtctcattaatgcatatttctttaactttctctaatggttcgatcattcgttccacccctactcggggatctaactcatcatctttccgaattaccttttgtgtctgctaggcaagtattttggccctcttcttcaatttgttctctaacctaagactgcacacgggtcggatttttgagttttcgggtagtcaggttcgggttttcgggtttcgagtcttggaaatacacaaccgaacccgatttttagatgttcaggtatgtcgggtatcgggttgagtgtagtcgggttgggcatggtcgagttcaggtcttattttaatttatgggctcaaatgaaattaaatttttaaaaatgctattttttttttatttctaacattttttgggtcgagtgtagttgttcaatactccctcttagacagagaaggtcagaattgtcttacaggaatttgatgggggaggtgatgatttatttagatatttaaaaccatcttcttcgttttttttattagatacatcatctctctatataaaatatagctgagaaatatacttttatataattatatgtatatattaatctagatacttatgtagagtagccaacctctgcaatgcgaccttgccggagaagagaagcagtcgccgttgccgtcgctgcccttggagaagaagaagctttcttgacttttaggaatttttgagggcgactcttcttggtctgtctggtttggttcgtggcttcgtgcgtgagctgtgagtatagtgaattcgaccagcctttttttgaatgtgataaaataaaattaatattattaagtattaacttttaaataaaaaatatatatat

SEQ ID NO: 69415 - DNA, 1118 bp, Cannabis sativa
  modified_base (260)..(271): a, c, t, g, unknown or other
  modified_base (1067)..(1071): a, c, t, g, unknown or other
attaaataaaactaacactacgtagcttaacacgtaacaatcatatagtatatacaaatatattaaacatggtcgaatatttattattcctcatgtttgtgggtggatcttaatgagattacaatttgcttgttggtgattttacactaaagggatttaattcccccaaaaaaacactaagagatccatgtcaagctccgagttgacaaaattacagatacaaaattaatcatgcatgtcataataataataataataannnnnnnnnnnntaataataatgatgatgatgatatttatttccaacttgtcaagttcattttccaccttcactataaatattaatatttattaaatcaattttttgaaggaaaaaatactttggggatagtgaagaaaatggtataaatattacttattttattgtataaatattgaagtaataatgataataaaatgttggactacatacattactaaatatatatacattttttttcaattattaatcttaaccatgtcttgtagcattagtttaatcaaacataatctctaatggatctactaacatatgtatcattttagtttaaatgcatggcatcaaaacttttatgttttaaattataattattggtaaaattcttctaaacatttctataacaatagtgtgaaatactttaaataagaaattatatatgagtcactcacattaaatatggtgagctcaccaataaatcataaatattactaccaaaaatcctaagttttctgatttgtaaagattattaaagttaatttgtgtagtcaaatatatatatatatatatacatatatatattccacatttcttaatttggctatttatgtgttaattgaaattgaatgataaaaatagcttttaccttacaaatataaagaaaaaaaaaatattttagggaaatatttgatagtaaaatttgacttaaagactttgacaatacactgggagggcagcttcccaaaatcgaaattacttgtacgtattacaaatttttttacttttagtacaataaaatttgtgactaaaannnnnaaaaattgggactaattataaattatcattcttatgttgtaactaaa

SEQ ID NO: 69416 - DNA, 753 bp, Cannabis sativa
cagccccatccttaaacagatccgaatttagatcattgataatatgtcgagggtttccattcaaaatcatatcacctacaacaagatagccttcagatgggccaagcataatcctttttaaaaggagttgtggtgcgtttcgaactcttattgcgtgtcgtgcttttcaggctgcgtgcttacatgttgtgccttttgtacttctcgtaacgtgtcgtgcttaagaacacatttttcatgtcgtgttgtgctaatttatagtatcgtgtcgtgtcatactcaaatctatttttttcgtgcctaatcgtgcttgtttcttccgaactcatgttagtttcatattgtgtcaaaaacgtcggcccgtaataacaaattacaacactacgcaataaattgtaatattaaataattgatgcatatacatgtggggaattagttgcatgatagtgttattgatttggatacataacaatcaaaacaaaaaagacaagacacacttcactttcaaccgacatcacctcgtactaattttatttttaattattaattattagacataattttgtttacttattagataaagggaattttgccatataaacactcaattttgtttagtttattactactaaatacttaaaaattgctgcaaaattactcaaaacttcatttttgttattttccttaacttaactttgtgttgatagatataaatttgcttgctctccaagtcggtcttgactcttttgtttt

SEQ ID NO: 69417 - DNA, 715 bp, Cannabis sativa
atatctgagagtttttgtaaattcgtgtaaccttaataacactaatatcaataaagatatgattgttgttgttccgaccgagatgtatagcattgcacaaggctcaaactcattaaatctagtgttattctttttctattttactaccttaattcattacttagttattgtgatctcttaatatattgttcttgattgtgttgcatgttggttggtctattatactaaagtaagtcataaattatttctattttgcacaatatttttgaagaaactaaatacaacttatatctagagaagtgaagtcattattctattttaaagaataattatagagtatcatttggagctcattttttagacaattctttaaatttttaccaccttagctactatagagaagctcttgggactgttcttaatagctcctatattaattgaacttcgctcaaaattaattttcacattttgacctcctatttacaaatcttcctagctccatccctattagataatattttaggttttatatttcacttttagttttcatgtttttataacattaaatttcatagttctctccaaaaaaaaaaaaaaaaaatactaagtgactcaatcattacatatctttccaattatttagaaaaatttacaaaaatattagaatttatgttaacttttacaaaaatattgtcacacagaaaaattttcaaaa

SEQ ID NO: 69418 - DNA, 582 bp, Cannabis sativa
ttaatatatatgtataataataatgtgcagaaatagaaagattgaaaacaaggacattgtgttgtggtacaccattggttttcatcatgtacctacccaagaagagtacccagtgatgccgactctgaccggtggatttgagcttcgcccaactaatttctttgagagaaatccagtgctcaaagtcatacaagctaagcacgtgccttggccaaattgcaccgcccattaataattatatatataggccttaatatatttaattgtgtttctaatttatgagctcatgattaaaaacagtattgtaatgtttctgatttgttttgttttgttttgttttttgtttgtttgtttttttttttttgcatataatgtcttaggtttaattatgataagttttgatgggttttaataaatatttttctttttttggtttacactaatagttaaaacatggagaaattaataagattgacattcttttttgtcgcaacatgtacagcataattataattctttaatttacttttatttttatttaacagaagaggaaattattgtgaaaagaaattgaacatctgc

SEQ ID NO: 69419 - DNA, 8131 bp, Cannabis sativa
  modified_base (1172)..(1172): a, c, t, g, unknown or other
ctctctctctctctcgctcccctctctctctctctctctctctctctctctctctcttcacgtttagctcagtccaacaccagagggttgtctctggtcactgttggttgaacggtggtctccaccatgctaagggaccctcgaaatcccaaaccccaacaccccatccctctcgtgcatactgcctctccgattgttaacacgccaaaggaaaccgtactcagcttctcccaaagtcaagttttgttctactgtaaaatcaagttctattgttgattggttttttttttttggatctaactattgtggtggttgtgctaataattttgaattttttcttttgtaatttggttttgagaatgggaaaagattttttgattattggtatttatcaaccttgtttgggaattattagtgtggggagatggtggtgatatggtggttatggggataatagtgatattaattgtggtgtggcagagactttggtggtactctgtggtgggggtgataatgacgaagaagaagaaggagaaggaagattgttttaaagtggagaattaaggtttcgggaaggattaggttacagggaaatggaaaaagaaagaaaataaaataaaaaggaaaaaggaaaaaacaatataaaatattttaattttttttttgattttcaaatattttaaattattttttaataattaacattgcgtagaccactaaaaatttgtcacgtgtacacacttaactaagatttttggacaaacgtgtaattaagcaaacagaagtgaggttgagagggttttaccaccaaaaattaggtttgtggagttaagtgtaactaaatgtgtagtttgggtagtattgccatcaatatccctaattgatacaattattcaaaataataatttttacaaaattattaatttgcccttaagaatgatttctcatagaaattaattatttctcaaatttattcatcaaattaaatctttccctgtacagtattgtatagcggtgatctggggatcatggatctatattttgaagctccaataaacacttgattattatttaacacttgatctagggctaatggatttcaattttaccattttattgaaacttatcctttttttttttacaaatgccaattctatctatttaataattanaattaattatcaaataaaattacaatttaacttatttataaattagaccttttaaagtctcttaattgataaacaaactctaaatcctttttttcttctcaaaaaagcccttgcttagtgaaactcataaataggacatagtcttattcagaattctaatcgattaattaaaatcaattaattgagtctacaagataatattatctcaagtagtgtggggaccatgattctatataatcaagctcctaataaatagttctataatctactgagtaaattctctatcttattaattcctcctaactctacaatagattcaaaattacactcctgattacatagaacactctatttaccatgaatagatacgctataaattatccattgtttcaatctaaataatcaaagatcatctatagatgatttacatcgagtagggacaaatttactgttctaccctttaatatatttttatccttaaaacacttaacttcttataaatgatatttcagtaaactaatatatttactgaaataagagcttttccatttatgtctattaagttaagttataaggaaatcatcgtttcacttctaaatagttataaaagctataaatttaatattcattattagcgctcacactcaattgcactatcatgtttctaagatgtaagtattgggccgatccaagtggttaactttaacaagtcaaagaacatatataatacatttaaaccagaacctaatcatctaaagattaagatcttttgatctaagatcaactaagtgacattgacttagaaaagatattatagtaagttaatgatatcttttccactgtcaatatcggtctagtctggtgtatagccaatacatctgatactagtatactttgctaataccgtgaaaaagacattttgcatatcatcgtgtaagtgaatttaatttatcgctgattatcacattagtgtaaattcagtacactgataaatcatgtgactaaatagtttaaagcatataatcacaattattttccactgtgataacatcactgtaattgtgagtaactatatattctgaatttaaaagaaattgtatatttaaaccataatcataaaaactacatgtaaatctaaatgattactaatcttctattgatagtaaataatattatattgaaatagatttttttaaggcataaaatcccaactgacttttagttaaatcttcccattaaagctctacaatctgactatggtggtgagtttaaaccatttgacaaattttttgatcaatgtggcattgtccatacacaatcttgtccacacacacatgaacaaaatggagttgttgagagaaacatagacacatagtagagagtggtctctctctacttgctcatgctcaaatgcctcttcacttttgggatgaggtttttcgaattgttgtctatttaattaatagacttccctccccaaaattgcaaatcaaactccatttcaaatcgtaaaagagcctaattactcctctcttaaagttttttgttgtgcatggtatccaaacttaagaccctataataagaataagctacgatttagatccactcagtgtacctttattggatacaatcttactcaaaaggggtacaaatatctcagtttagaagggagaatatatctatctcgagatgtgacattcaatgactatttcttccctttctcctctaccactgctcccacttcacaacctatcattcttacccctttcatttcttccattccaccaaaaatagcctccctaattccaccataaattcctccccccttcacatcttcctctaaccaatttggtgctatgacggacaccacttcttcatctaccacagcttcaccaactaacccaccttctagtttagtttttattaatacaggtactgctatcactccagttgcagcccctactatcactcctactacaactccagttgttactcatgttgcgactccagttgtcactcttgttgcaactccatcacctactgcaattacaccagcaacaaccataacagcaaatcaacaccctatgtgtaccagatccaagaatgggattcataagccaaaagtttacattacacttctcattccttccagcatctatgaagctcttaaagatgcaaaatggttagcagccatgaatgaggagattaatgctcttgtcaagaataaaacctacatctttcttttttttttgaagtgaaaccgatacaggttaaagtaacaaaggtaacaaagttacacaatcaaaggaggattttcttccatctataacagttcattgtctttcctaagcgcatgcagagaataaaacctacatcttagtttctcttcctgctggtagaacacctgttgggtgcaaatgggtatatagaataaaaaaaaaatccaaatggctccacttgacgatacaaagcaaggcttgtagccaaaggttaccatcaactaccaggatttaatttccttgaaacattcagtccagtggtaaaaccacaaaccattcaaatattcttaactattgctctctccaaagaatagtttgttcaccaattggatgtcaataatgcattcctcaatggtgagttacatgaaaaagtctacatgactcaattaccaggatttgaagatccatcacaaccacaagctgtttgtaagctaaacaaagccatttgtggcttaaaacaggccccaagggcttggtttgacaaactagcttctctcctcacttcctttggttttcactccttaaaggtagatcaatctctgttttacaagcacaatgctggtcacactacactaattttggtatatgtagatgatatcttaataatatggagctcttcatctcacatctcagctctaatcatagatttaaacaagatttttactctaaaaaacctagggaaaatcaagtatttcttaggcattgaagtgcttcatacaacaaatggaattcatctatcacagtccatgtacataaaggacttactttctcgagcaaaaatgcaattcgccaaaccaaattccattcctatgacctcgaatttaagattgtctacctatggtagtgatcttctagaaaattcttagttctatagatcaattgttggtggcctacgatatgttactgtaactagacttgaaattgcctactgtgtcaacaaagtttgccaattcatgcacaaccccttttaatctcatgtgactgttgtcaaaagaatcctcaaatatctatctggtacacttgatcatggactgcatctaactaagccaactcaattagacttggtgggattctgtgatgcagattggggtcctgatccagatgacaggaggtcaacaagtggtttttgtatatattttgggtctaatcttgtaacatggcaatccaaaaagtaacaggcaataccaagatcttcaataaaggctgaatttagaagcttggcaagcataacagttgagatcacttggatgaagtttctcctttttgaactacaagttaccttgccttccaaacaaggagtgcacaaaatataggtcgggccaaccaaaccggccaacccaacccattttttatgcaaaagcgttatgtcaaatatgggtcgtatttcattggcctgaaaaatcatgacccgtgtatgtatggtttggttatgggttagaaaaatctaactctacttaatccaaactagaccgtgtccacactactacattacttctatatacattttatataattattgtttgtattatatgtaacgatatgacaatatgtttatatatattaagttattaataatatatagtgatatcataggtactagttaactcacttttgcaatattagaggcaatcaaatcaagcaattggctggcagaaattaatgtacattattttataaattaattatatatattatattattataatatagttaaccctagcagactaacactataaaatatacattacaaaagacaatctcaaaacaacaacaacgataatctaccaattgtctaggttcaccaaatcttaggtaaaaactaatcactaccacaattattttattcttttcaagaactagatttatatttacatgtattttttatttttgtatactaggtttataatttttttttttacagttctactactgttagagtttcgacaccaatttttacagaaaactacaagaataacagtatgtaatatatatactttttatatatatattcatgctcataatttaatatatataattatataggagttaaaaatatatatatttaagtgtatgaaatcttttatttgttgtgtttgaatatatgtgtgcgtatatgattacagttttctatgtgttcttattatattatatgctcaaatatgtgtatatacactgtaataatatataataagaattatctatatataaataagattatgtattaactttatccgtttatttatatatataccactattactaatttaaatatttttatcacataacttaatatatatatatatgtgaataaaaatatctcattctagtacatcaatttttattattttttttttaactatattacattgtaatgtaagcatgattaatcacatatgtcttatattattgatgtataataatgtaaatttattctatagtttttttatttttgcatgcatattatgatgtttttattttttttctccatgttttatatataatattatttattatcaaaatatatttatatgctttttatttagttcactttttttctggttattgtgtgtttgttgataattttatatactagttgattttgtatattttttgtgttgttatttttataggagtgatggagaagtacctttccctacttctaccccattaggtgaaattcgtgataagtctaaccctactccaatttatatccctaacactacctccatccctacttccacaatccctattgagcttaagtcaccaaaaaaggaaggtgatgatgacgcacccactaccaaaaaaaaaccaagtagacaatctgctgtttgggatcattttacaaaaagtaagagtgagaattcaaatgatcctaggtgtgaatgtaattattgtggtaaggactatgattgccatagtactagagtaggaagaaccagtatgtggaattatttgaaaaaacaatgtaagaaacaaaagttgatttttcaaaatggtaatgagggtggtggaaatttgttggcaatgacctttaataaggagaattgtcggaatgctctaactaagatggtggtcttagatgaacatgcatttacagttgtggaaggtgaaggctttagacatcttatgcaagtagtgcaaccgagatttgttcttccttgtagaatgacagttactagggatatatactaagtttatttggaggacaaagcaaagctgaaagatgagttgaccaaggtgggtcaaagtgtgtgtttgacaactgattgttggacatctatccaacaaatttcttatatgtgtctaactgcacactacattgataatgactgatgtttgcaaaaacgaatcataagtttttgtcaaattcaaaaccataaaggagataccatcggtaagatgattgaatcttgtttgcttggttggggaatagagaaggtgtttgtcgtgactgtggataatgcatcagccaatgatgtagttgttagtcttgttaggaggagagtaaatgcatggaaagggtctgttcttgatggtaattttatatgcattttaggtgttgtgctcacatagtgagtttaattgtgaatgagggcttaaaagatttgcatgattcaattgctaccatttgtaatgttgtgaggtacattcggtcatctcctgcaagattggaaatattcaaagcttgtgctgagagggaaaagattgattataaaggatgtttgattttagatgtgcctacaaggtggaactcaacttttatgatgttagatgttactattatctttgagaaggcatttgcaaggtatgaggaggaagatgatagattcttgagttatttcaatgaaaatgaaagtggggagaagagagttggaccgcctactactagtgattgggagagtgctaagatatttgtcaagtttttacgcattttttacgaagtcacactaaagtttagcggtaccttgcatgttatatcaaacacattttatcatgaaatttgtgaaattcacacacaattatctaatttggcttcaagtgataaacatctattatctgttatggctgccagtatgaaaaaaaagtatgacaaatattggggggatgtaaaaaacatcaatgttatgttgtttgttgctgttgtgcttgatcctaggtaaaagttgaagtatcttaaatattgttttaagagtatttatgatactaaaactgttacaaagattgtgctcaaagttgagaaaacccttcatcgtttgtatgcttactatagtataaataacaaaggtgagactgaggctgaaaataaaaatagtagtgcatcaccaccaaagagtgagatcaagaaaattcaaaaaagaaatttactaactttatatttgcaacaagaataggtgaattttttgaatgagaagaatgatattgataggtatttgggagacaaagttgttaatccaatgactttttcatttgatatccttatttggtggaaggataatactaagagatacaatattttgtcattgattgcaagagatgtccttgctatacatgtttctactgtggcatctgaatctgcttttagtactagtggtcgcatttcagactcagttagaaggtctttgagtccaaaaatggtggaggctctaatttgcactcagaattggttaaaggcatcacatg

SEQ ID NO: 69420 - DNA, 535 bp, Cannabis sativa
tttttttttacagtaattgttaagaaaaaaacatattacattgataagaaaaatatcacattttgaaaagaattagtgtgtttaaattttataattattccttttttattatattatatttgtaatttattattatttatggtaactatattttctatttccattttacaataccaaaatctcgaatttccttataattactatttagttttatagaaatcaaaaaatagaaaaaaacaagagagagaaaaaaagaaaagagatcatgataaatcagtaattattttaatgcgcatcaataataagtaaaagatagaagagagaaaagaactttttgttgtgagtagggatagaaattgcaccagtagatatgggtctccagggatttctcgcctaaataggaaatgagatcaagatggggacaactttctatccccgattgttaaacatacgttgatgggaacagcaaccctcggcccgacagggacccatttttaggagttttttcatttttatacttcaaaacaattttttt

SEQ ID NO: 69421 - DNA, 515 bp, Cannabis sativa
agccttgtcccctgagagctaaaagatagcttttctattttcatcaatagtaaagtcctgatctaaggccccaatatcatgctcctcaaggccaagacctaagaaagcaaatattgaagcagaaacttcaatatcgctcccctgggaagaaaaaagattagagaaataagaagtaactaaacctacaataccatcaagggtgttaaccacactatcatcttcagacttgagatatttaatactattggatttgttacgaaaggaagcatgtttatggaaagaatttagtatttttgtccccaaccttaagccatttgactcgagcccgctattttcaataaacttcctacatcatagcatctaacatagattgaagctataagaggcgatgtttatcagcatcatgaaggatcaccttattttgaattttattaatatcttcactaaggtgctgaattctggttttgaagagatgattgttgcttttagttcaagttgtaaaagaagagatacaa

SEQ ID NO: 69422 - DNA, 556 bp, Cannabis sativa
tatattttttggaaactaaatatttgaaagtttaagaaattaaatgattattaattaagtgaatgacatgaagaatttttatattttatgttgttgggatattaattatctttatattgacattttaggctttaaaattttgttacagataattaagttttactaagtctcattataaacaatctaggtttttcacaagaaagaaagtttggaaaatattttattcccagctattttcttagggcttttctgctttttttttttttttttattttattttttgtttttggcattgtaaattatttagaatttttctaaaatttttaaaaaatattgatactgtaactatataatgaatattaccataaaaaaaattgaaaaaaaatattctaacatttcggatataaaaataattgactacaaaattataatagaaattataatagaatgttataattatcactcctctatatatataattagtaattattgatgtttcttattttgatatagaaaaatatatgaattttatttcgatcgaaagcagagtttatgg

SEQ ID NO: 69423 - DNA, 699 bp, Cannabis sativa
aatttatttgtctggctttacccgtaatagagtcttggttgaatccaaaccccagtctaattctgttcttggattacgtcattggctcatttgggccttatgaatggaccaataaaaaggatttggaatgttgtaccttacatgtgtcatgttcctaaaaatgtggatagcattgtccattataaaatttcatttattgatgaaccacatgtgtttaatgtttagacaactgaaaaataaatggagaatggtatcctcaccatcaaccttaccaaatgcacacgaccctagtgttctaccagagatgcattgtagtttagacactacgggaaggatgtccttataatccttccaagacaacagtttaagacaatcgtgaagattacatttccacaggataagacagaaggatccacttccttaaattctgcttaattaagtgtttagtaagatgatttcaatgagaaaattccatcattcaactctttccccataagtacgtcaacaacaggaagattaaagatcgaggttcacattactttatcagcaacgagcggcataaacacttaaagcacctattcttttacccccaacactagaatgatctaaaaggtcactcaccacaaccttcaaaatcactaatggattaaaagttgccccattgatgacaaatgtttttgcacagagccaatgagtgtt

SEQ ID NO: 69424 - DNA, 664 bp, Cannabis sativa
caacaagcccgggcacgtgatgaatcccttcacccacctgtcttatttcaagcctgcgaggcattgtatgacagtgaaacgtcatcttaacatcccaaaatttcaagtgaaaaatgagactgtatcaccaagaggcaaaaggcatactaccaagacaataatgagaagaaatagcaggaaaagaaaagttatgaaaactgggttaagaaaacatcatgttattttcaactgacaaactttcattatgagctgtcttgtcctttaatgcagctgcaatggtaaattgctaagcatataatgccatacattataatgtactctagttggttctcattataaaatcaggttcatacctagaccttctaaatggaacatataaaacatagggataaaaatatttcctcttcttgtcccttgataaaatttacaaagctggagtttatttatacagtagtaacaaataacagagagacatgcctccatgttattattagtatgatatttcttgattgataacttttcacctaaatgcataaaagattattgatccaaaaagtaaagagtgctatggaggaatgtaagagaagcaaaatgagtaaagacatgggcctacctttttgcagttgctcctgcctgatttcctgaaccaagtaaatctcgtatt

SEQ ID NO: 69425 - DNA, 799 bp, Cannabis sativa
agagacggaagtgtgcacaaggcatacgaccgcgcgaaaaatgagcccattgttactcggatggttggaaggctgaccttggcttagagaagtcaaggtgccgcacgagtattccgctgcctgaaaaggtgagcccgtgacaacatgcaatgttctcaactgagcctgttgatcgtcagtaattgtagtatgtgttgattgtcagtgaattatattctaagttgcgttgatgatgttctttattcttagcaagtatttgttaatttcagttgaatttgttcgtactattcgaaaaagaaagaattaccaaacaattgatgttttaatgtggtacaaaatttgaatctttgcccccgcactactagtgtgaattttcagcaagttagaccatgatgatcaatgtttatacatggtttagtagtactgtatcataaaccaaattttaattttaagttctctactacagttgcatcagcagatggaaaatgctgactttgattttcaggaatataagttttgtaagcctagctgattgaagatattgtttggtggtgggttttcgtctttgcacaagccaaggtagataaaataattgtaaattctagcattgtggttgctttcaaaaaaacaaagaaggcttctttagaaggaaagtaataaatgaaagtcatttactttgaggattcaaacaagttaaaccaaaaaagaaaaaaaaaagaaggattcagataagttcatgataataaaatttccgttaagtagactgattaccacttagacagaatttaagttgctacta

SEQ ID NO: 69426 - DNA, 942 bp, Cannabis sativa
gtatcattaaaaattaaaggaatataccatatttctagaaatgcatgtagttcatctcatggcaacacaaatgttgatttggtgttgagggatgtcaatttatttatggatgccaacattaaagaacatgattggaagagtggtcttgggatgatggtgatgaatcggggtggggagttcctctgctcggctgcttctccaacaatggttgggttcgcccctcatgtggcggaggcagcgactttgttgcaaggtttacttctttatcttcggcttggttacttgaggctcacagtgttctttgatggcctttgcttagtgcaagctatctcaagtagtgataggaggtctactaagtttggtacaattgtgcatgacataaaagaggcttctctttctttcacagatattttcttctcttattgtaatcgggctcataatgttatggctcattctctagtttgtattgctttctttgaatgtctctcaagtttggtgacctggtttacctctgtctcccaatctaattattctgtattgtctattactctaatttctttgtgcctcttctataaaattattccttttcttaaaaaaaataaaaaatcagaaactaagcaatgtatataatatataccgatagaaattaagagtgccttaatgtgaagttgctcaatcactttggaataagctttagaatagtaatattttggagcatcacaaggttctatggtggtgcatcatttctaatgctctcctggttagatccgtgattggaagaagatttcagattgaggatacaagttgtccattatgcgggctgggggaggaatctatagaacatttatttttgtcatgtgatgtggcgatgcacttgtggcgatcttcgccgtggggtatttaccctgtttgtgatactggtattcgtgtttgggactgggt

SEQ ID NO: 69427 - DNA, 659 bp, Cannabis sativa
acctctttattaatttgttccactcatatcgtctaagtaacaccgagaaaccttcagcataaatcaaaaataggtaagagataaagggtccttgcctaatctcacgaaaagaaacaataggctcaatcttatgaacaacttaataccttgccgttgaaaatcaaccagattctagctgcatctaatgttatgaaaaaccaagtttttgaagcatgagtctaagataactccactccaccctgtcatacgatttactcatattaagctttaaagccatgaccccctccttcttagaaaccttctgctccatgtagtgcataatcttaaatgacaccatgatattatcagaaatcaaatgacatggtataaaaaacactttgagtgtcaaaacttatctttggcaataccactttaaatatgttggccataactttagaaacaatctcataaaccacattacatgaagaaattggccttaaatcacccatcttcataggattcgtattgttcgaaatgaggacaatattagtatcattgataccaagtggaaaattgtccatagagaaaacttgttagaccaaattcaccacatgcacacataatatgccaaagtttctaatgaaatctctgactcatcctatcaggactcagagccttgt

SEQ ID NO: 69428 - DNA, 735 bp, Cannabis sativa
tttttgtttttttttttgttttgtctgtgttttctcctgtcggtgtgcttttctttgtggggcttgggtgtgttcctccttgtttttctctgtgctcttttgtcttagtgtggttggtaggatttggttggtgagtttgtttattgtcctgtgtcttcctttgtttctcctttgttgggcatttatggagtcaatcattgtgtccaactcctctcttaaaggcaaaagttttacttgccttgaaacctctgtcaacctaatccctagtgattcttctctcaaggctttggcctcgtgttgcctgtttgggaaagtcattgctcccatggttgtggaagaaattaatgtcactgattttgtggccaaaacctggaaaattcctgtatctgtggtggccttggtggataatgagaaaacttctaatatcttcaaatttgggttcgaatgtgctgatcacagaaactgggctattgataacggcccgtggtgtgtgcgtggatactctctagttctccaagcgtggactccgaccatcgttgggccggttactttccaacttatgcgtgtttggattcaaatccacaacctcccccatgagtatttttcaaaagagaatggctatctcctaggggagatggtgggaaaagtgattaaagttgaactggaggaagctaatcctgcttcctggagtaagtttatgaaggtgctggtggacattgaatttgataaaccttt

SEQ ID NO: 69429 - DNA, 683 bp, Cannabis sativa
cctccgctgtagaagagagagtggctgtagaatccgtggacacagaaacatcagtcacaagatcagcaacctccgaaaaaagatgctgatgcaccatttaaaactcaactccatttaagcattttccacagagtcatggtttcacttggtcgtttaggaataacatttggggaagtattttcttgatccatagcagcagttgcacaaaggtttacaaaatgatagataggtgtgtgtggtattggggtatgaagttgaggtttagactgagttgttaacggagtgttgtgagatggcaggtatgtaacaaaaacattactgggcataagaggagaggatgatatgtagtcaatgtcatgcatatagacatttgaaaggttagcaacagggttaataatagtattagtggaagtggtagtagtggtaatagatttggtgggggatgtatgtgttgatgtgttctgaagtgggtgattcgtgtgttggtgattgaaagcatcagagcaaggcaggttaaaagggacgcaagagccaggttgaaaagattgagatgtgtggtgaaatgaagataaatggccagtatttcgttctatttgtggaggggtaatagtagcagcttggtgaaaatcagtggaaggagattggagaccggtattggcaagtgatcccaggatgtgatcagg

SEQ ID NO: 69430 - DNA, 847 bp, Cannabis sativa
ttcctggaatccgttctcgcattctctatcgtcttctctcacgatcaaactagatcgaactaatttcctggcatggaaatctcaagtgttacccactgttattggccacgaactcgatgaaatcctccttacagatctgtctccaccacggaatcttgtcaatggtaatccgaatccatccttccagcaatggcaaaagaaggaccagctccttctttcttggattcgatcctctatgactgaagggattcttgggactgtcgcaagctacacctcttctaatgcagtttggcgtgctcttgaacagaagttctcgagtcaatccaaagctaggctgttacaactcaagagtcaactggccagtgctcacaaaggtaatcaatccatttctgattacattgataaactcaaagttatctgcgattctcttgctgttgctggtcatcctgttactgatcttgacttgattcttcatttgctaaatggacttggacctgagttcgatccggttgtctctggtataacctctagaagtgattccttgtcccttgaagaggtgcaagccctgctattagctcatgaaactcgactggaacgacacacttcggtgatggatgtgtctaccaagatggctgccaatctaacttttggttcaagaaatggcaactttaggcccaactttaatggagggagagggtctgcaccagattctggttcaagatttcccacccgtggctaccaatctcagtcttatcctaagcctcacaatcctaatcgacctttgtgtcaagtttgcatgaggtatggacacacggctcccacttgtcactatagatttgataaaaat

SEQ ID NO: 69431 - DNA, 624 bp, Cannabis sativa
tgttgaaaaagaagaatgaaatgttgaagaacaaagaaaagggaaaattcaattgaattaacaagcaggggagaagcaagctttatatagcttggacctcttaaaccaccgacttcagtaacattacataactgttataacagaaaataacagacaaactaacttaaactaactgaattagttgaatacaaaataaaaggatcaaacacccataaacaccaataagaccagaaatattaattacagtactggaaagaaaataacagtaaacttaataagaattgtttcgtaaaatagcaccctgttttctcatttgtgatgaatattaactcaaagtaagcctgtgaatattttataatgtttccatgagatgtatagaaaagttgaactagcataggtgttcaatgcagatcttgtctattgctttattgaaatttattagcctaaactgttaacctcatttaaagaactcccaagattattgtaattccattttattttcattctttcaagatagcgatatcaaaggtgatttgtgaaatctttttttcgtgcatttatcaaacatgctggtagataagcaagatagtatttttctaagtgctctaatgatgcaacatacaa

SEQ ID NO: 69432 - DNA, 1017 bp, Cannabis sativa
cttcttcatcaattcaataaatcccaaaaatattttgtttaaccacaagcattattcattgtagctttccgatagttatagaataaatttatattattggttttatttaaattatgtaaatatatgactaattatttgttgtggtaatataagaaagtagtaatgttgataaataattattcatttagtatataaaattagttatgtaaaataataacctcttattgaaagattaatataactttaaatatttggtattggttattatttggaacttttgacgggtatttatagttactagccttcaagtatttgaggctagaattatttttctttaaatttttttagtttaaggattttatccatacatttctacatatatctcaagcatgcataattagaaacctctagatgaaagttttttagaaatgtttatattctattatttttcacatacctagaaaattctaaagtattttataattattttttaaaaaattaatcagaaattgttgtgtacaatgctgttatagaaaacttttggttctcacagtgctatctctctctctttctggttctgtccgggtgggaaggaagggcggtttctctgaacaggtatgcatataataatattaatcagcttaatttcgttcaggagaaagaaaaaaggaataaatttgatctccgaataaggcatgcagctacattaattcattgattagtactaaatctcaatatttaattatgttgttatttatataatttcaacttgttatttatataatctcaatccaaatggggacttaggcgagtgggcccaaacctgcccccaatccccacgctagacccctatataaaaggtccacaccaaggaatttctttcatatctaaaatcatacacgtacatatatttgctttgtgcactcaaagagtacacaaagacttcttatttctttacgtgtatatatatatatatatatagattctatctaatatggggaattgttgtaaaggatc

SEQ ID NO: 69433 - DNA, 7540 bp, Cannabis sativa
  modified_base (7331)..(7351): a, c, t, g, unknown or other
ataaatcacttcaaatttcttatattgattactaatcagattgtaaagaattttatttagggcataaaacccaacatatagaacctcttatcttgcaacaagctttagcacatcccaaatggagggcagttatggatactgaatgagtagctctcgttagaaacaaaacttggactatggtttcttatgttgatggcatgactatggttcaaaacaagtgggtttacaaataaaaactcaatactgatggtactattaatagattcaagacacaattagtggtaaaagggtttcaacaaaccctagtattgactacttcgacaccttcagtccagtagtaaaagcttccaccattcagcttatgtttacttttgttgtgatctttggctgggaaattcagcaaatagattttgataatgcattcttgaatagtaaattgaaataaacagtttacatgtttcattcaaaaggctttgaagaccccatatatcccaatcatgtgtgtaaattgaggaaagcattgtatgaggttaaacaagctgcaagagcctggtatgacaagttgaagcaagcattattatcctaggatttttaaaatctctatctcagagaactccctcttcttcaaacataataaggggtcatctcatactagttctcgtgtatgtaaatgacatccttgtgactggtgctcaaccacaggatgtgcaccaagttatttctcatatccatagcaagtttccttgagaactgttggctaggttagttactttcttggttttgaagcccaccaaaatgattctaatattcacctctgtcaatccaaatatgatatggatattctacaaagaacaaatatgttgaaatccaattcttgtacaacccctatcagccttggtcacaaattgtacacttccaatagtgaaccatttgctaatcctactctttatagaagcaccattggttctctgcattatctcactctcacaaggccagacctatcctttgcagcaaataaactaagtcagttcatgcaatcaccaactgttgctcattggtacgccttaaaaagagtgttgagatacattaagggcacccttaatagaggtcttatcttcaaacctgcatcttttcttatccttgagggggttctcagatgttaattgggtgtgtgatattcaagataaaaaatctgtaactagttttttatgtcaagtttggcggcaatctaattttatggagttctcaaaaacaaagcgctgtatctcgctctagtattgaaagcgagtatatggccatttctacgactgctacagaagttgtgtggattacttctgtactacatgaactagaaatcaatttgttcaacaaacctgtaatctgttgtgataatcaaagtgctcaaatgctagcctctaattttgtctttcactcctaaacaaaacacattgaggttgatgttcactttgttagagaattagttttgcagagcaagattgatgtgtcctatattccaattgaggaacgaccagctgacatatttaccaaggctttaacttttctaaagtttaattttttgtacaacaagctttcattggaatacttcccgtacaacttgaaggggcatattgagaaaatgaatgatagctgtgactaaaacgattattagttagaggttgttacatgttagttgttagtctaagctgagttgaacttttggttgctagaatcttgtaagtattaaggtctatatatacacctttctcttgtatatgaaatatacaataataatacaaaagacctctattctcttcacgttattctctatttctctctgtaagaaattatttagtttttgctgtttgggatggaaacttgatttccatccctttgcttatatctaaaaaaataatacaaaattaaattaaattaaatattttcaactacaataattctataattaaaactataattatgtatataagattcaattaaagacatgtacaaatttaagccttatcccctaacttgtgtaatcttattcgtcatgggatgtcgatcttttgcaagcgtttgttgtgtattttcatgaatgagtcctcctttcatgcatggtagagtcgtagctctcttgattctattcagatggaggttacttttaaaattattgataaagtccctacaagtattaaatagattgttagagggttgcaacgaaatgaggtagagtttttgtgattttggcttcgccggtgttgtttagacgtaataagttagtccatgaggattatgatatgcccaatgttatggcggttgagtggtgagataattattggaacaattaccaacttgttaatgcttctcttggtccgtcttggaagcatgttcgtcacgatatcaatggcatctttcgctaactgatacaatgaagctaaatagcaatgcaacaatactgaagcttgagtttaaatttggattgggtgcaatgttcaaggactgaaatggagcgactttggtgtcggtgattcgttgtttggaagcttatctcgaacccgtgctggccaaggtgatctaatttggtttgtctatgactttggccatctgtttgggtttccaacaactaattacagagtcgaattgcctcacatccattactttgctaaagtgagtctaatttttcttttggttatttattaattataaatattgccatattatcacttatctttgtttatcttttatttctgcaaaaccaatagcatagctcatgcgcctattaatttggctcatataaaaaatgatgatactacaattttaaaaggttaattatgaggttttctcctaccaactttgacacgtatcaatttttgtcctatgttaaattttattaatgtgacgattattcatgtactaaagtgtgtcatttaaattttaacatgtactaaattgtattatttgaactttaatccacattagacatttattagtagacttgaaatgaaatttatacaataattcgaaattttttttgaactcagtgaaaaatttaaagaaataatttggtacgtgaaaattttagaaaaaaaaaagctacttagccttaaaaaaaaattgaaagagacgacttaaacatggtcgtttaatacaagatccgttaccgaccttctcgccatttgcaagcgcttcagttaccaaatatcgtcgttgaaggttcgcagtgttcgttttcatggacatggaggcatcacaaaccaattccgagaaccctaaccctaaccccaaccctaaccccagccctacacctatccgtaatgccaattcaatatcttcttcttctccggtgtggccaaccatagacggcccactcggactctcagaggaagactcaatgaattatgcccgcagattctacaaattcggcttccttcttcttcccttgctttgggcggtcaactgcttctacttctggcctgttctgcgtcattctcgctccttccctcgcatttaccactgtatgccccagtatccctctccctctctctatctcatttctttaattttgatttacgttttaaatttgtactctttttgttgaatgtgatgaaataaataagcagtgttaatttgatagttgagaaattttacgatcaggttcctcgatttctgtccttattctgttattggtggtaattgtgttttgctcactaccattttattttactttctgcgttttgttggagacagtctattgctaagtttaaagagtgtttgcttaaacaacttcattttaagaatatgtatagttttaatttatattagcaacctcagtggcacaatgctcgtctgttttcatggtttgagttctgttattttggtttatttattggctttagtacgagatatgagctctgtgtagtttttttgttctatcactgtaaatttgtgagaccatagccaggtgttttagagcagctatagtgtagataccatgagaggtatgattgtatcaagttaggaacttatttacgaggtatgttaatatcattatgagatattcttgaatttaatttagtacttagaatggtggatatgaaagagattgagtttttaatttgacaacggaaggttattttggttattcttgaaagaatgcttaatgtacaaggagaaacgatgaagaatgctatctatagactgaaatttgtttagtgaagtcctattataagctcagagagattggttgataaagaaatgagtgatagtctgaatgtaactttagcttgacttgatttagtttatttcactgttctttttgtttgtttgtaattttggacatgtttaaatagcaaatctactgaagctagaagacttcaaggacttttgatcgttgagaagtaaatccaacttagatgttgaactaaggttgcatgtctataaggaaggagttaaactaagccagcttactgttttttctgaaattaatatgaataaaatgtagacgatggctgggtgcaaattgaagcttctaggatagtgatgcgtttgtggtttgaaatatttgggaatgccttttggtgacaacccaaggaatgttagtttctgggaacctattatggctaaagtttcgaaaggattggatgtttggaaacacacttatctatctagagaagggaggcttaccttcattgaatccgttttaacctcgttatcgatctattacgtcatttgttcaaggtaccaaggttggtcttttagtgtttgaaaaaagctgatgtgtgacactttttgagagggaggtgacttagatggaggaagttgtcatttggtagcttgggaaatggtgtgtagatcgaaatgtaaaggagggcttgggataggcaatttgtgagaaacaagtcacttttagtgaagtgattatggagattcccaaaggaccaaagttccctatggtataaaagtcaggttgtcaaaagaaaagaaaatttgggctgagagaaggtaaatgggaagtaaatagaggtgtaaaaggatgactgctcgttgcccttggaaaagtgccacctctgtgtaagacgagttttggaaatggtgaagttcaaaatggaaaatggtcaagagatacggttttgggatgatgcttagttaggaaacatgtcatttaaatgcgcatttccaagcttagccagactttttagtaagaaaaataggtatatagtggattttttttttgaaagatgatggaacaaggactgggatctacattttgccagaaatcccagtgacagagagctcctagatgtgatagaattatttttgggattgtacaatgttaatctatgtggaatgctagaggataggagagtttggttgggggatagtattgaaatgttctttgtaaatcagcttttgagagtttgggtgtgaatgatattatatagaattatcattacccatcgctcaaactttcaccttgtcttcaaggtgagtgttaaatagtctatttcgaattgttccttcaatatcttgccttgatatttaaaaaaaactcaaagggtgtgcttccttatcaaatttgaagtgagctaatttgcagttggattctgatacaccaccacttaagacttacactaagaggcataaggcaagtgttgatgtggcagttagaattattgacaacacttattctaatgataacacttagggattaattgtttttagttgtgacttgtgagtttgtttgtataaatataggagatgattcatttgtattcttttatgaaaagcattgtgaagagagttgagagacttgggagttacctggctgacttgaaaagctaggaaattgttactgtaagtctttgacaatcaatatagctcatcttcttcatttttttttctcttctgtccctttgtgctggtgtgtatcatttatggtattagagcaggtcgactgggataggtcaagatgcccaagaaaccaggaaagtcagattaagaaaaattaggggagttgttgaatatggaggaaacggtggattcaagaattgtggccgtgtgggatgaactagggtctgttcgtggggaagttggctctatctagaacgatatgcaacgattccaggaagaactcctggagatgaaagaaatgatgagttcgcttcttgaaaaacaaaaagaagggagtgggtcggcgagaaacgccactcatgaagtcccacaacgtcgattaaattcatgttaagtcaatagatgagttgcttgatgaactccatggagcccaagtgttttctaagcttgatcttaagttggggtatcaccaaataagggtacgggaggaggatctgccaagatttgattgcatgatgggcactatgagtttctagttatgccctccagcctcaccaatgagtttctagttatgttgtccgacctccccaatgcttcgctactttctaatcgttgatgaatgacatttttcagtcacatttaaggaggttaaagctggcatttttgatgatatactgattttcagttaaaacgaggctgaccatggggaaaatctctctattgcgctgaagtacttcaacaacatcaaccttttgccaataaaaataagtgtgaatttggtcaaaggcagctggcctttttgggacatattatttcaggcaagggcaaacactattaaagtggctgccatgaagaattgggtaggtcccttcgcaacatctgagagctaagaagattcttgggtttgactggttattaccgtaggtttgtggctgggtatccgcaaaatgcttggcctctcacggaacaactcaaaaacgacaaactttggatggaatgaagaggctgataaggcttttcaagagttgaagcacgccacgtgcactgtgcccgttctagctatgccttcccagcatttcattgtggaaactgatgcctccggttatggtcttggtgccgtgctcatgcaagggtctgagcctattgcttattatagccacactcttggctaggagtgggcatccgatccaatccaattagtaattagatttgaaaagtcattatctgatccaatccaattaaacttcaaaatccaatccaatctgatgcaattactaattggattggatcgattttttaattggatatctaattacacacctaaattttaatattaacataaaaatataaagaaaaatatgtaaaaattaaatatctccctttatttaagtttaatactcaataaacataccatcgttacaatgtaatgtaactaaaagtttcaaataattaaaataacatttctaagtaataaaatagaacannnnnnnnnnnnnnnnnnnnnacaaaacaaccaagtgttacaaattcaacacacacaaaaaaaaaattcaataaaaatataattagtatatattatattgtttattatataagtaaatataaataaatttttaacatatataaatgtaatttgattggatcggtttttaattgaattttgagattgacatccaataaccgatccaatcca

SEQ ID NO: 69434 - DNA, 2871 bp, Cannabis sativa
  modified_base (2801)..(2809): a, c, t, g, unknown or other
ttttatatattcataccatgagttggtattttggctttacatagatgatggttttaatttaaatctcactgttgaattgtgtaggggatgtggttgaagctactgttcctttcatgggtgaatctattactgatgggactttggcaaatttcttaaagagtatgtcaatagtagctgactgtctgcctgttatacattaactagtctaataactttttagatttagaatgtgtgcatgttatacattaactagtctaataactttttagatttagaatgtgtgcatgtacatgaattgatgccttctcatgtttatggtgcataacaaacagaacctggagacagagttgaagctgatgagcccattgctcaaattgaaactgataaggtaatttatcttatccaacttctatggtttaaacttgcaattgctgtgtttgaagcactttgaagggttgttgcagactttgattgtttgttactctactttgtgtatcattaggtgacgattgatgttgttagtcctgtagctggagttataactaaggtaatagttttggaaatatatttaagttcttgagatcttgttgacctactagctattctactcttcttgtactaatttctatgtattggttgtagcttttggccaacgaaggtgatactgtagaaccaggcatcaaggttgctgccatatcgaaatcaggtgaaggtgcaccaatagcttcttcatcggaaaaggctgttagtcagacgccaccaccttccaaagaggcccccaagacagagaccacccctatcaaggaggcaaagaaagaatcatctcccccaccacctaaatctaagggacttccgccaccaccaaaacccacagaaccccagctgcctccaaaggacagggaaagacgggttagttatattaggaatttgtaaaataatacgttaaattggttggagtttctacaatttctttctttcgttatttatttattttttatgtctaggttcccatgacaagactcaggaagcgagttgcaacgcgcttgaaggattcccagaatacatttgctttgttgaccacatttaacgaggttgatatgtaagtttgattcatctatactatctagcgaaagttaagctttgttagtaacatttgctatgatttcaaagttctgcaatctgttgaagtgttttcttctacgaaataagaacttccttgttctattaacatacttgcaggactaacttgatgggtcttcgttcagaatataaggatgctttctttgaaaaacatggagtgaaattgggcctgatgtctggctttgtgaaagtatgtgcttcgagtccttgtctttgtaaaagtgccatgaaacagttgacagtttcataatctttttgtagttcttcgggcatttatcaatcttccttttctgtcttttaggctgccataagtgcgcttcaatatcagccagttgtgaatgctgtcattgatggggatgacattatatatagagattacgttgatattagcattgcagtgggcacaccaaaggtatgaccatcaaagaataaccttttgatataaataaatatatttttgtttaaaaaaaaggtatgtctaaccaaaagcttatcatttttgtccttcaagggtcttgtagtcccggttctccgcaacgctgaaagaatgaactttgccgaaatagaaaaggaaattaacactcttgctaagaaggcaactgccggttctatatcaattgatgagatggctggtggcacatttacaatttctaatggtggtgtttatggaagtcttttgagtacacccattatcaaccctccacaggtattgctttagtttatactcacatttactgtgctcgatacctttgacatacgaatgccttgttaataatttttattttgaactattgtggcagtccgctatattgggaatgcactcaattgtgagccgccctatggtcgttggaggcaatgttgttccaaggccaatgatgtatattgcactaacatatgatcatcggctaattgatggaagagaggccgtcttcttcttgcgccgcatcaaagatgtcgttgaagaccctcgcagacttctcctcgatgtatgaagaagaaatatttggtaaattacattttacaagatacgtgcagtgctctctgcataaactagaaataatgagtttcaaatttttgtttgagatatattttatttgctccttccatgtcaaaggatgttgtcaaatccaacggctgaaattgtttgcaagagttgatatgaattatttgtttattttagttgccaccatatgctaattgaaagtggttactttgcccaatgtggttaatcttagcatattagcaagattggttctgttttgcttctcaatgtggaattttttttttcccattttcatcaaatgtcacatagttgattattccttacatggtacaaattcccaagaatttttctatttaagctctacattctttattttacattataataaaaagggtaaatattattttggatcgtatgttttgctaaaatgaattctgtatttttcaaaattgtaaaaatagaatcttaaattttattttttgacaatttttttttaatataactaatttgaaaataattcttaacaccagtagatacagaaaatataaatttttttgtcataacacacttaaattagattattattaaattttatttttgttaacgcgatttttcattaacgaatttaagaaaatcataaaacgagcaagatgaacannnnnnnnngttaatcaaagtaaaccggtttgcaaaagtaaattcaccaaagatgaacacaagaattttat

SEQ ID NO: 69435 - DNA, 8142 bp, Cannabis sativa
ttgtagtttgcttccttagttaatgccatattttgtggcatttagttttgttgccatatttatcataagatgactcatttttcccatatttttgaaaatatccctttccataaatacctaaaaaggacaaaaaaatattaaaaaatgcatctacaaattcaattttcaagactagttagaatttttatccctaaactttgacgtacattagattatattcttgaaatcttagtcattaaaaatttctcttaaactattgagattattgtattcaaggaaacctaatcaatttcgtgcaattttactaacgtggtgattgtctatgtatcaaatcgtgttctctgaactttgatatgtactaaaatgtatctctatataccaaattgtgcccctaaacatacatatacgtcacgcgtttattaataaaattagaagaaaatttttaaattcaacaacttcaatagttcgaaataatttttaacgttttgaaagatataattaggtacatatcaatattctaaggtaaaaattctaaccagcattttcttaatatttgtgtggatttaaattttatttacaaaaataaggacactagattttacattgttttcaaaatattattgttgcctcatttctagcattgtgttacattgctacaatatggaaataatgttattattataaaaatgtattgaaaatgggtaaaataaattataaaaatatatattcaaaaaaattaggtaagtcgtgcactttttaaaggggtgtttcggtagacttctatttaattctgcatttataagagctttttagtctattttttttcataatcgcatatattgtagttatttatgatcacttgtaaatttttaaaaaattttgaataatttacaataccgaagaaaaaattaaatattttgtttcacgcttgactattttccttgtacgcctggtaagtaattatttaaactttatttttgacattgtaaactatttgaaattttctaagaatttataaattatcttaaatagctacatgatcacggaaaaaaaatagactaaaagactttcgaaaatgtcaaaatagataaaaagtctattaaagtcaaaaccagcatttagggtctactacataaatttttaatatatatatcacttaaaagagatgcattgatgaaccatttacctgttttgacattcaaaaaaaattagtcatttttttatattcatgtatattatagttatttaagatattttacaaaattttaaagaaatttgaaataatttataatatagaaagtaatcttcaaataatctatttcatacacatgtaaaataaaatagtcacgtacccaattcagtttgaatcatattttcgatatgttaattttttaaaactttgtaagatgtgttaaataactataatgtatataattatataaaaatttaactaaaaaattattttaaataccaaaataaataaaaatgcatcaaatgaaaatctttttaaattgtaaaattttcctatacttgagatagtttatgtaactataatgaaacaagaacatacacaccgtttgattccgattgttggggttggatttcatcatatacttggcctcatcgagaagtgccacgtggagtttgaaacatgagaagtggggcccgaagtgaaaaatgatggtggatttggaagagagatatttgaggaggcggacgtggacgcgcggggaacccatggcgaaacgttttcactcttttcttccacgcaacactcacaagcacccatccatttccacgttcatctctctatatatatctctgtaactctaattatctctgtagctgagcctgagtttttggtaagttctccagtttttgattcttttttcaaaacaaaaagaaggaattgattagttgaccgtttggttgtttagaaatttaatgaaaattggagggaaaggtttaattgtgattctaattcagtagttttcggtagctggaatcatttttttttatgcaaaataatggtttttgacaaatgttttcccctaattttcatggggatcaagtggaggatcgggtttcttttttttgcatatagaaagaagttgaattaattttcagctcgaaagattagagccttaatgttgtgtttgtttgaagaggaattagcaagattaatgagttccagcttttaattgttgtattaattttgttagatcaattggactgtgaacttgaattacttaggtgatcatattttaatgagtaattttggaaaattaatgatgtatatttatggttaatatttttctttatgcagggctttgatcaatggcgttatctagaattagtacatttccaagtctggaaagctctgaattttgttatggtaatcgaaatttgttgacaagactcaataggcctagtcctatgttattcattaggaaaaatgatagtttagcattcttaggaggagtgcggtgtacattgtcaagaaaagatgtgacttccgtgagatcagagggaaatggtgagagtgctttatctgtttctattgaacaagaagaagaagaagaagaacgggggcatgttgtgaggttcaagatatctgattttaagattatcaaccatatcagtgtcggccttggtgcacgggtatgatgtttattttgtaaatgggtttgttatgtgaacagaattatatacagaagtttattgatttgagcttttctcttttgtaggcggatgaagtagtttttgaagccatagtgaagaatcctagtaggtaagccaatctaccttttactttggttatcacatttcctatgagatttgagcttaattcatattttactcgaattgtagcccgttgtatggttcaagagttgttctccgacgtcttattagtgctcaagctcagcgtagaggtaaaagagcaatagaggtcagtagaatttgtactaaactttttgttgtggttgtggcacctttattgtcgagatgttctaataactattgttgtttttgtatctaggttctgaagaggttagttcgtcgtagacttttataccattcatattcaatgcaagtccatggttacatctcttcaatcacgagtagtggtcgtggctcattcaccttagtccacggggtaggtcatttactgttaaacatgtattcaaagattcattagaaggaaacctgtgaatctattgtttcctgttatattgcagtatcagggaagtttttctttaagacattggcttcaacaatcagattggcttccaactttagaagctactcttgcattggatgatgaatatgttaggagggtaggagatgacaaaattggaggatctgcagtttctcggcagttgcgaattattaggatattgatgagagatcttttaattggagtatgtattctttcagttggaaagcctggtatatgctctcttttcatggacgaattgttgaaattatggatgtgtgtctttctttaatatttgttctgtttcttttcccttcaggtgaattacttgcacagccatggacttgcccatacagaattgaagctggaaaatgtacacatatgcccagtggatagacatattaaagtaagcaccagatttttactgtcaaattgaagagtgcattttcgtccatgcttgccatcttttcaatcaatgaattaccaacacccagcaaaatttcagctgtttttttttcaactattgtggagcttttttcaacacttgcatttaaaccttttttatcaaaaggaacagaattgtctgctaccttagggtggggaacaagagatatacggggtaccacaaaaataaagaaataaaattagaaagattggtggatatgtgagtatgctaattttaaatttaaggggaagcttcgaatgaaacaacaatttcaaaaagcatgccactcaagagccatgatagtttgaattctgatgaattgtagagcccttccatggagagtgtcagctttcctaaatgtttcaaattcaacaagcacaaagtgttataataatttatctaatgtgaaaccattggtgctcatgaaatctacaatttatatttagttcggccacgcgacagctcagctaatttaacattgtatgcactttctacaaaggttatttttttgagtaattctacaaaggttattagtttcatagtaagttgcaccagaggaactatggattctgatactttaatactatgaaatgacattggcaattctcttttctccccatccccttctcttcttgcctcctttatcacttcaggtttttactttcaggtagggatactaggtaatgccgctgacttttatgaggaaggtccaaacagtggtgctccagacaacaatataaagaggcgacaaatgatgattgctttcgacatgaggtactcattaaagtgcacaatatgtttcaattggacatttagagaacatagttttaacattttttttctctttgtggtgcacagatgtgttggattcatgatggcaaaaatggtgctgcgggaactcatggaccctttagtattcacaaagttcaagtctttcctcacaaaggtatatgactcagctagttttcttgtgcaagctgtttattttctcacttatcaaaaagctaattgaatctaagggacataattttgttccctatgtaagacgttcattgtttgaagtgatcatactcctaagttctgttgataaacgcagggaaatgatccatcatgcctacgtgaattcttattgcaattgcttaacaggaattcctcttttggaaatgctggcctacaagtaagcatgtgtgctaataaacacttactctgctttaaatgctcgtcctcagatttatatgtataagtttctgtttctgtctggcagatgcttgataggaactggggtgctggttggaaccttctgtctttattgcttgcaactgagccttctaatagaataaggtgtgctgcttatatatagatgcagaaaactgcacttgaatgtaggagtagaaaaagtttattactaatgtacctgatccccgatcctatcaaaactccacagttaagtgtgtactaggatggctgacctcctaggtagccatcatgttgcacccttaagaaagaaaaacaaattattacttaaaagttgaacatttaatatcctaacataagatagttaaaaattcaagttaaaaattcttccaaacaatttattcacttgcacacaataatgttataatgcccaaatttcatgtgtatctatattttttatgaatgtaacatcagattatttaagtttacatattaacatttagtgtattggaaaaggattattaggtttaattttatagcaataattattagttttttttttttttttttgaatgagcaataattattagttaatgcatatagtaacgttcaaataatgtttcacagttgtttagatgctcttagacacccatttctatgtgggcctagatggaaggttgtcccatccatgaatattatcaggtggggtcttggttctactgcagtgcgaatttctgaggagtacatctacggcgaccctcaggtatgtcggattgttacttttctacaatttggttgtgtttatttgtaaaatgtgttgactcttgagagccacgtttgctgtccctcatcatatcctacactgaattagaatgtctatcctacacagtatttccattgtccaatggggcagtgattttagttttctacttaaaaaactcataccacttgtcaaaaaaattgtggggaattttatgataatttccttttaaagtagatttatattactatattaccacccaattgggactaatagatgcgctaacttcattttgttccatttgatttttcttacaacagcgcagaagactagcccattttattgaactaatggagatgctgaatcctcatccaaagccaaaggtagaattcatttgcgttttcccatctctcttttgtattaccattctttcacatgatgagcccatagactctagtgctagttagtttttgacttataacaaatacgatagataaatgttaacaaataaccaggcatagcaatttagtccaactctttgtgcaagccatgcaatgcactaatgctgaatagcatttttttgcacagaaaaagttactttttatctattcttactaaacataagttgctgacttgtgagtaaacctaaatcatatttgattccaattttgcagaattggctggagcttctgccaggaaagtggcgtttattgtactgtactggtaagcacataggtctgaccttccggcaacccccagcgcgagttcttgttggtaacgtgaacctaacaatatcgagaacatcaaagacaaagacagccttttcgcttgcctctgagattgacttcacagtcatgctcggtcagaattggccccatgacaagactggtgtaaatgggaaaatgcaagtgaattcactttgtagattaacagcaggtaagcggctgtatatcaaggaagaggatacaacaacaggaaagttctcctggagtccaaatacccatgattccgtagctcagaaactctccggtaggaaatggagaaaagctgttccgttcaaggagttgccaacaagccttccggtggccaagcttgtttcaaatgacattgatgtgacgttgaatcttggtgatccgttgaagaaagacgtcgccactgctggaaatgtagttcaagaaattcggttacaaatcccacctgaaatgtttgatttaacaaagctagtttgtgggacatatgtggattcgaggcttctagtggtgaggggagtgaatggttcagctctgttgttcacaagatcttgtgttgatgaaaacttgagatgatttgttgatatttagatctgtgtgtattcttttgatgtaagttgtgtaagtaattgtttataatttagaaaatgaaaatggtgaacttttttccacttaaggccttgctcttttcttcgtcaactttgatattattaacattccttaacaataccaccaccgatatgtcattctccatcttattagagttatatagagcaacgttaggtggtgtgtagcattcgctctataattagttaggactcaatattatacttaacatctatctatatataaaggagaactatgaggtggtgacatgacattttaaaatcattcaaaaactatttttctctttcttcttaattctctcaatctcatagattgatcccaaaaattgggcattgtgtttcttcaatgtgcatcctccgcccaaaatagcacacacaggaagcactttagcaaggatattccaccatagaatttatattgttccataattttattgttccaatttttgttccacatgggaggggaggctctttggagagcttggataagatacgcccaccaacttgtaagagaaacgacaatttgactccttagtccacacccagtaatcatgaccccttctagaaggcttctcccttttttaaatgtttgccacagtctcctagtcgaaaaggtagactagtttttggaaattccactcaccattgtcccataaaagatctgtaattttatggagtcgaagggagggcaagcaccccattaggttttgggtagaattggtttccatgagccactcagggatcctccttttattttattattatatttagttatagcattaaattaaaaactatttatatttatttctattgttttacataattaaagcttgggtaattgacggcaaaattttcttatttttttaattttacacacttaactccgtgatagatttttaggtggcatcacccttaagtttacttttgtttgcaattttaaagcaccagttaagtttcatcgttaaatgttaactaaattgtcattgtgtatgtatatgtgtcatgtttttattggattcgaggttttagtgtcttacgtacgcaagtgttcatagtggcaatctcaattgacatttaacggtaaaatttaattaacaccttaaatttgtaaacaagtaaacttaagggggtattacaacaaaaaaaattag

SEQ ID NO: 69436 - DNA, 3246 bp, Cannabis sativa
  modified_base (3212)..(3220): a, c, t, g, unknown or other
gtattgctttagttacgtcatgccctacaagatcccaattgtcttgaaaaaattagctactaaacccatctagaccaagagctttgatccccaggatactaaaaatagcttccttgacatcctcttttgtaaattctgcttctagaaaatttggctgctagttagttacaacatgtccaagagcaaccaccctggctttgacaacttgcctattctccattcaggtccctaatagtttcttataataagctaagaaagcttcagttatttcagctggttcttcaactctttcaccatcaatattttggatcgaaagaatattattatgactcattcttttcctaatataggagtgaaaaacagaagtgttgctatccccttctttgaggaaagttagctttgatttctactggaagaaagaacagtagctattgtgtacagcagtatagttggatcttgctgcactttcctacctctaaattttctcatttagtggatcatcaggtaacaaagttttacattcaaagagcttcgcacaggcttgaatgtttgctgattgtatattagagaaaccccctttattaagctccctaaaaatcgggtttaaggccttgattttcaaaactacttggaacattttagtcccatgatacatttccttccatctattctctaacagttgctgatattgtggatgagaactccacatcttgaaatacttaaagggtttctacccacttggcctatttggatgtatcttgagaagtgcaggggtgtgatcaaaaagaccttcattaataaacaatacctcagcagttcggaacctgtctagccatctcgggttgccaagaactcgatcaatctttgaatatattctgtcaaccccttcttgcttattgctccatgtgaaaaaactcccacaatatttgacatcttcaagttgccaattgttcacacaattctagaaggcatcagtcccattgtgtattacccgatcaccaattctttcttctttactcagggtgtcattaaaatccccaaatacaacccacgagtcattcctggacatctcctaaagatctctctatagacacttcctaccatcttccccattaaaatcatagacaaacgtagcaaggaaactatgtttattgtcaattgtagttactaaaagatgaacatattggcttgcacatcttagtatacttactataaaacttagaggattccatgcaatgattatcctccctcctttgagccatgctatattagaggtgaaacaccaaccttgaaacatatttacgtataaggctccaatttttgaagcctttactctcatctcgaggagaccatttaagctgacttccttccttgcaataaagttcctcactacattatgcttctcaaggctattgatcccttgaacgttccaacaaagtattttatccatttgtaagaggaggctcttcccctcctcctttgctatctagtattgcccccaattgatcatctatctcctggttatccttcttgaccttaaaatcttctacagatgcctcaccaagcacttgatatgtgttggatacagcagtatcagccttaacctccttactcttagccttctagccctttgtaaccatttgaaacccatcaactgattccttatgagtcttctctagtttcctatgatcctttttcaccacccactcttgttgtttgccctctttccttcgacaatcactagtagaatgtcccattcctttgcaattattgcaaacaatgggtttccattcataagtgacaacaacagaaacatttgagccaaactcatctttaaagtaaattacatctggaaattcttgttgaattgaaacatcaataagtatccttgggtaattaagcttgtccctttcctttgtcacttcatccaccataattggttctcctagctgcccaattatcttaaacagtgatttctatccccagtacattaattccaaatcatccaactgaatccagatgggaacattgcacgtatcttccttcttgaaatttttattagggtcccaaggcttcattataaccaaacttttattgaagaaaatgtgtcaaccattgagtatatcatccctatcctttatgctactgaatcgaatcaagaaaatcccataggataacatcctgactttgtctactttctccttccataaccttcttacaaaaccatcaagcacattcaaaggtggattcgctcctaacacatagcacactaatgaagaattccaaaatgaaacttccacttctatatcctcaaaagtaattttgaccttatcatctttcttagagttgtcaaaggagttttgaaggttccttaccacatttccggatcgtaggatggatggagtagctcgaagccccttggacaaagaattagagcaactctgattagcagcgaagaagaaattgaaatcagccttgatactctcctgttgcttgaaagtgaagatctaggcgacaagagatcctgagtcacaccagacggttaacccagttgaagcacttcttcctcatcagtaaattccaacagattaattgccagtatctcttcctcaaatttgattttttccccatccgcatttgtaatcactcacttcttctttttcttcctcgcagatgccttcagctttccttgcactcgtgatctagtgtttgccatagcactagctcaaaggagctgcacaaaacaaggagcgagaaaagctttatgactgtccctgtccatattgataaaaagaaaattgtattattttgagtgattatattagtacactgaaatattatttacatgtagttaagtgttttaaggataaagtacattgaagggtgtaacggtaaatttacccgtactcaatgtagatcatctataaaagatcattgattactaggattataacaaatagataattcatagcgtatctatatcatggaacatataaagcgttctatataattgagagtgcaattccaaatctataatggtgcaaggaggaattaataagtttgtgaatttactagctaaattctagatctgcttattcgaagctctgttatataggcccatgcttgccatactagttgagacaaactgtatgtaagactcagttaattgattttgattaatcaattatatttctaaaattagactatgtctnnnnnnnnnatttttcactaagatatggctttatt

SEQ ID NO: 69437 - DNA, 5231 bp, Cannabis sativa
taaattgattgttagtgcatgaaagttactttttctctcaacgtgtccaatagaaaagtgatgcccaacggccttggcttcgtcttcgtgaaatttcactattttttgagatgtgtagggtgagattttaactgaatactctaggtttttggggttttaagcccaggtgttgcgaccttgttcttgggtgctgcggtgcccatgggcctaaaacaacaagggatcttctctgtaagggcgtgccgcggcgccctcgcggtgctaatttccttttaatcttgaattttcgtaaacttgttttgaccataacttttgactcgaaactctgttttggatgttctttatatcgttgcaaagctcgtgacaagctctattatttggtccagagttagagtccttaatgtgaataattatgttatgagattggggattaaccctattttgttttaaatttgggatttgtgactaggaatactggcacttgctcggaatcatctgtggattagaaattctcctcatactttaaaatttagataagaaagtgaaccttgtacatagagtatagcatggtggtacacttgtatgttatgtgaatacttagttagaaatgtgggttaggattattaccctaaagtttctacagctatgcatgcaatatatgaattaattgagtttatgtaaaaggttaagcaagtaaggcataactaattgattatgtgttaagagttatgcgaccatggcgtaactaggttagacttggtaacaaaacttagaaaaaccctaataaggcctcgtatagtgaatagatgtgtgagtgtaacatgtagtgtctatacaatatagacttaggatgtggtggtatcattgtaagtgcggtggcgtgttatattagtgcggtgacacaataatctatgcagtggcatattaagtttgatatgtatgctatatgttatatttgcgtttgattatgctttcttgttggactttcactcatgggtgatctattttgcaagcaagggtaaagcagtatcgggtcagcgatgagttggaggattttgaagatgaattgtacatgtttcggccaagctagactacaaggtttgagtcctatatgggagattgtaaagaaatctcattttgctgcttaggttggcttacatgtaaacaacttgtattttttgaaaaagaattttattgtgattatattattttattttaaattaaagattgttattattattacaaattgttttgttatttaagttaaattgtttttattcacttactttattagactccaattaacgggattagcacaatgtaatcataacacgtagtgttcctttaaatagaacgttacatcctcatagacaccttctcagtcactctttcgcatccgacgaagcatgttgcaagttcttgtaagttgatcaaacctccatccaacatattaatctcaactgcagattcttaaatgaagagatagtcagttcagagatggagttttgggtatactaaattccttttaaatttatttgcagaaaagtccttcgtataatgttattaacactttttccctccaattcgagatgaagagagtggtttatctcaggaagagacactacagaactgttaacaaaatgagcaaaaaaaaaacttctggttctttagaagacaaaaaaatgggccaaaaaggcatgaactagaacaccaatacataccaatgattgatgctatttgctaacactttatatcaacaaagaaatactactgtaattggttattatgttctggtaacttaataataccaaaaagattacatccacaaaccaaaattcttctacaaagcttggaattacatctatattatatcaagccctcctcctaggcctagctcatgatttaagagttgataactatattaatcaacttcctacaatgaatcaatgcatttgtaatatgtttgtattgtactgagtttactttaaatccattttatgctgacactcctgtagcttccattggtatcaaaaacaaaaacacaatcggaatgagagtgcacaacacttgaatgaccatccccaaaaggaggttgtcaaaagaacccgatgatatgttcaaaatcgaagccaaacttgctcccatgaacgaccccaatgtcgatcctaagttgtttattgacatgaatagagcaaataaggttccttcaattccaggtgggcacagctgccccgataagatcagaaacggcataaacctgcagagttcgttcatcgaaacaccaagctcaaaatggtgaggaaaattattgggtaaaagagtgggatgagtaagattatatgatcagtttcacttacttaaattgattgactgcatcagttagagcagatccacaaagcaccattatcctatccgatattccaaagaccaaatttaaccgagacactaaaacaacatcgagcagacccaatacagtcaaaccaatatgagcccacctaaacaagaatcaaggtgaagatgttatcaccagaatttaatccatgtaaaaatgaaaacgaaaccattctcgttttatcttacatgaggattcttcttaacttcatggtctttaagtactgattataagcaaatgttcctatcattagacccaaccatccaagaactcgtgcagtccccaagaacgatgcatccaagttcaagaactcagtctgataatagaacatgactgttgagagattcgggactgctacatgtgccagaaaaaaccaagccattggtctgaccttcccaacagaaaaataaattaagtgtcataatgaataaaaataaatgaaaatgacccttattaattacctgaaaatgattggttttccaaaagcacaacacaagctataagctgcagattttagcgagtggaaccacgacgatgctaaggaatcaacctttacaacattctcgagttcagtagagataactgctgctactgctttattgtccttttgactcttttttcttctgaaagtactgctgctggatttcttgtccaagaaatcatctccgtccatagagctactattcccgtttgccttgctggagttttccaaggtagatgagtcaagaactttactgcttacagaattctccttaaccaagccacatgataacagctgcagggatggtaatatagcaaacagaagaaatattgtatcaatcttgaagttagttaatgcatatcctcctgacaaactcccacatataccaccaaaagccattgccaaccaagacattgactgtagatctccagcaaatgaagccctgatcaagaaacatgtttgagatatgaactacaactgttatactttctcagaggtagcaaaaagaaacttattctactaatgtacctctcgaatcttactgcctcggcaatcattgcatcaataactacatcagccatggccgagccaaagttttgcactgttaagagagatgtgaggtgccagctggaacttctaacgctttcattaagccctagtacaagccatggtacgagagagaagacagttgatataattaaatatggaaccctttttcttcctttaattggtatacaatctgagattattctgcaaatgagcaatacaatcagaaacatgtcaattgctaactccaccctatgccttcaatttcacactctttcaagattagttaatgacacattgtaaacgaatcgacacaattcttgtttgtacataaattgagaacaaaaccatgttattatatagtttaaaaaaaaccaaaaaaatgttctcagcacatatatttgtgttagttctgtatcacaagaaagcaaggaaacatttatacccgtataatggtttaatgctccatggaaaaaatgctactgaaaaaacaaattgagaaactgaaggtgttaacttaagcccatcttttagttggtaagaaactgctgtccatacaaacgatctaaacccctgttaacacaacacaaaacataatatgattatgattatgattaattatgatatagagatagaagcacaattatccaactacaaaaatgaaaagtaaactaatttgaaatattaatggcattataagtaatctaaacatttagccaaacaattttccttatctccctccatgaatgaaaaaagatcgctgaaataatcatttgattaattaaattgaaaggaaatgccacttttacagatatttttaatcatatttcaaagttgattatatggtatggtacattcagcttcaaattcaacgtaataacacaaacaatcttcatcaaatttaaaaaataaactcccaaagtcaaaataggaaaatcgacatgattaaaatcgtaataagcattgaaattcatgaaaaatgtattgaaattcatcaaaatcgtaatatgaacctgcgtaaagtagatcaagcagacgagccaaagaaaggaagccccaaatgcagttcgcatctgagtcagccattgtagcattttgggcgagctcttcttcttcttcttctacagatccatataatattaataatgcttctttcaattcaatttcaatggcggaaaatagaaagagttgtcttctcttttcttctcttaaacggtattttgggcgctaaaactattggacgattatgccatcgctgacccaagctaattgcactttttcccttatgggcattttcgtcacttacgacgaactatgaacacgtccactggcccaactaaatcttgccacctcatcagctgggacccactcaaccatagaaactaaaacaaggttttttgaccaattttttatattcactcactctatagtctctaaaccctataccacttccactagttcttcaatgtaagtttaagaagagatttcaaattggattgcaatttagatttacatcgagcattgttattcgcaacttatttggttagcaatataatattgttattggatattactactatttaatattttctagatgtattattttgtaattgattaaccatattgtttaaaaattattacattaaataatatgaaatttgatatttaattgcactaatagcgatttacacgaaaaaggtactaagcaccactactgcatttcagaaagctaattaggaattttatcccccgaattttgacatgtaccaaatcatgtcccctgaacttttaaagtcgttaaaaatgccccct

SEQ ID NO: 69438 - DNA, 8158 bp, Cannabis sativa
ctaatttacagagggaagctgcttcagtgggagcagtcactggctgagtgttcgattcaaaacgacgccggattgcaactcgtgggtcgcatgcgcagcacggttcatccccacgcttggcaactgattgacgacatgatttcgatggtttgtcggctctgtagaggggaaatgattccttcagcactgaaagacatcaagaactgtatgaacgagtacttcaacatgactggcaaggaaggccaacgcgacgccggtgaacacctcaagatattcatgtcttcttcggcacctgcggctttggttatgctctatgcttcgtccataaagggtaataaagagtatggtgacaattccattaagcttttcttaactttgattcgtacttcattggcaaaagcattgcataatcaatgtgcacctatattgttagagttttgtaagttgcttaggagagttggacaagaggaccctttgtatgtcgcttgcagaagtgctttagggtccttgttggagaattttgttacttcaaatactgggtctgtatgcgcggacaatgttggtgaattgattggggtacaagatcttttcccttttgtcagtgagctggctgacagattgtgggtagatttgtgttcaaatatggagttgccaaactctggaccgatggtaagtgatgctcgtgattttagcgcgttcttgctccccctgcgcactgtgataggccagaaagtcaatttcaatggtaaaatttgtgaaggggattttaaacatccgttgtatggacaagagattaagtatctaagggatatgtttaacaagttgctaagtgggatggacgagtgtcttttcggaatggaagagcatttagctgagactgatggtgatgcaagtcttactagatggtctcagtgtctttccattttgaaggatctatatagcatttctgaattatatgatggtgctgaagaagaattttggatagtgttgatgcaaagaaagtattcacttcgagcgctaatcatcaaatatgcaaagcgaactgatgatcatcagtggattcttagtcacaaggatgtgcttgattttgaatcaagaaggcatttggctatgatgatgttccccgaggtaaaagaagattacgaggaactgcatgagatgctcattgacagatctcaactgttggcagaatctttcgagtatatattaaagactgaacctcagtcattacatggaggtctgttcatggaattcaaaaatgaggaagccacaggtccaggtgtactgagggagtggttctttttagtatgccaagctatatttaatccagaaaatgcactatttgtagcttgccccaatgattgtagaaggttttatcctaatcctggtgagcttcatatgcctttcaagggattattgctcccaaaaactttcagctcttccttttaatatatttatttctctatgtatgctatgttaaacaataatatcttgtttgcaaagggatgactaaatcttagatgtcattattacattcaatctgttagaggcagatgccatttgggtgtgtgtctctgacagtagagaagagactggtgagaggagcatttttgtgtttaaagttcacgttaaatgataatcagaatgcttttgattcctagttctttggttggtttgctgaaatattttagcacatttcatttttgactgtaagagattaaagtactgtggaagtcttgataagttctcctcttgccatgatagctagtgccataataaggatggtgaaaaaattataagataatgactcatgccttgtcagttaatatattggtcctgctgtatgaatgctgtgtaagaaaattagaacaacctatttgcaggaaagtgaacttcaattatatttcagggacatttgtgttgccatcttgttttcgttcttcatggataatggtatattagtatattagaattcactgtcctcggtcttttcaatttaagctcctttttggacaaagatgagggggagggaatgttaggttatcatatcatttgaagttctcttgtgttacatgagtgatgcttccgtttcaatgttctgtgactagaagtagtatttctatttcatttgattttcatccaatttctttttgcagcttcaaaagttgatccattgcaccctgaatattttcaatttgccggtcgggtgatcgcattggctttgatgcataaagtgcaagtaggcatagtatttgacagtgttttttttcagcaattagctggaaattcccaaatcactctggaagacatacgcgaagccgatccatgcttgtataatagctgtaaacagatacttgagatggatgcagagtttattgattcagatgccttagggttaacttttgctagagaagttgaggagttaggatccaggagagtggaggagctctgtgatgatggaaaaagtattattgttaacagccaaaatagggaggagtatgttaaccttctcattgagcatcaatttgtcaaatccatctctcatccagtgtcacgcttcaagaaaggctttgctgatatgctttgtaatacagaacatcaggagttcttttttcaaagtttagagcttgaagatcttgatttgatgctacatggaagtgaaaatgctattagtgttgaagattggaaagctcacacagagtataacggctacaaagagaatgatcctcagataatctggttctggaaggtatgtatagcttcgatatcttagtttctcaattataaatttgatgtcttctttcagttcctctatcttgctgctataactgaatatgttgccttatttgaaatcttcccttcgaagttctctatggttttatccttttccgttgctctgtaatgcaatggaggtgagttgttgaaagtgaaactttcttacaagcatattagttgtatatttgtcatgctaaactttacatctacaattcttgagatatatgtggtatccccttacttctttttttccatttatttagacaataaaaattggaatcatgattatctgttagacatttgttttgccattttacatgaaaaacctgtagaagatgattctaggtaaggtcaatccttagaattttctgaaatatgccattacgtactgtctttccctgttcgattctacatgttttcttcactttctatttatttgctttgtctgaaagatgtgtatgaaaaagtgtaatgttgaatgtgcaagttcattttgtaacaaaggacaaaatcttttcacattatgttaaatgtttattggaagtttgattgtttgtcaatggaaaaacatagaaagaaaaactttagtaaaattgatcatggcctatccatgtagagctatactgtgtcgttgacaaatttatagatgaatgaaaactagcttgattgcttttcttattgtgtttcagttttgcatattttgctttgattttgttattttaagttgcctttattcttgcatgcatataagtactcatctcataagctcgcctttggcactgatttggatgttatgatatgcagattagattttactactgaaatctactagttagttggggctatttagtataatttttctacttttttttattgattttaacttttcggccttataggtcaaatttcaagaaagtaaaagataaaataccactaatattctttactaatttcagataggtctgcaggctatagccaaataagaaattgcactacactaagtaattatacaactttaaaactgaaatcataatattatacttcaaaaagagagtgagagggagagagagagaatgagatcaaaaggctaaagagtagaattccaagtaggtttccatcaaaaactgaacgtcccaccagtgcagtatttttaataaaagaaaatagaaactgtacaaagagaatctggaaaaggaagcctctttaaaacaatgaactaaacttctaagggaaaaccttaaaagggaaaatagcacaacaatttaacaaactatccaacactaggaagaaaaaacatcctaaccataaaacttttagacacaaaaaagacagaaagttttgatagaagacatcaggaaaagtcatccatacttctcaccgttaaaattaaattataacaataaaacccttcaggttctcattctcaagagaaattggtttggaaattctttgcaaatgttataaagtcacatgcacagaaccaaacaaccaaattttgagcaaaaatgctttaggtgaactctaaagaatatagcgaactacatgaaggaagggaagttgttaatgattgaacttcaatttttcacaggccacagcgaaaacctaaatgatattatactattattactgaaatgatagacacgaagaaagctaggggtggatgctacacagagtgacaggattaggaggaggctaatgcaaccatgagtgtcactgagtattgagtgagactggcataccaacttaggtcgagtgaggttgtactggtggcaaaacttactacagttgaatgatagcaaatttgctatgcttcattctttcaggattagaattttcttttctgtaataaaatttaaacaaacattgacatagtattaatatagtttgctccttaataatgaacataatagcaactagagagattaatttttgtgtggctaaactaataattgaaaagtgcagattgttgaggaaatgtcagcagaacagaggaaggttcttctcttcttttggacgtccatgaagtatcttccagttgagggttttcgtggtttatcttctcggctttacatttacaggtcctcagagcctcatgtgcgcctgccttcatctcatacatgtttttaccggttgtgcttccccccatatccttctatggctatgctgcaggagcgtcttcgcatcatcacccaagaacattttgggagtagctttggtacatggtaataataataggtatctatcctgcatttaaagttaaaaagaaaaattgtgattgcacataaaagaattgaactcagcttgtacagattgtaggattagtatcattatcttatcagtagtctgtgtaagaaatatgctctagtcctcaagttctctatattcagggaggtcttgtcattgctccttttttgtctgtattatttataaaggtataatagtgtagtatatataatatcatatataatatataatatatataaaaaaaaaataaagtagggaaggaaagaaggaaagtttcttctctgctttaatagacctcccttgtaagttgtaatatttcttgggtttttatgtcttgtaagttgtaagtacacatatcgtgcaatgacaggccatttcttcagaccaactatatttgttattctgttcttaatcaactacattcacgcacatatgctaggaattgagacattgttcctgaatatttgagaaaatgtgaaaaagaagggcaggcctaattcttcatcataattcaaaaatcatttgaagatatacatatttccttagtatggccttatagtcaatattgattattctttcctgaattggtgatggaggcgggaatgaatggtgttcacttgtctgttggattagagaatagggtaatggacatgattgcaactgtttatttattcaacaagaatttggactcatgagatcaggagattctcattcctattgctcctttaattataaataaaattttgaaatataatattaatgatctcatgactaagaagatcagggaaataataattttaaatatagaaatttaattatacattttttttgtttttaaaataaaaatgtatttggttactttaatttgtaccaaaagagaaaaaattatgaagatattgatagaggtataaaagaaattataattaaacgaaaattgttttaaataaattttagaagtaactaaattttgttgttaaattttaaaagagtaaaaatgaaaaatgtttaaattgttgttaaaagataaaaattgagaaatgtttaaatttaaacgtacactaaaattgtaaacaagattttttttttttttgtaatttgttttagaaagttaaaactggaggaaaagctgctccaatgctgctttacatacaaattaaactttttaccttaataatttggtgtgtttaaattaaagatagtggaaggtaaaactaaaataattgattcctgccgtttattagggaagtgatgtccaaactagcaaatagtaaattgtatagcggaaaaaaactaatgtgacaaaaataaagaaatagtatccatttattcaaaaccaaagaaaatcacaccatatcaaactcatgactactctttctgaaacaaagatccatactcatcacccaacctatatagacctcacacactccttcagaggtttcataatagagcatgcattttcctaattcatgataaggggtttctaattcgtacaccactgtcaccaatccattactctcttttttttaagcatatatttactcatccgataaaagtgctcctaataataaataaataactgcagcttccaaactctaaaccccatatccaatgccatcatatagtaaactagtaataaataaaagaagagaaaaatatgaccacccaagacttttgacacatatataaatatatctatttatctatgcatcttccttctcaactggaacttcagtggactcctccactggggtctcagccacagcaggggtagcttcctcttccacggctgctacaggggtggcggcggcggcggcttctggctcggcttctttggcctcttcctcaacggcttcttcttgtgcctcctctgtggacttgggttcctcctctgctggcttgggttcttcctttacaggctctgcctctttggtctcaacaactacctctttctcatcagctggagcttggtcaagggtctctgtggcttcttcttccttcttctcttcttcttctacttctggctctggtactactactacttcagtggtctcagctgccacggctggtgatgattcctctacctttgtctcctcaaccttgattggctcattctctaaaagtgttgttgctgcagctggtgaaacctgtgtgcatcaatataataacatttttagttgattatgatttatgaacatctcatgattttagttttagaccggttaatcagatcatataaattaaaaaagaaagaaaaagttgaaaaggaactgaatatacacatgcacagattcgtgatgatcgtgtgatcgcgatcaagttgatgatataataattaattgaatatgagtttttcatcaaaagcttaattaataacattttgtgactgagatcagtgaccatttaagatttttctagaagcaaagcaaatgtttggtactaaataagaactcaaattaaaataaacaaacaaagatattgatcaagtttcaataaaatgaattgaatcaacacttctacactactatagtatattatatatgaacaaaagaaagaatatcattatcaactacttgatcagaagttttgatatgaatcattatcaagaggtaattacctcaacagtggccatttctgaaataaagggtaatgaaaattgaagagagaaaaaagtgaaaaaatatgagaagtatagagtgagtatgtggagaaatattaatgctgattagctaaggtggtgaagaaaggagtaatatgagagctatatatagagacgttaagtgcctaaaagtaaaaaaaaaaaaagagagagaatagttgaatgaaggctttgaaagaggagtggggaaatgaacatgacttgaagaatcttttttccaaattgacacctcatgtcactgacacatattaaaggacacaaacacaaacacaacactaatttgtctagttgtaaattgtttttgctccttaattatttttaagaatcagaattattttcatcaattattatagattagaatcgtattgtaaatttcatttgatatagaaattaatagaatcaatgagaaaagccatattatgttatggtaatggtaatggtggaggccatttttcgtataagcatcatcatatctttcttttg

SEQ ID NO: 69439 - DNA, 6287 bp, Cannabis sativa
aaaaaaaaaaaaaaaaagaagaaagaagctttctattacaaccatttggatagaagtgactccaaaagctagcctaagcctaagagaaaagggtccccaagtagttataacactaaccaatcccatacttgtcaatgtgggatcctaacaatacacccctccttagaaggggacatccacggcggcccactcagggcttttccacaggtcaccccctcagcgacgtcggtcccacttgagggtgcgtggctcttataccatttgttatgaccatgtaggtagaactaactctcaaaaaatagcctaaaggaggaggatacccaagtagtaatcaaccaccaaccaatcctatacgcagtcaatgtaggatcctaacaccttcttcccacttcttaagctagacatttaaagaaagaaaacaaatatggagactaaaatgtaccttgacattgtctcagttactaaatagtgcgctcatgtctttagttaggagccagaaataaaggcttgacagaaaaagaaataagaaaagaaaagaaataaagtggtaatgggggaaaagaaatgatgttcacctctttcaagcactttgacctatcctccaaatttcttatctcctttccaatagactcccataaatctcctgatttctgttctcttaagttcaacagcttctttgcggcatatttcacagtgttgtggggtttgctcaatcctggaaagctataaaatgcatcaaccaaagcaggctcatttaaaactagaaaaccaaatttgagtgacccagagagcattttgagagacagtcctccaagcagagagacagaaaaagatgggttgccagactttagctttaataaactgtcagccaaattccaaccaccccaaccctcaaagtcaaattccaagcccgaaaatgaagtgtcaatgacaactttggccccaaacttggcacatatacatagcaaattctgaatctctttgttgttgtacagcaaaccagttgggctaattgtaggtccagaaatgtacacccacgggttatgcacagtttcaagtatcccagaaagtgttttctcggtaagcttaaagccttcttctagattagtgggtatatttaatatatttgctttcagaaacttagcagcagaaacataatacccatttgaaccagccggaaagcacaatgttccaccttcttggatacagcaaagtaccaacttattgaaaagtgcaagtgtgttgtcggcatatataaattctgtactattatcagctgggaaaccataattatttttaataaattgcttgatgcagggggtaggatcggtttcagactcagccatattctgccttgcaaagctttcaaaaatagaagctttgacaggagatggaacaggcaagaagctttgatcagcatccatatgaatcaaggaagtgttctctgtttcacttactgtcaactcagcattgtcaaggactgagatcgctgaactagaaaacccaatcatctctgctgatctagccttcccagattccctctgaagatcatacacaaaatcagtatgagaaaaaagtttaaacaaattgataagaaaagcagtttactcagaatttcacattaagcaaatcaagacctgcaattttctacttttagtacataaatgactcctgacaagaaaacttcacgatagagatatcacatttcaaaaggtaccatacaataactatgttatgtattaagaaatcccttcttagaaaaagaaaatgttaacacaatatactgacctctgcaggtggatgcctgtcagaaagctgaaaagctaaaagctcatggaaaagacaaccataatagctttgactaatcagtgctgtatttccctctagcagttccacagtcttggacaaggccttaaatatggcctcatcttctgaaatcacaaaagctacttctaaatctgaatacacctgaaaagagcattttatcaccattaatgagaaaatgtttcagcactagcaggatcctgattgactaagataaggtagaagctatagagatagccagagtaagttaagtgatttatagaattaaaataaacaagtacctggttttttaataagccacatattattgctgcatgtgacggtagaggagtttctgcaatatattttaggactccattggaacttggaagactggatagctcaaagtgatcagatatgtctaagaatagacgagatccaatttctcttgttatatctaaaagatgcacaaaggctgcactagtaacagcctcaaattgagcaatcccagttacaaccacctgtggctttagctttcttatcagctctatcattagctctgactggcggggggcttcaatgactgtaagcttgtcctccacaggactagtgctcccattaccctacaataaatagattgatagaatcaccatcacgcagcaaataaaaccaaagaccttgtccatcccccaattcaccttttctgaacttataattgcattgaaagggcctcctaaactcagatccaactttacgaatttgaaataaaatgaaaactgaaagctaaattgatatggaatcgtacaaaaacattagctccaccgcttaaaagttttgaagtaactctgggacactatgaaacttcaggaagcaatgacaaatttacaaatatagaaaactcgcaaattcaacattctaaagtaattttgatcacattgattaaaagttacacatataaaccaaaatcatgtaaggtcagattcttcaaagaattaataaaaaatattttcatcaatacaaaagaactaaagaaagcaaaagcccatatgaacagctaacacaatacgtaccccaagacctaaagaggttaaccactgccgaggaaggtgtcgtgtcagatgttcatcaacaattgcgagtcgaggtgaaaacaaccgtagagcattctcaatagcaacagcccttgagggaaagacaacaacattcttgccacaagaatgggaaacagaaagtcagaaatgcagggtattttatgaaaccaaaaaccaatatgcccacattgccacacaacttcatccttaaaagatattttatgtttattttagtatacttcatttgtataatcaccatggttaacaaatatatattgaatgaagcaaggtcaaatctctaagacatgataaacagacttaatcagagcagaaactagaagaaatggagagaaaaagttttcttacgtcggcagtgagtggaattctatgatatgttttcatgaaaccagcaatgaggttacggaatcgtttgcttccagctggtggttcatatgtgcaaaaggaattatcattcagaatgccagctagataagctaggaagggaatcttctcatcagcaacagcatcatcttgaaaggataaatctaaagaactgctgacctcttggaaaccacttttaagaaattcaaaaactttcttcacctataaatttagtaagactattatccttccgtttcaaatgcagaatacaaggctttgaaaaatggaaatcaatcatgtacacacctgagttggctggcgaagttgacagctatatactgatagagcatgagaaattctgccacctgcctttccatatgcccatgctgttcgagcacaaataggctggtcagcagagagccccatgaagaactcaaaccggtgagggctattcttttcaatttcaactagagctgaaatatcagtatctgaagcctgtaaaaacacatttcagtagagtaaacattgaagggtacaaatgatctctgactaacaataaagttaacttacctggagaatttttgtctgccaaagtttagtaacattgaaaccacggcgttcaaacaagcgtttgcaaacaccttgtcctggacggcctcccatgttgaagatcattatccccatgggtttgatgacagatattccttcctcaactgctctagcaataagacctaagccgaactgatcctcaacaaagcccttcataatagaaaacgaaaaaaatgcattaaaacaattaccataaagggatggactttctgcattgcctattaatcatgtcttgattcttttcaattaacaatagtagaccttttctgcttaagaaatatgaattgaagatgaaagaaaggcaacacaaaaggacttcaaatatacctcattcttataaatttaaatgaactttcatctaagaggaatacaggcacatcagaaatttaagagtgtatcaaagaagctaagtttgatataaaaaaaaagatattcctttattctgccgaagttcaattaaggaagacccacaactttggcttagtcactttgcttcatttcttaattaactttcttcttagtaactcataagtgtagaatgaaaatcacaaaagtgaagttgaagcaaattatagtatcattttaaaagaaccaaattcaagaaagtactcaaaaatccgaccatattggaccggtaattagagaggttttggtagactgagaactatgagaccacgtaaagatataaattttactttgcagaatgaaatggaacaaaagcataatgttgaggatctggtaccaacctgaagtgcacaataattgcttaacgaatacagaaattcttcgcttgcattttctgttatcatcttagtcattgcatctggatttgggttaagaatctgcgtgaacatttttataagaatcaaactattgattcacaaaataggagcattcttggattttgaggagagaggtatgaacccacctgaggaatgcatccaacaattcgttcgagctgaatgccactgtctctacaataagacaaaagatcagactcgtaaaactcaactctgtccagcaaagtcttgttgtccccatcatagacaggttgacccatttcatccaaagcattcaagtacaagtttatccaagaaatcttaatcgctctggggttgatatcaagcccataaacctgaaaaaagttgtacagtcaaataagaacaccaaaaattaaggttttagagtcagaagaacaccaaaaataagaacaaaaacaataaaacaaataaagaaatgaaagtcagcaaaaaaaccttggaaggcaaccatttctcagctatggcaattgaaatccaaccattgccacaacccagctcagcaacagtcctatctctgaagatagaatccgggtgtctatttaaaccttcgtagaaggtaaaagaccagtcctccggtagaaaaatgctggggatcaccatagtggtaagcttcttcctcccttggtaacctaattattatcacaaacagaatgcagacacataaaaaccaaagagccaatatatatatatatatacatatatcatacatgctaaagtctttcatatggcttttactttttcttcttcttttttctttgctggaaaaatagaggcaagcaaaagagaaatgggttaccctcatattgatcaaggatgatgtcatcgatccggaaatggtaggtctcgaagcatttatcagaggcttccttggaaggaaaccttttgtggaggtcggagaggaagatccgggcctgaacacgagtgttggggtcctcaagacgttcaagcagatccctcaaagcggcgtatgcagcgtccccagactgctgacactgtttcaagaagtcatcaagagttgtttccgccatttctctaaaagtggacgcagaggcagtagaacgaggacgatacactgaaatgatatgtcctcttctctcagtctcgggtgaattaataaataactaaacaaaacatatggtatgtgggacacgcaaagatcttttcttcacccatttttttttttttattattattattatatttttttttcttcttaaatgtattattattttaatatttcagtgaaaccccatgctctattaaaataaaagttgtgagcgttgtcaaaaatgctttcttataattttattcattaataaattatattttaaaatagaagttgtgtgtggatataaaatattaattacatatcaatttttaataacttgtcatagtagttagtaattatattgaaaaataatattttttttagttaatgtttaaaattaaggatgtgtttggaagtaactgtgtaattactaagtatggtaattactagggtggtaattacacagtttagtaattacactatattttacaatgcaaggtatgtttggatatgaaatggtaattatatataaat

SEQ ID NO: 69440 - DNA, 1881 bp, Cannabis sativa
ggtaacttcgcaatttgttgaagttctttgtaaaggtgcttaattttttcttcttctgttactaggggttgaatgatcctgtaccagatactaaagaattagatgagaagaatgctatggctttggccattgtgccagtcagtaagtcttcttaactaacttttttatttttttatgaaatgtgtatagattaatgcttgcatttgttggtaactccagtccttttcaagtaaacttgtacttgttctattccacaaaaggatgtttttataattgctttcattgaatcttgtaaaactaaagacgtcgtgataatatttgcagctgatcaacaaccatcaactgctccaacttatgcaaatggaacttcaggctgggaattggctcttgttacggctccaagctccaatgaaactgccacagctgctagcaaactggtacgtattccaacatttctgttgagttgtagcttgttataaaattatgcaataggctcgtatatatagatatatagatatatagatatatagatatatataaaaggtactgaagtcagcttgcgaaccttacttagctatactgacacttcttattgtattataaggcgggaggattcgacttgcttacactagacagcctttacgacgatgcaatcagaagaaacaaccagaatgtaagctacaacccttgggagcctgctccagccggagctgctcccatgttacaacatccagtacacgatccatttttcgcctccagtgcagtggctgcaccacataacgtgcaaatggccaccatggccaaccaacagcaggctttcatgctacagcaacaacagcagcagcagcagcaaatgatgatgatgggtccacaaccacaacaatcttcaaaccctttcggaaatccttatggagcagccactgtccatccctatggctcaggtatgcctgttcaagcttacaatccgtatacaggccttatctagaggttttcttcgaggaacgttttcgttatcaaggatcaaaaatgatgtgcagattattcaaaaatgggatattggatgaagagagatgtgtaccatatcttgtgcatgtgcagttgttagctaggatcaagattctttctcaataaataaccatagggggaggaatagcaattattttatagttacatttgaggttggtaatgatgtttttgagactaaattttttttagaccagaccctgctttattcttgttgtttttataagtagggaatctttttattacatttctaatgtttttccttaatttccctccctctttcttggtgtttttattattttttataatcttttattataaggcttcatataaataatagaaaaatatttgtactaagtgattgtttgatacacatttatgtaatgagatattaaagtttgatttgtccagtttatatagaatactagtttgattaatgagatttctattttggacaatattttgcaatattatcattagtgtcttttttaataaattaattatcattagttgccattgtcaagtttcattggaattatcttcaaaattgatgtggagttggtttaactaacattcatggtgaaatatcctggataccgtcttaaattaaatgtcccaagaaaataaaatcaaattaattgtgtaatttattttaagttgaaactagttctagcaataaagtaggttgttaatcaataaaataaataaaacaaatccattatttattggtcattagtagaattaaaataaaagttaattattaaagaaaggacattaaagatgattgtaacgttttgttaccaatgtcttttcttaaaagaataatattaacgtattaaaaacccacttcaattaatg

SEQ ID NO: 69441 - DNA, 6958 bp, Cannabis sativa
cggatcggattggatcgaaaatatgaaatctgcacttagtgcggatttgatgttgtttgaccaaaaaagtgtggattggatcggatgaacacccctatataatataagcacgagaagactaagcaattaaatatgggaagatggagctcaagcacttaaactaatgtttttcaatcacacgacttatataaaacaaggcagtacaaggttgaccgaaagtaggactactcagatcaggaacacatttccgagaaagaaccagttcatgaagccacatcactatttattcattaattttgtaaagctttattataattactccgtacgaaactggaattaaccactcaagccttttttgtctgtatgtttaatatacattttgctttcaagtactatcttttgcaaaaaaaaaaaaaaatcatgtttaagatcttttatctctacagaattcattaccaacctccacaaacacacagaaaaataaaagaatacgtttctctacggcaagatttctaagtctcataaaagaaagtttcactaaagattaactcaactaacagtaacgacaaggctatttctatttttctgaaaagctaataaggttatgacattatggaaaactttgctttgctaagaaatttaacatgtaatgtattacttgtttgtagtacaaactttgtacacaagacttatttctagaaaccaagacttttcctttttccacacgattgtaataaaattttaattttggaatcaagttaagaatatctgccattcaacaatattcagtttaaaacaaggtataaatctagatttcaaaattttcttcgcatttcctactagcaattatcaggaaaaaaaaaatatactactgcgtgcaaaaatgtaattaagagagagaaaggccatttcatgatccaaaatgggagtttaatacacagcattcacctcctgaagaagatttggaagtttgagatcctagtacagaacaatgcccagagaattcaattatatcccttctaaagaataacatcacggctgccgtttggtgcgaggcattagagcaagaataatctttttccttggaccctgcaaataaacaatttagtaagtatgaacattgcattgggttcagatttaaacaacagcattatatagggacgagggtaaatgggattatatagagtgagacacggacaaaaaaagaggctttgtagaaatcagagcaactttttaaatttaaaaatgaagacaaaagttctcataagcaggtttacccatgcatataacttaaggttgcacaactatgttcacggtcaagtaatagttgttaacgacaacaaagaagtcacagttcatataatcctatatcagtggttacagatttctgctgcctatactttgaggctacatgatttaccaaacaaacctccatggagaacacaatccctgccatttagttttcacaaataatgagctactgatatccagaaaggcatggaccaaaatttggttgtcatatcctgtgctttacttgtagccaataacaaaggaataaacatgcaattttgcaagaaccaactgacctcaaaaggaagaaagcagattcagaaaaacaacaagcgtgtacttgaggccaggtgatactttcaaagttaatttatcattccacaaaagaaggatagaacggaaagcaataagcctgattacagcaatagttacctgtaagcccgtttgggtaagctttttaattaaagctgcttttagcttttaaaattaagaaagcacttttaggagagtttggatagaaaataaaagacctcctctttatatattttttaatatcttttttgagaagctaggttttgaaaagcgacaaggaaaagggccttataaagatagatccgcgcaataagttagtgttagattatgagaaaatattttgtgaactatctgatgaccaatataaacatttagcacgcttaaacatcatcactgacaaaatataagcatcaaatcgcataagatgaatgtcattcaaagatatcaaacaagatttatcaaaaaggaaaggagactaaccatgggtattcccagctctttcaagtcgttttctgacatatgcttcaacgcagtcatatcaacctgaacaataggtcagcaatgttgatataagatgaagtgaaggaaaaaaaaaaaaaagacagcggccacaaaggacgttatacccaggagagagagagagagagagagatcaacaaacatggcctactaaacattgacagctatattaatgtgccctatgttaattttcaagcttgcacattttatgtaacctaagacataacttagggctggcatctactaattgcaaaatctagatcatcagaacaggcaatacttaaataacattataacgacatacaacagtaataagaaatagcaaccgcaaataacgtacttcctcggccttaaaaaggatagcatactttccaagtcctaatacatgaagcaagccatcaacagtttgttgttcttcaacctatttgaacaacaaatgaaaactgtgaaaatgtatagataattaaaagcttaagaatgctgacagaatcagataacgagtctcctaccatatatgaactttttgataccatgccactcgaagggggaagttggcttaaatgtggggctacatgttttacagatccaggaggcaatgcagagtttgttgtgaaagttacagtacccataggcctggaggtatcaataacacttttactcgtatatgcaattgatctgccatcgtccaatgccctgcttaatggcctcctccgaatttcttccacatttctttgaggagagagacccctagatgtacccagaatcctatccggtgatcttcgtcttacttgatccactgcccaagaagaatatgaatttctaggagattccatcttatgcaaatcatcagcacttcttgtagaaggaattcgaccaaagacagtattctcttttggttgaggtatgtgctgtcgtgaatcaagggaagacattggaggcctaactgcctttgtcagcttgtcacgcaggtctacaaccttctggtcatcgttactgtgtgctcgtctagatgcatttttccgcatcagttttaatcgaaggtcatccttaccaatgtgcgcatcttggtattcaatagcaaaaaaaggttagaaaatacaagataactcagacatacagtactacagtgacattacttgtcttgggtggtcataacattagctcaaatagaaaattgcaatgttatggaaatgtttaagccaattaccattcaaaccaaaaccattagctctaaaactcgatgtaccaatatcccttcgttggctgcaataatacgaaagagtgtcatatccatgagaggcaagactataagaagcaaaagcttaaaaaatcaccaacactagcagaatgtagagtatgaatgaatgtgtctatacgtacacaattcaccatcacaaaatcgcaagcaaccacattagagactacagtagctagaacaatgaagtaaagatacgcaccgtttaatgctaccattgtataagtttccatttccaaagtaaccatctccaatgctacttcctaacctatctcttacagaccgctttgttcctgctgcaggcatagaaacgccgaaaggaatatcttcgccagacgcttccctctttactacctgtcaaaatcgacaaattataaccgaacaaaaagcactgcagcctccacaatactcaaaaacaacgaaaaccccaattcctatgcgtcgctacagcaatatctagataaataattgaaagcattgaaacttctagcaatgtgatgtcctctccgtttcttctcggcacccaaacagactatgaaattgcattctaaaaaaaaacccttcatccgatcgaaacttcgccaagtaaaacactgtggaaaccatacttaaagaaaagggtacgaaattacgtacttgaccacttcgccccagagtaatagtaacccgacccctcggagcttcagccatgaattgaatcagtatccaaaatccaaaatccaaaaccctaactaagcagcaactcaatcagaccacaattaggattgaaatcaaggagaagagaaagcatcgctgtctagaaagcaaaaccctaaaatcatcgccagccaaaggaggctaaatggaaggagagatgttctttattagagaaactttctcgggaaaatagtccgatttcgtgggttgggttgtaaagggagaatgtgtgggagtaggagtgggagtcggagggaggcgaacgtcgttcgttggtgagttgagggaattgttttgtgaatcattattgaaaggtcaaagcgccgacttttccaatatgttttttgttttcctttttctttttaaattttttaatttttttttccacaaaaaccaattctctgtttttttttttttttgccttagttctcacaaataaaacctgtgattggttgctgatgtgaatttttaacctgtgattcctaaatttctaaaatgaaagtctaaattttgtcactaagtatgtttctgaaaatgtaattggtaatgtgtgattgatttaattgataaataatggagctattaaattttgatttatatgtaaacttagtgatgtaattttaagatttaatgattcataaaattcaaaataacactacacattaacatcattttcataccatttgttctatcgattgataactttgaccagttgtaaaaagagaaacaaaatacacataaaaatttagtttaaagttataagtaaaagcaagttatcaagtaaaaaaaagcagctgaggagattttgtctgtgaatgtcaataaagtgttgtagcactcgcagagggttttttggtttctgaggagacaaccaatgttggctgctatcaagaacttaacagacatatggtagatggataagttggccaggaggtctcatagagttggccttccgatcatcacgttgtaccgcgccaaccactatgaaagttgtcataatagtattttgcctcaacgaagtgtcgagtcaacagttaatggtaatttgatcttaccacacaaagtaactccattcccactgaaatcataaatgagttggtcgtatggttccagatcttttaaaggcaaactcattctgtccagtgtaatgactgcatatgtagaatatggatttgagaggcaattagcattaattatttatgttgtatgactatatgtgaatattttatattgtaggtcctatttttaaaaatagagattagggttaacaactttttcaattttttggagattttattaaatatgacatatgtgaaaatttacatttttgtgatttttgctatctaacgatggaaatgcaacggttagagtcacatgggttagtttagaaccttttatttagcaaagtgtatgcatgttgatatttgaaatatagggtttagggggctgtggtgtttgaacattttacccctaaactttgaatttacttaagtgagaagcaagggtaatttggtcattttctcttagaggtggatttttgtttttaaagtatgtgtgggatttttctagtataatttaaactttatttctttttaattaaatcaaataattaacctctcatatgtgttaaccttagaatatacaaagtaaaacacaaacctaattttctctctccttctttactttggcaccaaggaaccaggggattcaaaggttatttttctgtgattgttggtaatttctagtaggatttggaagcgaagatctgaggtaaggtcctaggaccttttttcttgaattttttggaggttttagtgagctcaagcatgcaatttcttgaattagattctgtccgagctaggttttgtttttggctgttttatgtgttgtaattgagttacttgaagctagtttgagaacttcttgctggttatgtgtgaattttagcaagtttgagtactcaaacttgactcaacaatgaggaattttgagtttctattttatttttggttatgttacttgggatatgtttattgtaatgtaaataggtaatcaggagcttagtttaatgttcgaggttgttttgattttgaggtgtaagatcaccatcggtcggtgatcgtgcagctctggtgcgtgtgatcggacggtgagcagaggtgggacgtcggtgctccacaggtggtagttatagaggtttgtctttggtgttttgaagagagagaaagaaagagaaaagatagagagaaggtgggtaggggcgttcaaataaattaaaaataattttttgagtctcacccactttctttattaatccatttttactcggtttgaccgagtcttcacataaatattttaaattatttgttgcatcgctataagtatttaaatttgtagtttcacgaaaaaaaaattaacatatttgaattaatatcttattatcattaaaaataatcataagcatcacatttattttataaaatataattttttaactttttttaatcaaggttgagtaatcatcatattcctaatcagaacggtctaccgtttttgacaagaacctagaaaaacattctaacatttttatagaaatagtctgccatttttaggcagtttttccaagtctcgtttttttttttttttttgcgtttcctcaatatttagttttttatcacactatttatcgataaaaaaacttttagttttcagtttagcaccccgaaaaggttttaacaagttgtttacctattttgcgtgattgtgacatagagcctccgtccagcatgtgaattttcattcaggttgaccgacacacttgaatctggaaacgaggtaagattagtataaattgtatatacatgtatgtgtatgtgtgttatatgc

SEQ ID NO: 69442 - DNA, 9370 bp, Cannabis sativa
gaactactgaaaatacgacagggcggccaatttcgaaacaaaaaacacgagtttcgaacctgtaatacataaatagcgcagaagaggagcagcacagggtgggagtcggagtgggttcggagtcttcgggatttctcacttctcagttcgatttcgatttagggattactctcctcaaattagggatttcctattctttccatttaaaatggtccataacaacttcaagtctttatttttgataaatggtgatgatccctggaccttacttttatttttctacaattataaaaaaacaaaattagtcaaattattataaataattaagcataataaattaaataacatacaaaaatacaaataatatatgtttatcagatcaaaaagtggataaagtacctctcattcgcccaatcaagcaaactaacgattttttttttgctgaaaaaaactaactataattttggtagttctaactttcaatctatgtgaccaatctgaaaaaatagcaaaaacaatatcacaaataaatatatctcatgttaataaacagcataaaaaatataaataagaaaaataatctgaaactttttgaaaaaaataatataaacaatagagttaacctaattattttctaaaataacatcaacagtatcactaaatctaattacaaatattagactacaaaccacatactcgtttaactcaatataataaaaaggagaaaacaatttactctatttaatctgattttcttatctaatgaaaataacaataaaaaaaggaaatatcaaaattactttcaagcttgtgggatcattacattgttctatttcataaattcataaaaaagagactaaacttgagaaacaacaaacattaagactacataaatgcaatatgtaaagaaaaatacaatattttctcagattaagtaactatataagcatttttatttttctccaacttcatcaatgggatttctcaagaaaatcatctgggtaaagcaaaaactacccaagaagaaaaagactacattgatcgactccgagatattataaaagatagattacctcaccacctttgacttagctttatcatacaaattggccccttatctaagaagaaaataaggttcaaaaccatcccatattgcatggtcttctctaaatccaggggcaaagtcttcaatggctgctccaatttgtttctcatgtgattttactactaacaaatagaggttacaaatcaaagggttcctaagataaggaataaccgttcttccgagatcggcaacatcagacagcagacctgcaccatcctcaactttctcattggtaatgcagtttgaaaggacataaaagccaagtaaatttgcgtatagtggtagaaatgcatccttgtgattgccaacaccgccaagccaattagatccaccgtattttgcattgtggtctttcgcaaatgtcgtcaactgattggaaaatctgagtctccactcacgtagatattttctaaactgtggcttgtccaataagttgactgcccaagattttgaaactggtagcttctctaaatgggagcaacaaatctgactgatcaaaagcttctcttcatgatgattatcgatttccttatcaaaaacctgtctaacaagatctccattagaaacttcgtagctttctgctgcattcagtatcgattgtaaaagataatcaaagtactcaatccaatgaccaaagatggaagacagatgctcaaagctcaattctatcactttgtccacttgggttggaactaaaccagtatgagagcttcttgcagatcttttacatgcaaagcatctctgaacatccttagcaagccttagtctaatgtcatcatcctcatcctccagaagcttgatacatatgaaccataaatctagtatttgacgagcatacatgttaacagcttcatctggttgaaagcaagtggacaaattatcaggtggaatttggctatcatatacgaaagaaccaacaagcctagcttcctctagcaaaccagaggctataatagattccgctgctgccatacgcatgctggctgtctcagatgaaacacttcgctctttaattaagtttgtgaaataggcaattctatcatatacttgggccaacttttcaatttgttcggactcaacgacaccagtcagttttctctcttctacatcaataagaatagaggaagaaaataaagaagataacctcttcacacaaacgccaatacagcaaatgagcgtttcacgggttttggcattccttgcaagcttgtataaggaaatgaacttatcccaaagcacaaacacagaatcacaattcattgtaccaatatgaattgcttcagtgggtcttttgtcctgtactttccgaaactgcagagagttccaggtgaaaagagtccttagaatatagtatgagcatctttgattcttctccaagtctaagagcttaagtagtgctggctggagatttgtattgcaccagccccaaataatcctaatttcactactaaacacgtctaggcattctgcaccagattctgttgattttagaaacttaaatagccatttcaatgtgacaagtctaacttcatatgctgaatctgacaaagtacggaccagcctttcctggagtcctgaaaaagtattctccatttcagacatcttcaacaagtttgattcaggcagaagaggctgctgtggcactgacaaaatgtcttcagtaacttcgtcagatgcttgaaatacacaactgaagtacgacaatgctgcttgctgacgaagttctgctgtagttggatcgtagtatgatagaccatatgaagcttctacatctaagcatgccgaggataactccaaaagtaggtttcgaatagcatgaaagcttctgcttgtattgcaggttctagcaatacttagcatgtggtcaagcaccttcagaaaagaagtgttgaggactgggcaaggacacaatctaggggatgcaatccatgaacgcaagaaaagaatttgaatcaaatcacctaaaatatgatctttctttgagagatcagctagatttcgacaatttattgcaagaagagacccgagctgcaaaagtgtgccatgaatccagttgaatgaaacatgacggcgtccttcagatttctcaattgttacttggttatccacacaaggcaactcagcagctatgttgaggagcacagttggcaatttctcattggatactagaccagtcaaagctctggatgcaagaagacggacacgaagattgctttgagttgagcacctcctaatgaatggcatgagcaaaaaaggatcaagttcatctccaatttcacctgcaattgttgagggcttcagcctggataaaagaataagcatagggcacaggctagggtgaacaacatttgcaaggttagattttggatcttcagacaatccatttccaagcatctcggttgccactttcaattcattcaagaaaaatggatgcaatgagggatacctacagaaaatgaaattcaattaaacactacataagtatacataaatttatcaaatcaaagaaaaaataaccctctgttaacaaacaagctacacataaataacggcaccagagacagctataaaactcaaggacttgatccccaatcttcaaggattagattgccaaaattaaaaaaaaaaaaacatagaaacattcatgctaaaaataacttgagaaagggtatcactgaataaattgtataaccacagaaaagcagaaacatgaccaaaaatattatgaactaaaagaattgacttagttgaatccaaattaaaaggaaaacctcccatatggaacctcactagttaaattccataactaaaaatggaaaccttacctgtgaagaaactcaagcccacttagtgcacgtcgtattgaatctcgcttttgaacattgaggaatccaaccatccgacgcaccaaagcagtatatgcaagacaagcactgtttcggacttcccagtacggggaagagaatgagcgaattgaaaggattagagcctcagcagcaaaacctgatgtatcagtagccaagttggtgtcattgaaagtagctctaaggacattaaatgtgtgtacagtaggaatgacaccctcattgcggatcttagaggccatgttactatcagtcatctcaggtgaccttttacactcaagctcttggtttggttttgttgacaagtcaccatttgagttgttagtttcaattcgatccagcaaagactgattagcaacatcaagtaaccaccgtaaagcccgtggaagaagtttcttgggtgcgccttctggctcagagagaaataaagcaataaatgcagcaggaatacctgcacttctccttaataaatcatccacggtttgacccttggcaattgttctttccattagttgctccatccaggattccgtcaactgacaaagcctgaaaaagaataatccatttcagaaaatacaaacatatggctttgtgagtgtgctttgaacagaaaatgcacttgatgattcattacctattgagtaactacagaagatagtagacaatgccaaaagattgaattaaaggttacaagtattcgtaaagataacatcataataggcagcacaaagattgaactaaaggttaccagtttaaaaataatgtggtatacgtttatagccactcatgtttgtacattgtaaagacttatttctaaaataaatattgttaaaaacattctgccatgtttgagtgtaaattatgtgtcccttaatggttatattagtattttacttatcaagtttttctttccttcatacaaggcaattagaaaagatatgtctctttctatcaatcttatttcttatcaatcctactttgtccatcataaaattttatattcctcccaaccaaatataatgtaagagtgtgttgccatatttattcagattaaagctggataactttaaacaattcatatgttctaagtagataaatgaatgctcatctatcatataaaaaaatccatataagtaaatagtagaatacagatcattttttcccttgttatattctttctggtatgaactgcagtgctattgaatgaaattgacacatgtaaagtaaatttatttatcttcaaggcatgcaaatgcaacaatataaaatgagaacacactagtttgcttaaggaaattataacttaccgaggatcatttgaacaaagtaaacgattacaaagagctgtaaatccagctcttgtcttgtcaattgcaccattatgcttcattttcaaaaggacctccaaaaaatgatttccaattgtttcaagttgtttaacctcgagcatcgcacttgatgtcatatctgaaaaaccatcaccattggaagagataccttcagggtctaatgattctgtgttacctggtaaaggaatctttcttgtgatagtcccgaggagaagactaacctgaaataaaggtatattattgcatagccattagcaatataatctcactttattaacaaatctaatccttaaaatgcaggaacaataagataacatctcataagtcaggtgtctaatggtccgcatattggctaatgactttctaatcatcaatagttgaacttcaacaagaggcacagttaattacaggtagatgaaatagatgacaattgaaaattaactacctctttcatagcaagccagcaaccaaccattacagcctgtcctgaagacccgctattttgtagcagttttgaatttttctcttcgtctttgagcgcaggtgcctgcaaatcaatttcctctgaaacatctagcaagaaagtaccatcatcgaccagctcatccatatcctccggcagatgccaagcatctgcagaaactacacatagagcaagtgaagttattcgcaacacaagctccaagagcctagccaacaagtgtctcattccagagatactcgacatcactgcatcagaggtgaagtccaattcctcaaaagtgtatcgtaacccaagtaatataccatgaacaaagctatttctgcatgcatcagacagatccctctccccttcctttacagcatcatccaaccaatcaattagcgattttatataatctatcacaggatatgtagagttgagaacccttccatccttattttctagtttgggtctcaaacaaacagcattaactgaggcatttagtatccaacctaggtccaagacatatttacggaagattagccttaaagtcagagctccagcatcactttctctcacacgcggactgcagactaactttttagcccatataatcatgttctgaaccatgttttcatctgaaattccaggcaatggggttgggaaatgcaatagtatacgaaaagaactctctctcagcctatcccaactgtcaataactgatccaactaacaacaaagtagaatctggtaatgtaattccttcattgtaaggagaaaggcacctttctgtagaaaatgaatcacatgtttctttaacagatggcaagatattccaaacattaagcattatcaagatcagatccatagccataatttttctcttgtagggagcagaaggatagcaagagaaaaatagaaagcaacttaaccatctcataaagtgaaacagattatttgccctatttgcttgaccctcctcacttccattagtgactacaatttcactattttgatcaaatggttgccaattatgctgcttatattgtctctctagagctgttcgaacccgagaaaaaaacttcctaaacatgctagaccacttcatttggaaagacgttgagcaggatctcatgttcaatggcactgcttccttcaacaaggtgagctccaaatgggaaggcaggctagatgtcttaggatttaagaaaaggaattctgcagcatcaacacggagggattcatccacatgggtcaatgccattaccagccattcaacacggatttctacatttattcccttcatgcaaacaagagcatattgatcaacgaattctgtatcaagcccaatctcaggtactttagaatctttgcaccagctaatatctccttccattaaagcaagtaaacgagacaccttaagtagtgaaactaaaatggccactttttgttcaactcgcagttccatttttgcactactaagttcaggatacaacagcttgtcatccccacttggtccaacagatataaaagcaagcattgaaaaaatactatctacatcaatttcaagtacaacaggcaatacataagtattcaaatttgaccggagctttgagactccagaagcaagcccataaagtaaagggggcaaacaatgccctctgtaaagagcataaccattttcaataccctcactgttccaacactcatcacgcaagcactctaagaaacacctcaaaagcgaagtcgcagcacagcagacatcatcatcaatataagcatgtatagtttcaaaaagcaagtgggaattcatatccaacagagtgtttgcccccagcctcttagtcaatgaagccaaaggaacatatcttcccttacaacgaggtccaaggcgaagaagatcagaagtaatctttaacaaaaacgactttattctttcactaccttctgaccaatgaagagatgagtaaatatccatgaagagatcaaagatgagatgaacttgcctgacagtttgacttaagggatcctctaaattgttccatataattttcagtacacgggcccccatatcttctggaattggatcataaattccggattggctggtaagattagctaacatggaagttttaatctgttgtaaacagatctgcatcacagtcaatgcatgaaagttaaaatggctatcaataggattctcacaatagttacatagctcaggcaaaattccatcatataatatagtcctaatagtgttgccaccgttcatattataaccatcaacccctttcaaatcattacttggaaaaacaaaatgggtgttaagtactgttcttggaactgccgttagtacccctcttatcaagcaaagtctactcaaagcagaaaaactactaatttcggaacagagatccccattataaggaatcttggcaattgcatttctgaacttaatctcgtaattggtatccaaactaaacagaggatgatgaaaaataccttccactatgaccaagccaagatcttcatgactgagacaaacttgcagagctgcacaaaaactcaccccagcagccacataacaatccctggaatacgccaaagacttcaaaatgcttaaaaccacagtcaaactcattgccaatacattggagtcagcatcacaatccttgaacttagaagggaaacgctgaagcaagtaatacaaacaagacaaagcctcttgacattgttccatcactataggagaaggcctaaccaaatcactggtctccaaaacaaaaccatttaagctattaactgcatcccaagcaatcaaaacggcacattcttcaacaatatcaaccaagtaacccaatttaggcatacccattattgacaaagccgtcctcgacacacaaaaccgcttccctttaccaccaccatgctcgtcacagagagtacgaaagcacgagctaatcacaggctgagaattacgtgccttagccaaaccagacactaaggttttatgcaaaggcatagaattatccaaaaacaaaatccacaagaaaaacctggccgcctctgaaacttgagcttcgtctccattaaccaatatctccccaaaagccgaagcaagacttttagcgtggttaacttgagcgtgtacagaattgagagagataaacactttcaattgggaaaagaattttgcagaggaaattatattcgatggcaataggttcagtgattcaacataggagtccgggaaaacgacggcgttgtaagtgaaacggtgacgatgctgtatagctctccacttcgctgacattgttacttatcgaagaagctttcgcaagctacaatatcacagtttcctctctctctccctctgctaatacagtagagagagaaggaagaagaagaagtggcggcttgaagtggcagttttggagtagagtacagtacagggtttagggcaaggccgccgtagagacgatcaaaactcttgggtaagtaagcccaagcccaaatcaaataagatggcccatttcagaatggtcaatgaaatgaaatcaggtcaaattgatacttttttggaggggggg

SEQ ID NO: 69443 - DNA, 1353 bp, Cannabis sativa
gaaagggatggcacgggtgcagggggacatggtgcagggcagtcgaacgttggtttgaggatttcatcaaaggggatagacgtacaaggtgctaagaaaatatgtttgaattcccagggaaattctcctctttcgggaaagaacagggctgtgtccatttttaaaaagcatcgtatgaataatattgataataggacaagagatgcagggattatagccagcctaatggctgatattgggcctactagggatcaaatggtggaccgaccccatgaggagatatgtaaatcaagggtgccacatcaatatcctgaacctacttttgtgaattggcccactgaaaaaagcctagaggaagttgttgagcaactagtggacccagcccatatggaaaaggagaaggcccaagttgtggttactcatgattgtatggttttttctaataatggccctctttctcgggtgcaaagaaaagaaaggttgctctaaatattatcccagtcatcacttcgaatgacagaattgagactctgggagacaagtctccaacttcacctattacttttcttcccacattggagttaaacatttttacacctgggagtagcagtcggcaaggagatggtgcgaagagaagaggcagttatcgtaaaagagggggaggctcgggaagtgggcgaagaggaggaaagcaaggaaattcgaattgtcagagtaagaagaacaccgcttttggggtgttacaaattgaaggtacgtctagcactaatttggatgaggttttagttgatattacggttaatgaagcaacccaattattttcgggcgaggaggcggcctttatcaagccccctctgtcgccatgaggcttttatcgtggaattgccgggggtgatgcgaaccccggcaacccaagctctcttggcttgggtaaggaggtacaagccggagtgtatcttcttgatggaaacaaaaacaaatgtggagggaataatgggaatttctaggtctttgggttatcaatactcctctattatccctgcggatggaataggaggtgggttttgtttgttgtggaatggatatgttgtattgaaggtaattgatgcttcagacggggtgtttgaagcaggaattcaggactcaatctctaatcttaggtggagattgtttgtggtttatggcagacctgtatgaaaatgagaaaaagtctttctgggagttaatggaaggtagagtaaatattttcttgagcccgtggttgttaatcggggatttaaatgtgattgcgcaccagtgtgataagagtggtggtagaagagtgtctttaagggatacaggaattcttttgaa

SEQ ID NO: 69444 - DNA, 2215 bp, Cannabis sativa
ggccaccacaacagagtttccatatattgaagtgtatgcaagtattcttattttgtggcattatgttctgaaactctaggtgcatttgtaaatgtaatcaccttaattgtatatttattgtactttcagtgaaagggattctagaattccactattcacactgcttaaaatatatagaaaaggaattgatgcagtccttaccttttcaaccactaaaatggaattaggatcatggcaatctcccttggtataagatccacagtttcctgaaggagttccaaagctagcaaattttacagcagatacaagggtattctcaggacattgcaagtggacagttggaacatttctgttacttccactgtcttctttctcccaagcttcaggtctaatagaaggatgatcctctgcaacaagagcacagaggccagttactttccgccttgacaaagtaatctttgatggatctcctcctttctcctcaaagatcaccagaatgtttccagatgacttgaaccaagaacggggcacatggtacctgttcgagaaacattgctgccttgtaaggttctttaacaatgcagtaattacttattaaatcttaaaacatttgatcttacaagatgaaataaagaaacaaaaaaagtgctaacacccactatgctatcacaatcgtttaccattaagaatttaagagtatatcttcacattagtaaccataacagagaacgagtacaccacagccaggcaccaagagtctataaaacttcaaatttggttttgaaataacaataactatatactaggcaatacattaaaagtgtgcatgcagagcgcctgtgcattcctgcttgcttttgcaagtttgatagatggcttataaacttctggacatagtaaatactagccttttctgaaagctaaatcataaccagttgagctagcctcaactgacaaattgtttcagtggttattaaatcttggtaaaagagaaagtaaaccttcgagctattaagtattaagctcactctataagtttcctcagatcaaacccaagcaccttatttttattttgtgctacataattgtttgttttttcatgagatatatttaccaaatactcaaagaccactcacatacactctcattaactgaaaaacaaaattagatatacttatatgatagtgactactgaagatccacatgtctacgctactcagccttggcagcaaagaaatgaaagggaaacatctttgagtatatttattgacttagtcttaccatctttgagttggttctccacaacccgtaaagcatttgttgggcatgaactttcctcggtaatcacattctttaacacatccatcatctatagaactcttccttggccagtaccttccaatttcttccccattcaaccaagctagaccttttcccatatgaaccatatccagccccacaggttctttccctggtggagggtttatttcagcctgcaatactccgagtccgagtgagtactttgtttttcttaatttcaacagcataaaaagaaagtaataatacaactgaaacaatcagcctctgtaatacgaaaaccataatgttccacagatcccagtatttaccttgtaccatgttaaaggttgcatctttggtggttccgaggtagcaacccaatttactttattaataccatctgccttgtaaatgcctaaatgctctccttgcaaaccaatctgaatatgagaaaaggtaagaaacaagtattaaacaaatactctgataaaatcattcggataaaaaaatttaaaatgttttttgggatcattcaagctatggattagggtcccttctcgactaaataacttaatatcttattggttagtttggtttaaatgatgtacgattttcaacaaatacccttaaaagtgctataaactaacaaagaaaataataaatgaaaggttaccaagagatttacacaagacacatgactttttggttgattcccaaagctaatacaaagtaaaggtttgtcacagtaaggtcttttctaaaaaataaaaattgcagctaaactagattgtatgagactcatcataaaccgtccaagaaaatgttcaggatttttcttcaataataaaacacgttaaccaggcactaccttatcatcaacgatgcctctctgtcatcattttcccttttcttatca

SEQ ID NO: 69445 - DNA, 3333 bp, Cannabis sativa
  modified_base (58)..(58): a, c, t, g, unknown or other
catttcctattgtttgctactgttttactcctattattgctactgttttattgtgttnttgagttggagttctcgggtcttatcattcatacacaaggccgaacttctatgtatcagcgcaatagtctaccttttggaatagatttatgcattgtcatatttttaaaaccattcgtgcatttatcattgaaaacaaattagttcatacacaaaattatgcatgccaacatagttactaaaccagcacgaaaaaaagacagctatcaaggcataaccactcaaattcagttgactggtatagaccaaaattaattacatccaaactgaattagtatatagtttgttgctacagtggggatacctttaatatcacacaattcaattctaacacttccactggaaacaagaaataatgacaagaaaaaaaaacatatataactcgtgttacttacgttgtcataagaacagatagtgctacatttcccttagatatataagtagcaacgtttgatgcctgacctccagggcagcatgagacaaggatgagaccagttgcaagaggtgcagaaagttttagagtctgaagctcatattgaaaattgttagacatatataagatatagtaatttgttcacatgtctagcaaaaaattgagttaccatcctcaatagaatagtcaaaatcgaaatccacaaatcgtaaattttcccacatgtcctcttgttctagtagaggatggggttctcacaacttagaactagggtagtataagtaatcaaacactacacatgcttaggaagtgactgaacaatgttagcttttaagatacattaatcctccgtcactaaatagaaaagtatattatataatatctatggattgatctatataagcctaccgtagttcttgcatctaatttacagtagcatgctgcatattcaccccttttcattaagtttaaaatcccactacaataatagcaacaggacaggacaagtatttacacttcctcaaccatcatcttttcgtcatttaatcttgagttataaaacactatttttagactagaacatgaaaagatggaaatacaggagcagtttcccttcactttaaaatatcaataattaaaacgttgatgaggcaagataagggcatttaagaaatgttgacaaagaagaatgacaagatactaaaaaacataacagaaaaaagatgattgatgctgtcagtcatatcttggtttccagtggaataaaaaaggggatttaaatcaaagggtacatgcaaaattattgctcacaacaatcaacacacaataagctaaaactcttgatgaagaagaattaccattgcaatagcaaagcctaacataggtttgattaaatactgagcaagaaatcccacaccaacctgaaatacaaaagttataaaataattatataccaaattcagcacagaagaaaattcatcaatgtgaatgttacttacagtccaaggatttcgcaaacatcttttgaaatcctcaaaagtcaaggtcaatcccatagatagcataaggaaaccaaggccaacagtgaaaagatctgtctccaaccaagttacctgtaggttgaactaattagacaacagttgatatgcaagtcaacaaggtagcagataaagaaagagagagagattacagcagaaggcttgtagatgccaataatggttcccagtatgacctgtcattgcaagtagcacatcttaagaaattaacttcaaaagtgccaaatataaaaaacatgtcaagagtaaagctgaaatcaaactaaaaaaacatatgaaaatataacatattacattatataccacctcagggagaaggagaaaggttattcatacccaaagaggaaaaagagtcgtcaaagtttcaattattttctcatacagattcatctcatttgaagaggaagaactgtttggaacatccccagatacatttgttgcagccttgcactgaacgtgggactgtctacaagtacaagtcagcaaaacatatacttcctttctcccattacattacatatacttccaatataaacataattcaatatgctgctaattccaatcgtagtctaatgcaaatgaacaatgtaccactatgtttgtttaacgtaagaagctcgtttaaaaacattaacataccttgaagttttgacgaataaccaaggagaacaaagagcagcaatgggactccgtggcttactttgaatagcataattccctccattcaaagttacacaattgccaactctcaaatctgaattaatatagcagtaatgaataagaaaacttccaacagtccaaaaaaaattagaaaaagtggaaatagcccaaaaaaaaaaagaagtacaaaaaagcactaaacttctaaaacaagagataaaaacaaaaaattaaacccatgtgccaaattcgaaaatatatactaccatgaagacaaccaacacaaagaaccaaaaatcaaacttacccagatgggatttaagtctcctatccgataaagcagggacagccctgtgaaagaaagctgggctcgccttattaaaggagcaatctttgatggtcaatctagaaatggatgccattaaaggaagcagcgtagataaaacagaatattagtgtgagagagaaaaagaaattgagagtgatagtagtactaatgtggaaaatggaaacttttttttttgtcgaatgctcaaactgaaaattgagggtgtggagttgtggatatggatatgaacttatggcagtcgtggataacaatgcaccacaaacactatggatagctcatccaaacctgtagctctccccaaaaacacatttgtatgttagctgattaaaggctttgtaattttcttgtcgtttatgttgatatgactacagttttgatcaaaacaaaacgtgacttccccaacatgtcgtgagaggtaaacagaagtctgtgattttcatgggaattacgtattaatcttcgtttactacaccataagttccagcttattcacgaacgagtcaggaggcatttaaagctcaatttaattcatatcccaatagatgggcttctctatgaaattgggccttgtaaaattgaattttaaatgggcctaatttaatcatcctaattatactcccaagttttatcatcaatttatttcgagttagtgcacatgttcctctataaattcggtctatcccttcaagtatgtggggaatgttaagtttcgatattccttgattttggcagtgttgaattgaatttagtatatttatttataatgtttgctcatttta

SEQ ID NO: 69446 - DNA, 9452 bp, Cannabis sativa
agtagcgaactgtgctggtaaaaatgatattttttgtagtgggagtagtatacctctaacaagaccattgcttgaaggtgataggagggagttgtgcgtgaaaccaatttcaggcgccaaagttaaggtggatgctacaatttttcctttggaaggacagtttggaattggcttcattgttcatgatccgtctagtttgttggtggtggcaagagcacactgctgtctaggtagtatcgagcctgatgtggctgagtgaggctctcgacattaaggaggcgcttagttggctaaattaaagatcaaacttactcgtttgtgatacttgaatcagatagtttggtgtctattgaagctatctgaagtcctttagtgttttgttctatgtttggtttagttatattgaagatagtaagtttgtgttaaggtcattttataatttgtttttactatttattaaaggctttgctaattgagatgtgcatgttgttgtgagaaattttttattatggacttatcgtatttttacagtcttttgttccacctgtgcatttttcttgtatcttgaacaaaacgagtgctctatttaatgaaaacttttgttttaaaaaaaaataataatattaaattgtactaataataataaaatacttttttgtgatattgagcaccaataatattttttttacacaatagcacgaataatattgaagtaaacaaatagcataaaaaagttttcttttttgtttttttgagcataactcatctagttatggtgaaacacctccggtcccctcctattttcccaaacagtgggaataaacatggctaacttatggaaagtacagttggaccatgataataaggatcataacataaatatattatgataaggcataaaactattgtgcactcctatttatattcacaatgaaaagaaaaaagtcaactgtaaggttgtatgtgactcagtagtctagctaaattatctacctacctacctagtagctactagtatttgtattactcctacatgtgcatgcaactatatactagaaccctattattaaccaaacatatgatgcaaaatactatattttattataaattatatatctttaaaaggcataggataatcttcagttaagtagtagttttttttagcaaatcttcaatgatatagctagtatttatagagtgagtaacccaaaaatacactagtttttttggttaataaaacacaaactagttgagtagtgaaaatacaaatgtaatataatgttagtcaacttattattattatttttttcttcaagattttagacttccatttttgttttatttattattattattattattattatttttgtcatatgctcgaattgaattcaaggtatttaacacttttgtttggagctcataatttaatgaggaaaaaatggacggattttctttttttttttttattattatttttgagaacctagaattatcacagcttttttttcatcctctaattaatctatagtccaaacaagtcaaaagcagggagaaaaagtccaatttggcaatgtcaacacattcacaacaacaacaacacatcactattagccaaagaaatatataatcttgatttaataatattagaagagaacaaaattataacaagcaaagtaaccgttgtctataataacatcacactccaataacaatctaataattataaatatatcaaaatattcttttcatttcatttacataattctctccatcaattgtgacaatcactgatcacaacagtatcaatcactctttttggaccagcctgggaaatacaacaaacagagctcatagtaaaatcaaatcggagtgtactattattatctttttcattattatttttattattatatatgatcatgtgtgtctgtgttttcatcagttgatttggtgagaaatgatccactgggtaaaggcattgagggttttcatgtctgccctgtaatgcttctgagtgaattctagaagagaagaccaggtgaaatcaggatacaacctcggattattgggacccgccaaacattttggtggaattaccaatttgtccatctttggggagaggaagaaagccagagatcttctcactgttttgttgtttaccactgctctatgcaaacaactcttgtaaatcccatttgatagagcctgcaaaacacaccatcacaactaactatttaaactatatgtaaaaaccagaacttgttagctacctagtgttaccaataaattataccatgaaagtgtcaccaatgttaacaacaaaagcatctggattaggagtaatggcatgccatgtatcatcaacaaacacctgaagaccacccacttgatcctgatgaagtattgttagagaagttggatcacagtgaggcccagtccccagtgttagatcgggtttttgacaaactgggtagtaattcaatctcattatggaatcatttccttcaaaatattctctgaaatactctttcccaactcctaggctcatccccagaagctccataaccccaagtgagatcttgctcatggcttcacagtattcttggtacactttcctaaactcacagtaaacatacacatgaaaaatagagtcagtacttacaatatacatatacacacaagtaatgtttttgcatggtataatttgtcctgtaatcttacccaaagtctctgaaatgttcacccattacaccaacgaagtagtcctcaacaatggtgggaaactgttggtcgtgacagaatcgaaaagagagtgtctccttccatggaagtttagaggagaatcttccagtgaagctgctagcataaccacagagctcaccaacctttctctgagctctctgtttttgcaagagctgcatttcaaagaagtggtccatgtagtgatgtgccttcttgatgagctcagaatcgatcccatggttgacaacaaggaaaaaaccatgttttttgcaagcctcattgaccagctttgatgcatcagacattgccacttcatttccatcaaaaacgcccttcaaatcaatgggagggatcactagctcaggtggtcctgtggagcctggcttctcatggtctggccaaataaattcttggggtatggttgcttggtattgaacaactttcgagtcaaaaaccaaagggtttatcttctcactaatattattattattattattatcttcacttgtactactactacttttgttgaatgggggaggtttaggaagagatacagttggcatatttagcatatatatataattaatgtttatatataaatatgaaagagaagctatttatatattcaagcaaaggaagattgtgtgtgaattttggggatatgatcacgaaatgaaaggttggttttgttaagggaatttatgatgagagaggagtaattactaattagtagggaagagggtattaatgaggagagagttataagaagagaagaaaaaatccaaggggtttttcattggagagatcggcatacaaatatgggaatctaattgtttaatttgcactgttgcgtcattcctctagctattttaagtgtagcagtgtctctggtgttggtctttttattttgtcccctttgatatgcctaccctctcttttttacttaccaatcataataaaaataataataacccatttgaatagaacacatacataggatacaacacaaaaacacttctatatatccaaatctttattttcttttttatataattacatcaaacaaaaagggatagaacaacttccaaatttaacggaataataattaataatatcatttttctgaaaataaaaataaaaaaaagagttcaaaagggggtctaagaggaagaaggttctcctcctcggatgccagttgccaccaactagaatcttcatagatatgttgcctctataactcaatccatattcaaatcttttaatatgtaatcaaacatacattttatgtgtttttttataaatatttatttattttattttatagatatgatgaataagaaggcatgaataaaattataggagctggtatggtatatcacaaagaaattatgacaacaaaataattatttgaaagtaaagaaagaaagagagattttatctggaattatatactgttattaactgtaatactctttgtattgagccataacagaatatcacaatttcttcctgacctaatatcaatatcaaaccatacacgtctaacccaatatttctaaggacatagtctgttgaccaattatttagcaaatctgtaaccgaagcaactaagccacgtttgcaacatagctagacttttttaatccagtactcaaattcaaatatgtttatttttccttattttcatatcagcaaggtactgatgttaatgaatttcatgatgaaataataattatgagggcttctaaatctaatgcactctataatagggatgcacagatccactttttatttctttctgtattctataatttttttttttcatatatagttgtatatattatggttacttaaaacatcttgcaaatatttaaaaattttaaaataatttatatatagaagctaaaaattatgcatgcaacacactgtttcaatcttgttttcgacttgttaaatttttttccgaattttttaaaattttactaaatgttttaaaaaattataacgtgcttgtacgatcataaaaaaatattagatcaaaaatttatctcaaatgccaaaaaaaaaaaaaaagtacaccgtgcattatataattttctaaaattattaattaacttaatacctcctcatcatttttcatactttatacaagtacacatgttaatgaatctctaatttttcttttttttgtccaatttacgtatactacgattttaattttatagacatactactagttggtcctttataagcacaaaagtccataatcatataaatatatattgcataatgcttaaccaacaacattaatcaaatctagctatatatatatagatctaggcaccactaataaaaacaaaatacatgggaaataattttcattttatattgaggtacatttccttgggaggcatataccactggttaggggggcatcaaattaaaccagctctccttcacttcaaaacattacattatatgattatttgagcatgtcctatgatcactactgttctccgagtcccactggtccttttgtgggtttgtaaagatgtgaaaaaaattatggttattgtctgaatatgtataatgaaggtagccaaataagacaaataataggacaattgtacaagagaagaaacacattttgagaaattcttgcatgttcattaaattttccttgcgtatcttctttcaatttattgtatgtatatatgcgtgtatcatgtgtgtatattatttttataattattaaaaacactgattatatataatagaataaatctgaaacgatcgagtttggacatgcgtaaatatcttaagcataaaaatattaaacaaaagaaaggagagagatcgataacatgtggaaaaggagtaggatattctttgtggtgtttaaacagtccacataattaatagaacccaatatagagtcaagtggaggtttggaatgacaatggggatagattctcctttctagaggggctgaacatgttatgttaatatacatatctaaatatattttcttttacttaaaaatcttttagaaatggatttagggagactaatctggaaatctggtcttaaacaagcctcgtaattaagcatcttaaaattgttattattattattcttgaaatctatatcaaactttatgaatagagaccaaaacgactaatttatggatgagaaaaatgcacgccttacatccgtaattaaatatacttatatactcgaaatttcaagaaaaattagccaaatttgtgcttgtcttaatcataaacagaagacccaataatactgttgagtttgtacacgtaaactaccaaagcattggagaaagaaagtagtatccactcaactactcttttattacaaacgaattttcaggattatatttgctcagctagctatgttatttaaaatcaatcacgatctactagttatttttcattaataatctaacactacgattatatttccagacaaagacccacgtgtcaaactttggaacatttcttataaggttcgcatctgttcttgattgtcacatataaataattattcttttgaaaaatttgacaattacaaagttatgcacttttactttttttttttaccaagtttgaatgttgcaagatgcatttcaccgcttttattgtactaacaaactctttattgtactactcgtaggaaattttctaattataaacatattcacgctaatgatatgtgcgtaatataagtaaattcttttggtggtctacctaccccatttctatcaaaactttattattactgatagattaatctaactttcagtccctttagattttctgctctttagatggtcttatgagactattcttctaaataaataaaagaaaaaaaaaattacatgtgcctagttagtttggaaaaattatggggtgcaatttgtagatacacatattttttatattattacgtgcaatctactataaataatatttttttgatacattttgctagaggaagcatttttatgattggtgattattaaagtcggggcaaatattatcaaatgagatcattgtcaaaattctctttaagaatcgactaatcaaagaggctctgtcatatcctccacaaagttaactttttagagcaaatcaatatcacatttttcgtatagacagttccaattcattttgttgcttaagaagctcaatgtcagtgcatcgaaatcagtatctgactgattgaaaaaacccatcacacccaccaactcaaaccaactattgtaaagcgttacaatacattaacggccaatcattttgcatatattgcttttgatgttttactttattcatccgtcaaaaagttccaaaaatatcagaaaaagaagtcaagtgcataaaatgatcagatagacgacaaattgacataataccttaccccatgtggaaaaataagaaagcaaacttgggacatcttcgcagttaaacaccaagttttcataaagtggcagaaaattctattcccaatcagaaattggagaattgaaacgcagggctagaattatactaatagaatcattattaataataatgtatcccattgcagagaatttaatggtgagaggacgtgattccactgagatgagaagcatacaagttggcattttacataagtgagcaagttattcaaagaatacagcaactgacattcaattcctattagggttcatatcttagctccaaaccaaaataagtggagtttttacaggtcaacaaggcaaaagaatttgtaagataccttgtactactaaggggtgagcgctaacaaatcgaatgaattaaaaaaagaagaataaacaatgaggaaaagaaggaaaaataagagaaaataacatcatacaatatgtaaaacccatcccttatcctaaagcaaactagaattgcttatccgtattagaaaggaaagagtttttttctttctttttttttttaccatattaagaagggttccattagagatttattcatttaacttgcagttgcggaggtatggatgatcatactttatgtacttggtccagtatgatctgtactttgtcattgccaactccaaccatggcttcatgttgccattatagtgtatgactgctgcattttcaatgtcagatcgatcaacgctcggattgtaacccaaaccaagaacatgccatgtttttgaaagtggatgtgtcaatccatagaatgtaataagtcctggtggtaatgtcccaagcttccaaagagccctatcttcattctaaatacaaacacaacaaagagaaatagataagtgatagagatagtcgtttccagaaaatagtttttatatacaataatttctaagatattcggagtgaccattcttgcacccttcacctaggtgcttgcatgtgaaacagttaaaaccacatggcaagagaaaatggataagaaaactcaccatgttctgccacttgtgatatatgcctgtaatatcctgatttttccactctttaagatcaaagatgttcatcccataagcccacccacatgcattgggatcaaagtttcttgcaatatgaggatttgtaaagtttaagtacttgtcgaatcgatggaagctctcaccacaagtttctacagcaccatttacttttccattaagattcacagaccacaagccagtcagatctttctggacaacaatgtcatcatcaagaaatagtatcttattcaacttgggataaacctgtgggagatagaacctcaaatggttaagcatagagagatactttgggttcctatacttgagattagaagccccagacgaaagtgtggttggatggccagctttaaaataatactctttcattgcagcggattccagctgccgcagcactgggcaatatgttgaattcagccacttaaattcatcaacattttcaacatgtattgttgctttcccaggtggattcaacagaaaccacatattcatggctccaaagttaagcttgtccgttacaaggtggaatacatgttttgaaggatcctacaaagcaagcaagataatattaacatgtatgacaagacaacaaattattcagtacaaggatggtgaacaaaataagtgtctctaccacaagctgcttgggccttaataaaaaaaaaataagaaatattctcactatgcacatatttacaattagtctatgattagtgacaatcatatgagtgcaccaaagtgttgataattcaggtgtaagaatccaatgcattggctagctattgtctaatttcttgttggaaagagaaaaagaaaattgcacaataaccttctaccagatccaaacatttatattctaagaaaaactagctgaaaatcatttcaaccctccgatactacacatggtgccaaaagtagacaccagacaccctcaaaaattaaataccagtaccaaattatgaacgaaacccaaaaaccaaatgataaaagtagcttaaattttcaatcttgagaaagcaaaactatatgcaactgaataaagtacagtgtaaaaaataatttaggccaccttggcattcatgacagttgagttgacaacgactgatgctgccaagacattgtcggagaacagtgcatagtgataaagatttggattttccaagttctcactcttagggaacttt

SEQ ID NO: 69447 - DNA, 3694 bp, Cannabis sativa
gaaaatttggtgtctagttactttgatttgattaagaaatttatgaattcttgtttatgcagcttctgaggatgagattgatgatgctgaagtatcaatagggacagatattcctgatcatgatgaaccaattgatgaaattcaatccaaacaagacccttcttcaagttctatcaatttgcatagtgatgacaataatcatgatggtaacaaattaactttcatatgcagaaattagttttcttcttttgtagttacttttgtttgatgagtgttgtttttttctttctgcaatactagattttgatgaagctgaggaggaagtagttgaattcaaaaccttatcagttgaaacaaacaacaatcatttatttttcggtttagagcttaatgataatgatgaagagaagtttcataagaagttgttattacttgaaagaagagaatcaggaacagaagagtcattagatggaagtgttttaagtgacattgaaagtggtggtgatggaatactcacaatggagaagctaaaatcagtgctgaaatccgaaagaaaggctttgaacgcgttgtatgctgagcttgaagaagagaggagtgcttctgcagttgcagcaagccaaacaatggcgatgattaaccgacttcaggaagagaaagcagctatgcaaatggaagctttgcagtaccaaagaatgatggaagaacaatcagaatatgaccaagaagctttgcagctattgaatgatctcatgacaaagagagaaagggaaaatcaagagcttgaaagggaacttgaaatgtatcgaaaaaggatacaagattatgaggcaaaggagaaaattatgatgagaagaatgagagaagaaagcatcataacaagaagtaggaattcttctatgtcttgtagtaatgctgaagatactagtgatgaattgtctgttgatttgaatcatgaagctaaggccgaagaagaagattgcgtcggtggagataatcagaacactcctgctgatgctgttctgtatttggatgaatcattgaatggttttgaggaagaaaggctttccattcttgatcagcttagagtgttggaagagaagttgttcaccttgcaaaccgatgaggaggatcggtgttttgaggatgttaaaccgattgaagtactctgtaaagaaaatggaaatggctatcatgacaatggacatgtcaaggaaatgaatggaaaacatcatcaacaagagagaagaattatggggtcaaaggctaagagacttcttccattttttgatgcaactgaggaagaaaatgaagatggtgaggaaagttttgattttgttatgatgcaaagtccagaattcgaaagagagaacaagaagtttgctattgaagaagaagttgatcatgtttatgaaagacttcaagcattagaagctgacagagagtttctaaagcattgcatcagttcattgagtaaaggtgacaaaggattacatcttcttcaagagattttgcagcatcttcgcgatttgagaagcgtcgaaactcgggtcaagaacatgggagatgtttctttgtaatgaacaacaacaacaacaacaacaaaaaatttgataggtaacaacaacaagaacaacaagaacatgatgttttttttttttttgattgtttattatttcatttttagtacttaaattttgtctagtgtgtcttaccttattaattgtttcttttatttccttttaacattgcagaattggctgaaactttaggaaacaaatgctgtaatttcaatacaagaaaaaggttccaatttgggaatgtccctatttggagagggagagttccttagtttaaaaaaaaaacaaaaaaaatgtggttgatgatgatcatgattggtggacaacaaatgtgtctacccttttcaattttcttctctttttttatggttttggtgcccaaatatttgtgggttgtgcccataaccaccttttgaagggtaaaaagggtgattgatgagcttgtgtctttgtaagtctagtagagtaagtttaattagatatagttatagaattaggcattctcttcttttgttcaatttttaatttttattttggcaaagggaaaggggtaagtaactcctttttattttatttttttgttcttcctcatttttccatcatttgatcaaatggggtttgtttattatttactagtattattattttgaggggtaaaagttgagttacttgtatactacatgtaatccatatttgtaagtatataaaaaagtgagggtttgtttatatatattaagatgtattattattaataatattaagagttattaattaatattattttgtttttagggaattgttaaaaaaatattattggtgcttagtacgtatcatattattaagtcatataacttaaaaaaaataatttttaaaaaatatccctaactaatcatagagcattacatatagaaagtactggacactgctgatgtcccgtaacaaatcttttttttttctatgacttgtttagacatgtagtattattatattagaaaaatgtgtacaatgatgatgatgagagaagccaattgatttagctttaagcataaatcaagacatgttaggtgcaagccaacatattatataataagttaaaataagattattattgctcaaagcaaaagttgattaatataaaaatacagctaagtggtgatgaagcaaaaatctttaaaatacaaagacaaaatgattctcttaacaatggcaatgacagattaaattacaaacattctccaaagtgaacaaaccaaactaatcatcattaatgttaccaatcttggatctgaggtcttaaattatattataataatgttcatatatacatatagtatcaactataacacatgcatatagattagtttatagagtttatattatattcacttaattatggccatatatagtcttgcttaagtaataaactaatatcaaaataataaaattgttgtcatgattatactatcttatatgtcaatgaaaaccctaaacaccaaaaatgaaaatgttgaagaacacaaacaaattaaccttatttactcagaatgtatagaagtgaagtcatgaccttgaaagtttcgattctcttgcactttactatgatatctcaaccactttccttcttattaattagtccatgaattaatatataaatataaataagatatttggattataaattatttttgatatgatagatagttccatattacatctactctaacttaattaattaacctcttactttttagtttttatatctcactatagcccaaaaggagatttttcactcacctcaatttcttgtcaaaatgagaatgtttttttggtggccttcaaaatattcaagagaaaatataggcattaccaaaaataatctgtttatatataaataaataaataaacataatccatatatattacacatgttagagaagaaagaaagcaccaagaaaatattcctcaaagagattagaattgagatgagaggaggaactaagtaaccaatagtaccattagcatttgcctaacttattcttcccacgtgcttatgtcattgtgtttaattatataatataatattgattattgtgtcagtgtaagaatgtatatgt

SEQ ID NO: 69448 - DNA, 6213 bp, Cannabis sativa
cgcaaaaactgatgtgtcaaaatataaagcattggttcgttcatgtgattcataaaaaaaacatttcaagaaaaaaaaaataataaagagataaggtggcactcattctcccttatcattaatctcaaaccacctaaaaatccaaaaaaatataaactcaatcatatatgtctaaatattgttcttccacatttgataataatcatacacttaaagataatgaaaagatattgatatagatatctatgaccaatgatgaatgatcgaataagaaagtaaataataatatgtgcaataatataatatatttttaatattgagtctcatcaaaatattatactttctttgaaatgataatggatttaacaaaattttaacaagatggtcacttaataataatactatatttcggaggataaaatttactaaatttgaatatagtaaaggaaagctaaaattaatattttggaaccacaaatcattacttaaaaaaaaataaaataatgccatattcacatataaatatatatatatatataataaaatgagtgcccaaattaataatatatgaaaaatattaagtgaggtataatattattatttggggtaaaaaagaatgatgagaaattttttatttttataaatattagaaaaaaagaatgtaaaaaaaagtgtaaaaaactacaatgatgagaaattttcttgagattccctactaaggtgacaattatggacacaaaacccgcacgagtctcttcattggattctcttacttatgctaccctaaccttagacacactgacacacccacatttctgactaacttcctatctcatcactttctttctttttttctaattaattcttctttttcaatttaattacttactatatactataatccatcaccatatcacattattcaaattcagctacaaaccaaaactatatgttaccactccacattatctttaaataaaataaatagaaactttgagctgtgagatctctgctgtttttggactcagaagtttgtccagtggcgacattcctaagaaacttgtgtgtgtttttttataccaaaaaagcagaaaatggttaaaccctttttactctgcaaatctttaatttattgcagagactagtactgatgaataagaagagaagaagaagacaacagaatttcacatcacgcacaatgcggtgggtgtggtgtggtggggtgcacttttcttatggtggaacccttttcttcagtagtacatgatgttaatgctttttgatgagatattacttgtcaatttaaggcaaaataaatgaaactattaataaatattatcaaatacatgataacatatgattattttttttttttgaaataataacatatgattatttagtggggtactatagtctctaagaataatatatatgctgatatatagtacattagtacccttaaaaacactcatatgtaccagtcctatattcaatgactgctgctattttcagtgttagacattatatatatcacaatttacttatatattaaataaaaaaaaaaattatttatgtatattaaatcaggaaaaaataattacttgagaggaagacgaagaagagaatattgtgcacaccaaaggaagctgtatatatgcttctttttttttccctttccatgttgacttaatattaagcaaaccaaaacatatgattacaataaataataaaccactctcttctctaaataaataaattaaaaaaaaaaaaaagaaatcaaactcagaacactttcttatactcccaccatatggtcagccacatacatattagaaaatactaatatacagcaatattaagtactccatcactacactattacttgatcattagtataccctacaaatttgaaacccaataactcaaattaactattgttaattaataaaagaagcaaaagctaatagcagtagtagtaatctctctctcttgaaaatcattcaaacgctatgatcaatcaaaataaagactaattaaaagttggtccataatatataaaaattatattatgaagagtagtcacacacacattattaataataatactattttttttttcttcctttttatttcaaactgaaataccgcgaacagctaagtagaagaaaagctctaaatctggtggagcaaagaaagcaattggagttctttgaagggagaaattagtagaaataaccctttgtttttttggtgctggtggacacgtgaccacatctggtatacgaaatctcttacctttgggtgttgaacaaccgctattgctgcttgttgaaacgacgtcgtccactgcttcaaactcaatgccttctgttttaggcaactcgtcgtcgttggaagaagacgaaaacgacaacggcgatgatgatgaatgaataccatttgttgtcgtttcttcattcttttgtcgttcaactacattcttcttcaactgatgactttttctttttcttttgttaatacttctgctactactactactactctttcttgctgctgttcttgttcttgttcttccagaaggccccatttgaagaaatgactacttttacaataagggaaagaaaaaacagagagaaacccaagacagaaaaacttaaacttgtaccctatatgtatatatatatatatacacacacacgcttttaaggcttcttcttctgtaaagatcaagactttagaacaaacccgtattggagatcataatcatgacgatgatcagagagactgtatataaatatatatctttctctgctatttcttttttcttataaatgctaacaaaaggtcactttaaaccttagcagaacagaacactactcaaaaccttgacagaatcatgactttgaaattaaagatgaagaagaaagaaaaaaaagaaaaaatccccaaaaccctgttttccgtataaactttagcttacttgaaaagccctaattgagaaaaaaaaaatgtgaaaaccctaccgaggtaaaacagagaaataaaccaagatttcggaattctaggtgtgttagctgtttatatgggacaaatgcgggcagactgaccgctgcccgtgatgagagtttaatttttttggtacattccatttaagatattaaattaaaataatcaatacagcaacttgctttactaccacatagtctcaaatgaataagtgaaaacttataatttttatttgtttatttgatgcaaggataggcttatttataggattaatttttaatttttttcctttcaaaaccccacttgttccctttgggtttattttatttaaataaccaactaattaataagtgggaatacctgagcagtgtaggtgatcaatattaatataatataaaatacaaaaaaagagggaaaaaataaaattcaaaaattgagagatattatatgcatatgtatcttatacatacatagggattatatatagaatactttggggaaaccacaaaaggatggccacatgcccgaggaacagttaatagttaagattctcattcatagttatctatatatttgcttctaccgtataaaataaattatatatattaaaattgaaacattgtctgtatgctaaatccccttccgtagacatttccattaataaatattttatttgatgtacaatctcttcttccagtgctgttttgtttttattttattttgttttcttgttttttttttttttttgaccttttcttcgaacaatttctggtcacctcagagtatcctaaaagtgggttcaattaaacattttccaaagatttggatcagtagtttagatactcaacaaatacaaattagatacatgcaaatgaaactattaataataataataaataaataaataaattaaaaagacaaataaataagattaacacttttgcatggcttcttcttcctttatttttttcattggaaatttgacttgtctaattttttttaagtgaaaaatgaaacacgaacacatggctgctgattttgaactctggtgcatggtttcactgtggattacttataataagtttagtttgacagaaagttgtttcttacatgtgtcgaaaccgaatgagtttttggtctttctttgattacattcatgcaaagtgtataataccttagctcgtcaattgaaaacatttggtggcattctgacaagtcccttttaatacatttgtagagagggacagtgaattgaattcctttaacttctttataaagattaaattaaatttcaatggttttcttcttcttaatcaaagaaaattattaaataatataataaggaaaaaaatacttgtatcacgtctctctttgttaaacttcttggccattgttgaatcagagaagaaaaaggtgaagcacagaaaaaagaaaaagacaataaagaagaaaaggtaatgaaagaaagattgaatgaacaaatagtaatcttattattgagtgaatagagttattgactatatatagtcaatgaatacaaagagaatatcagttagttaggaccagaattagttacaaatacacgatagttgtcctaacaaatattgcaactaactaactaacttaatattcttaacacgactcctcaaggttacaattggaagcatatgtagcagctgagatgtcttcaattgtaagcttagatcaaaacagaggaaaccattaagtggagattgcctttgtaagtccatcagctagtgggttgagagctgggagatgtttgacttgaacaagttgttgtagaatcttttcgcgcacaaagtaagatcttattctatgtacagttcgtgcgtgaagaatcgggtttgatgtgagaagaacagtattaagattatcacaccaaacaatggaggctaaggaagcttgatatgaagttccaagaagaaggagtgaatccatgttatctcaaccactgtgcttgcaaacaaggtgaggggcagaaggaatttcaaatcctgggggttgaaccatatacagtttctctttgagagttccaatgagatatgcattgttaacatcaagtttcttaatggaccaaccatgagacaaagctagagtgagaacaagtctaatagtaacatgattaacaactaggctaaaagttatggtgaaatcaaagccaagttgttgatgaaaatcatttgcaacaagacgagctttgtacctgtaatgtatgccatatgagttttctttttccctaaacacccacttccagcctattggagtcattctttcaggtaagggaactagagtataggtgccattttgtgtcaaagcaagaataattttatctgtcataacctgattccattgcttgcttgtgtattcctgattttccatgagtttcatatgatgtagatcgcccatggttctttttagaggaggagtagcaatagcaggagctgcttcatatgacattgcatggtagcaaaaacaacagttgactcagttgtgttggaacttattttaccaggatctagatttactagcatgtattttggttaataccctaaatatgaattctttaatacgataaaattaaacacataagagcttagaaagccttacattgatggcaggagaataatatgactccttctgttcagatctctaacccttgttcctttctactgttgagtaataacaagatctgagcctgtatctccttctctcattcggtttggttaaccacggtcttccgcactatgattaagtatttaacttgctatatgtgggcatggtactatatcactaaaggcttgaggatttatgaagaataacaagagggggcgaaatcactatgaaagagtctctcatctactagttgtctaacagagttagaaaactaggtttagtttggttgaagtgagttggatgagaatgagagcatcatgttccttttatagtacttcaactaggatttaggatttaattatatggattaaaaaagaataaaacaattaatgggcaaaaatacactctagtggccgaccacttaatgggcatcactagttacaattttgccactttatttcaaccatttatccttctttcaataatggcatattttctaatttcaatcatgttgcccctgattttgtccaaaatacgtggaccaaccgaattgagacacgtagactgaagagg

SEQ ID NO: 69449 - DNA, 13856 bp, Cannabis sativa
  modified_base (11846)..(11850): a, c, t, g, unknown or other
cactttaatacccaatgacccacaattactaaaatgatcactttattttgagtcaaactttaaatagcaatacactaatatacatatgagttcatgttgagaattttaatccaacattgggtccatactttacatttaatcatgtaaatccaaattttccttattaaatttacttatagtcactaaggtggtgtttgctttaatgtgatgtaatataatgagaatggtaattgtaatatgaatggtaatataatagaataagaattgtaataggaatggtattatgatgtttagtttaactctttcatgaacattgtaatcgaagaaaataagttgtatattaataaaaatacccttaattttattatttttaatatttaaaatttaaataaaagtaacaaaaaaaggcaaaaaaaaatattttctaataatgtaatcatcattatattagttttataatataatggggattacaatacacagtgtcatcattataatgtaaagccattataaagctttaaaacagaaagcaaataatataataataataatgattccattacaatctccattacatagtctgcttgtatttctactattaaaaattagagtattaataagaataactttagaaaggaaattaacagtcttcaatctagtctagataacatttttccaactcttctatttcggacttagataatcaaaaggctaagtatattcaatctcagatagattctctcctttataaagaggaggttttttggaagcaatgctctagggttaattggttaaaagtaggggacaagaacactaaatattttcattccaaggcgtcctctagaactcgaaataattttattcgtagtattactcttgataacggtttctctattgttaatactactaatatttgtactcaatttctcaatttttataaaaatctctttgagtcccagggtactaacattgaggctattgagcaaattcttagttgtgttagtactcgtattgatatcccttgttttcagatgcttgaggagccttaaactgttgatgaagttaaagctgctctttttcagttggctggggataaatcccctggtattgatggtatgaatgctttattttatcaaaggaactggtctgttttggttgttgatttgtgtgttattgtcctttctattttgaatgataatgctgatctttctttaattaatgagattttcattattgttattccgaaagaaaagaatgctaataaagttagggattttaggcctattagtctttgctctactctttataaagttgtgtctaaggttttagctaatagattgaaaagtgttctgaatgatattatttcctcgaatcaaagtgcttttattcagtatagggtcatttttgataatatttttattgctaatgaattggttaatgctatcagtcataggaaatttggtaaagttggttgggcagcaatcaagttggatatggaaaaggcttttgatcgtgtggaatagaattttgtggaagctattatgcttcattttcatttccctgctaattttgtttcccttgttattagatgtatgtctactgcttcttttaggtttcttattaatggtgttctgtctaattattttaagtctagcagaggaataagacaaggagatcctttttctccttatatttttctgcttgtttctgaaggtttgtctgctgccattagataccaggagtctatccataatttccatggtatttcgatttgtcgttcagccccttctatttctcatctcttttttactgatgatagtttactcttttctacaacctatggtcgatcttgtttagctattaagcatgctcttgatctttaccataatgccactagccagctagttaatttttctaagtcctctgttcttttttctcctaataccagccctgttgaatctgaattctattacactactttgggtttggaggataaaccttttgttagtaagtatttaggtgtcccacagtgttctggtaggtcgaaaacttctcatttcaactacctcattcaaaaagtgaattctagattaattagctagaatagtcttcttttctctaaagctggtaaagaggttcttcttaaggcagtggtccaagctcttccctcttatgccatgtcttgctttcgaattcaagtttctgtttgtaagaaaattgagagtcttatggcttaattttggtggggttcaatgggtaacaaaggaaaaattcattggaaagcttgggggaatctttgtcaatcaaaattttcaggtggactgggttttcgttcttttattcatcacaatcaggccttgcttgctaaacaagcttggcgtatactcattatgccagactctcttgtagccaggttgtttaaagccaaatattttcgtcataattcctttatttctgcttctaaaggtcattgtgcctcttttacttggcaaaagtttgctttggaggcgggatcttcttaagcgagatcttttgtggaaagtaggtaatggcaaatccatctccattgtgcattcttattggatttctggttggagattcatctcttttaaaggtaatgttcaaccccctgatccttctgtttccttttttattgatgataatggatgttggcataaggatcgattattggaattctttgatcatgatctagtctctaccattcttgctattcccattggtgatccttctcttgaggatagtcttatatgtgagcatcatccctctggttcctttaccgtgggttttagctaaatcttcaatttcttttcctgcatcttccaatagccaatctttggttcgttggtggaaggttctctggaaccttaagattcctcagaaaattaaacatttcatttggagggctttccatcttactctcccagttgctcttaatcttttccatcgacaaaccttaaccactccttatttgtccttctattctggaagttctgaatcagtgactcatgctcttttagagtgttctagagcttcttttgagtggagtgaatctagatttgagaccttttacttaaataataactgtcataatgtccgtgaatatattcttagaggttttgatactctgcctaaggatgatttaagaatctttttatgcattctatgagaaatttggaatcgtagtaatattgctctatttgataagaaaaagcctataatttctactgttgaatttcaggttgaagctctgttacaagattttgataaaactcaggattgtaatgcaaatcatttgggctagaattcaaattcaacattggatgaagctcaatgcaggtcgaattcagatgatgaccattcctttgcatcagattattttaaacttagtgtggatgctgccgtggacaatagcagaaaaaaatagagatgggggcagcaattaggaattctagaggagaggttgttgcaacattttcttctcctttgaatggtaacctatctcctcttttggctgaagcaaaggcgttggttgctgctctcaactggtgtatgattgttaagtttcctttgtgtattgttgagagtgattgtaaagtgttaataagtaaagttaagcatagatggaaagataagtctgctctttcagacttagttagtcaaattatattctttctctgtaactttctcactgtttctgttaagcatgtttttaggcagcttaatgttgttcctcataagttagctaggacagctctaggacttaagagagaggttatttggaatggtaatgttccaaatcttgatatattgtaagttgtactcatttcttatcttcaagttgcaatatatagttcttttttcaaaaaaaaaaaaaaaacatcttagacataatctccataaaaaataataacaaataagatcgaaaatggtaatgagtatcatattatcttgaatgaattatttattgccacaaaaaaaaatattaaaaaaaagtaatttagtatcattgattcattgtatcatttcattcttggattaaactggtcatcacaaaataattaacagaggggagaggttctcaaatttaaatttgtagtgatgaggattttatcgaagctgtgggagactttgagtttcgctttacagcccgagttttggagaatgatagtgttttggatatgggctctgctgctctcttgctttaaggcgcttctccttccaaactctaggcgctatacccgttcgtctcctcctcagctccctcacaccgcttcttcttcttctcctcctcctcatttcagacccctttgcatcatcaccggagtaacccttaaaagccttgccttccatttcaacttttttttttttaatatgctttaactaacttttctgtgttatcttcggcgggtttttaggctacctctggtttgggagctgctgctgcacatgctctttccaaggaaggcttctttgtcgttcttggtaaatcctcttcatcttttttcttgtcgttctgtatcaggacgtgaattttatagttctttcttttggggatattatatcaacgtaaagcaaagactttatattctattatgactctcagtatgaaatgagaggctgaaagtcatgtaatgtatgtatgcagttggacggtcgtcccagttattggaagaggtattgtttctgttctctaaatttcatatgcatatgtgccctttacactttatgtgtttgtttatgtatgttcttcttgttgttggttatgtaacagactatgagagaaattaaagctaggaacaacactgcccaactcaaagcttttcaagttgatctgtcatccttcatttcgattttgaagttcaaatcttcccttgagcagtggcttttgaattcagaaatgcattcctcggttcaattattggtgaacgacgctgggatactggctacatcgcatcgactcactgtcgaaggctatgatgagtaatgtctttcatagttgatttaatagtaaatacagaaaccaattacctggttttgatacaatattttcattttatagacacatgctattgtctaaccaaatacagaagttttaggttgctcttctgttctttagcttgttatgactaacacaaattgaaactacagtctttcagagttttttggatttagtaggcttttagttcttcacagctttgtgttatcatagtatgacgatttaaatcaacagaagaattgttttattctaatattacatctggtctcttactcccttgaggtataggttacttaatgtaaaagttttaatgtaaattttcagagttatggctacaaattacattggagcattttgtctgacaaagctgttattgcctctgctcaaaaacagtcctataccttcgcgaatagtgaatgttacatcctttacacatcgaagtggtaagcttatatcagaagtctatgggttcaaactttttctgtaattgatctctcaggtaaatcagtatgtctagtcttgatgaactctgaaagtatgctgctccatattaacttgctcgacccttgcttttagtctgtgatgtgaatagataaaaaaatcttctattataatttgacaaatgcaaatccatttaggtgatgtgaggagaaaagtgaaaatgtgactatttctgtataggagactacaattctgtcaacacacacacacagaaagaagaataaaaagagagaagaagaagggcacgagaaaccaaatgaatacaaagtcaagcaacataaaattataaaaggaaaacccttgtaatccatagccaatgatgacaaaatctgagtgtctccttgatgaaggaaacatctggaatgttatctttaaaatcctatattttcattccaatcgcagagtcaagtaaaactttcatcaatgttgtgcttgtgtatctaaccagtaacaaaacaaagtaataagtgaattgtgctcataaatcccagcaaggtaaatattctaaactagtgccaagtaataaggtttacaattttagacttgatagaaattctacgtggctgacattgtaacggttataatgtgatcaagaatatgaattatgcaatttaagttaggtacaacatgtttttttttcctatttttcttttctttctgcatagtgctatagttagatctgttagttcttcatcacttcctttatgatgttaaatgtgaaattaacattgctatgctttttttttcctttttttctttgaagtatctagtgttcagattaacaaagatgttgttgctgggaagtggttatcaggattaaaacaatatccatttgctcgagtgtatgaattttctaaatgtaagttgtggcgtttacataagatagtagctgctattttttcctcttaagtttaacaatcagtttcccttatcttttgcagtatttgtactgctattttcttatgagcttcatcaacaacttgcctcaaatgatgaatcttgtcaaatatctgtcctgtaagtatttgcaaattcttagcagtcttttcttcgcacatcttacatttactacttctggacagaaattttctcagtgttataccataaacagatattcctcaatattattgatagctaatgattgtctttctaattctattttatcatcatttgaaagtgcggcagatcctggatttgtgaaaaccaatcttttgcgtgaatttccttcctttattactcaagtggcattttttgtcttgaatcttgtgggacttctgcagtcacctgagaatgggataagttctatccttgatgcagccctagctccaccagtaagtctctctttctaatattctttcgttgatattggtatggatatcatctctgaccaagtatgctgattttagactatttgaacaataatttcaaatttatcttttacaacttggcagcccaaagatgtttctcaactatctaaatttttgtactaattaattagcatgccatatgatgcaataatctagacaaaattagatgatactgagagaaatacaaaaacatttcaatctgataatattattatcatttggtagtttcttcaagttctttatttatagattttggtgatttgtcctccaaaacactcatgctgcagattctgtgctaaattgacccagtaatgtttcttgactttcagttaatttttttttactaaccactagcattgacatttacttgctttccggatttggttcggccagtaatctagaaaagaaaaagaaagtagtgtcagcagtattttccgacatgctgatacattctacttcttcctgtgatcgaggacattatattcttgttccaaatctaacagaatcataatcttccattctttttaaagttggatttgggcatattttattcatttgaattcttggtatgagctgaattgttttgttggtttcaggaaatatctggagtctacttctttggtggaaagggaaggactattaagtcatctaagctttcatataatgatagacttcggcatgaactttggactacttcgtctgatctgtttttgcaatcacagctagctaccacggaaactttcacttaattttgagatgtaaaggaggggttaacttaacaaatataagctaaatgatagaaattttattgttagtcataagcttatgaactcttccagaaaatataaatgtatttttatctctctcaaaatatttgaattgcttttggttaatttcaatctgaatttgttgtaatccaactctaccactgttcttaacatgtccgtgtccatgtcagaccctttatgtttatcgttctttggtactctattttatcatgttttcttattttctatagggaattggtatctgtttcgatagaatttatactttgagaagattcattgtgattttcctaaactcttgataacagatgatagtcttttcagattagaaatagtctactaattacattcaccagaatgtttttattaatcaccaaaaacttatacaaaatagctctttgagaggctttctctcatattccaaactttcaaattcctagctgatctaaatgaggttgcaacctctatatataggcattggtctttataagactcgggccacctaagactacaatctcagcacctatgcacgtaaaagaaagtatttcattgtaatacacttgataagttttaggcttatcaataccccaccccaaaaaacatcactttgtcctcaatgtggaaagtaggaaggaattacaggtactacttgatggtgaagtcttcccaagtagcctcatacttgggcagccacttccatttgataaggacttcactaatagacgaatccaaggctttttgccgctactataagattgcttcaagaagaacttgaagctccaagtctgatgtgagctatggtggaggtgttggtgaagaattgctatcaccaatggctcgactatgttgggacacatggaacagggtgaatagtggcatgattgggtagctgaagcttgtaagaaacttttccaatctgttgaatgatataaagaacgtgcaattgaggtaaaagtttcttattagcgggcatggctaaggacttttgacaataggggtagagctcgaggattaaagtctgcatactttagcatatgtcgttatgcatgtaacaaatgcattcaaaggtcgtctagaatggcatcacgggactctaacaattggtccacgatggaaactatgctaatcactttcttatagggcaacaacgatggagggtctcgaccacatagagccttgacaggagtccacttgataggggaatgaaagaaagtattataccaaaatttcgaccgtgagatccacttggaccatttttgggattcttattagtgaatttcatctgtaataagcctctagaaatctattaaggaccttagtctaactatccgtttgaggatggtaagtgatgttgcacttaagatgtgtgtcttggagtttgaataaatgctaccaaaagttgctaagaaaaatttagtctcagtcataaataatttattggggtagaccatgtaaacaatctcatgcatgaaaaactcagctactgtagtggctataaatggatgatggagcttcaaaaatgaacatattttgataatttatcaaccaccaccaattggtgtcacacccttccaatatagttaacccttctatgaaatgcacagtaatgttaatccaaacttgagatagtagcagtatgggctaaaagtccgactggtgtggtggtgagatatttattttgttggcaaatagcatactccaattatagttatgcacattgaacctcataccttcccaaaacatctacgcttagaggtttttataagttttagcttacccgcatgtttccctatggacgtataatggaactcatgtaaaatcttaccaagcaagccatttcttaggaatgcaatttatttttctaagaaagaacccttcgatgcatgaaaaagatgtggtggaggtgtccttgccgaaattcactaataaattttaccaacaaagggttataagccatctctctctccaactctcaggccataaatgccattcattactcggttgcctggatagtgcaccttccaccttattgttagggtttatgttctaaaagtaagtatttaacgaataatatatttgagaatatatgaaataaaagtgtaagataaatgaatatataaattatataaatataattaataaatatctaaaaattctatattcatatagagaaggtataatcttgtaaggaagtgcaagagaattaagatcatactatatgaataaaataagttggtagtgtattaaactatgaaatctttaatatgaaattactaagtacgatttactaagcattatactttagtgcatgtaattttatttcgaatcacatatgtggatagacatttagtaaagataatgtctatgatttgattatgcatgactggaccaatataaattaacatcttttatcaacgtatcgtttatcataaaagagttattcatatcacaacgatgatcattagtagatcggtatgactcctgcgtgtttatgaactcctgtttgtgctcattaggttctttgatttactcgttaaagttttttagagaagataattcttacaacttctgtttcgagaatctaataacatgagaggttgagaacatgttatacaatagtggaatccaagcttctgaaatgattgaatattagttcacttatagtgttaattctgagagtgattacacttagatccaaatctataattgaaattatagattaactattcacattgaattaatggtacataaaggaatcaagagataattagaatggtaaaacggtaattttaactagctctaattatgaactaataatgattggaggatgaactacttatattgattatatcaatgaactactagaaagacatttgtaaatataattctatattctcaaatagtataattccatatttatagtggagtaataatggattaacaaacctgaatatttttattgatgaattcaataataatcacaagtttattggaacttcgaaatataggttcatggtccctagatcatctctatacaacactgtacatgaaaataatttttgagggcaaaataataattttgtgtaaattattattctgaataattatttaattacaaattgaataattaaaatagacttaactaattagttttattcattttaaactatatattagttaaatataatattattattaaataatattatgagggagaaatatattattttattaaaaagggtaatttacaaccaaatttcctaaactttaaagtttagcacgatcaacccctagactgaaataattagggttgaactctcaaatctacataatcgttttgctatgtagtccttccatccagtttggtctgttaagtgtcaaagtagattgtcacagtgtacacaagtgtacacgtaataaaattctattggtccccccaatattaataatttaaatattaagaaaataatttatatttgaaaatttataaaaaataggaaaaattaattatttaaaataattctttttcattttattttcttcttcttctttctttttcctttttgtttatgtgcatttttttatttctttttccttttaaaaaaaatctaaaagagatctacagagcccatgatttttggtacaccagccccagaattagcctccatggttgtccaaagagatcttatttctttaggtattagggtcttctagtttacaagttggtttttgggggtatctcatggttttcgaatcggagttttcatttgtgggttttgattaattttcagattagagattgaggtgtactggtccatatgatgtgaaacaagtattccccaaaagttctattgaggtcgaggaccctaccgatggaagaatttttcgagtcaatggctagagaatgaaacattacattgagagtgtgagccttgttgaagaggtcgatcttgaggacccagattatacaccctgaatatttatttttcctatctatataatatagtattttattttatttttgttatgtgtttttgcatttttcttttctatgtttgttttgggttactattatcatgtgatctccactcttgctccgtgtatattatcgtcatcacgtgtactcttttccctatcctctttattttatatttttgtgacattgaggacactgtnnnnntttgagttgggggtagtgagctctgttgagcgtttatttggagaatttaattatcttgttgaattttttaagtcaatttttttcaaaattatttgagcatgattgtaaaattatagtttgagtcaatatttgttgtattttgttatcaagttgtgattttccaagtttttttgtgcactttccaaacatgtggtaaaatggttgctaacgcatatagttgagtaaaattttgagtgtgaagttttgtattttttgtgagttgtgaaatttgagaaaataactttttgaacttttattgatcatttgaattggcaaaatcaaacttttagaatttcaaacatggcatttactaaaggggttaattttatgttaaaagaggctttgtgtttatttctttgtaaccttattgcatttctttgtatttttatttttgtatgttgtctcttgtcaaaaaaaaaaaaaaaaaaaaaaaaaatcaaaggaaaagaaaaagaaaaagaagaagaaaataataataataaaaaaataagagcaagaacaatatcatttcaattatatttataagaattcttcattgcttgtttcaaaaagaaagtttcattttagcattctttattatgtcaaaaaaatgagagagagagagagaggcatcacatgtctctctaaaaaaattgttattgcatttctttatttattagttagctagttgattttttattttgtgaattttaattctaaagttgtttatcatttaaattctattagtttgatatatatgtctatcttgtgatcaatatttcttcaaattgtttgtcttaaaaagtttatcctctcttatttgtgcgttgattattacatttgcaacttcaaagagtgtcaccctttcaatacaaatactttcaatacccgtgacaaaattagaattgagacctttacagttttaagatttttcgatctatttgtgttatgacttaaaaaaatagataaagtttagtgcatacacacaactctagagttacaacagatataacattgataggaatttttaaccctctattaatattttgacttggatgattttatttggtttgacattcaacttgataattttttttctttacttgaattgctagggactaacaataagctagttcatggttgtgattaatggtgaaaaatgcacacaaattaatcttaaaatttaaaataaaataaattaaaatcaatatttttatgaaatttatgagatatatttttatttttaaaatatgtgatttgaattttatttgtttctgttttgtaggaattaataattattgaagtactttaaaagaaaaaaaaaaaaaagtagtgaaaaaagagcaaaatttggcatttataaaagaagaatagttcaagagaaccaaggcccaagcccatgcctctcctcctcctaccagcccagctctccatcgagtgccgagccatgcaattgtgatttcagaccagcctccttcccacattataggtctttcttttgcgaggaaattacactctataccatttttatatgggagatttttaattatatacacaaatttgtaaataatcacaaaaatgacgctgacctaaataatcctaaaaatgcgggcagcttatgcctaatggtaagctatttaatttcaacttttttcattctctttcctaagccagccattttcaattatgtttttttttagaaaatctctcattttgtctctacttttagtatttgtcaaatttttgaaaaattattttctcctttatggtcttcactatttgtaattcattttttttattattatttatttattcttaaaaagaaattttttaattatatacataatatttaaattaattatgaaaataattaaaataatttaaatagatacaaatatgaaatgatgttacaccgaaaacataaataattattttcttaagtctttcatgtaaaaaattgtgagtttttttttcttgtgtaaactatt

SEQ ID NO: 69450 - DNA, 3480 bp, Cannabis sativa
tgtaaagatgtcttaatcattgttgaaacaacaacaattcaggttgagtttctaatgttctgcttgatacacatgaatgtgaactcaaggactcaaaattttcatcctgattagtcctgagaaatgataaatttaatgccaatttcatccctgccatagttttacttctactccctccactgaggcagcacctttctgaatctcttcagctagctttgcaacatgtccgtacatggaataataactgatcacgcatagatgaattccaagaattttaatcagttagcattatttaataaaacatgaaaatcaattgtataaagttaaagatatggttaggaaaaaaaccatattccaaatacaacctgttttgcttaactaaggtccaagatgatatggtaagagtacgatggtcccatacagaaaaattgctcaaaaaatttcagctttgatgcgaacatgtgttattagcaatagtgacataacaccaatccatcaatcagtatcactactttgtggggctaagcaggtagaagactaaacatatcaactagttcaacaaaacatatatttgcaatctttaacagtgccactaataattctatcttgttcaagttttcttttgacataaatggaaaggtgaaacaaaagaaatggagtggttagaacagtttaaaagcttatctaataagttttctagaaacacctacatacaaataaataagtgaagtgtctagagtagactaatagacacattagatatatctgcccatgagagaagtagcctcaatctataatcatgatttctaaaagcacacgcactagaatatttctctccattatgattttagttggttttcactttcactatcacttcatctccagttaatatctgttaccatcattataacataaacttcatattatttctccaaaattttgaattatgtatacacagtaatgttgaacttcagctacttggacataaattattacacatcaaacagtacgatttgactctgagtcagatggcatatatccaggttgcaaaagtaaaccaaaggccagagctcttgagacataactgggaatctgagatcattctattttcaactaagtaaataaatctagtcgtctttaaatttgatcaggacccttatcatggaatcattacttatctcatctaaggttaatgaactgaaactacagcccagagaagaattgattttatcattattataattacaaattcatttagctcagactttaggaaacagaataaataataaatgacatttctgcctctcattttagtaattaaatataaaaggagaaaaacaaatcctcataagttattaaaatcttctaaacagcatattcaactttgaaaaatgaagcttttaaaaaatagaacatgagaaattggcctttcccacatagtgatttgtgggatttatattacacacatagttaccaaaccttaaccccatggtatgattttggtatttagagaaatgctatttgtgtgattgaaatttattaaaaaaaaaaaaaaaagaaaatttgtgtgtgttttgtcccacatattggtcagtgaataatttgtggagtttataccaagccttaacctcataataggtttttggtaattggataaatgctatgtgtgattgaaatttaattaaaaaaaaaaacagagagagcgagagcgagagagagaaagaaattggcctttaaaatccattgccattaaagttaaaaccagcaattctcaattccttggttttacaaggtgtgaagccatgacttccataatgaaaaaacccagaaacagatctcatattctttgatcaaaagaaaaagacccagaaaccatttcattgaaagcgactagaaacactgatcggatatctcgtcgaacaaataataaagatcgataaataatcaaaatcaaatcataaataaaaacgagagagaaagataaaatgcatacacaatgtaaactttagtggccattgatggaggagtctgtgtcgctctgcgtgcgctttggtccctcacgagaaaagaagaaaaagaaaaacgtattttcggatgaatggagcgttgacaaggaatcacgaatggggaccttatttatagtgctccataactacataataatatattaatagcatttctcaaccaaaaaaaaaatggatattatattaattataatactgctgcattattatttcctttcaagaaaatactgctacattattgtgtgtgttttttttatttacaaaaattgtgtatttttttagttgggtaaatattattttggatcttgtattttgtaaaattaccgattatattatttattttgttaaatgattaaattcactctatattttctaaaataacacaaataagatcttgagcccatttttttttgtcaaaataaaatttaataataattcaatctaaaaatattataacaaaattaattatattttttacatttgttcgtgttaagaattgttttctagtttattatattaaaaaaattatcgaaaattaagctgaaagtcctagttttaccattttaaaaaatacagaattttattttatcattaagaggctttattctataattttgtaaaatacaagatctaaaatgatatttattcttttgagttttaaaaaaatttatttactttctctttggtatgaagaaataataacataagagagagagaaaattaaatggaaaaaatagaaaatatatttttcactaaattgtttgatgggttgaaaaaacataaaaattaaatgattatattatttttaaattattatatatttttaataattagataaatattatatttgatataattaaatttattatttttttttttttgaatgaatgaatgtaattctctctttttctattaccataatatgataataatccaataaatataataaggaagaggatggtgaagaagaaggttttgtttgtagtctttgttatttagcttattattgacatcattagtgcatttttaataaattctttacgcgtaacatatacttttcttgatgtcatgcctaccatcatttcctaacaccaatgagtttataactttgttagttaaaaatttaaattaatcattttgtatttcataaaatttaaattttttaaaaataatgctatcactttcaatttaaaagtgttaaactttaagcttattttaagttgcaaaatgcttttcaaaattctaaatgatatcttccttcacctctataagttaaagggtataccattaggaaatagtattttctttttcttttttttttcttttttttttttttaccttttttaaggtaaaaaaaagagaataatttatttttaaggagaattacatgtgtgtatatatatatatatatattaagttattgttatgtacgtgtatacttagttatattattagt

SEQ ID NO: 69451 - DNA, 1485 bp, Cannabis sativa
ataaattaatgtaaattttttagctttactcatgttcattttggtcaataatactatttattttctatagttattgcaaaaagttagtgcagtgctaactatttagttagtcatgtcccttgctacatgattatatttccgttataatttaataaaaaaaagactatttagtaactaaataattattaaggggacatattaattacatatatataagtaatagtaatttgtgtaccttaaattgtgagatgttgatgtgataacccacaaaacatgcaaaataggaaatgtaaacatccttaaacaaataaattaaacataataaatttgatttaattgaacaaaaaaatatattgcaataattaagggctgtttaaagtagtttttgtgaccaataaaagagtcttaaatgatcaagtatcaacatcatctacattgggtaaaatttaattgatgatgacaacatttgtcaaatgtgaagaatttcaatgttgttgcttggaaaatggactttaacctaatttgttttttgacatcaatcacaacctatagtcactaatatattgctggtaccattatattttggcaacacactaagtttagttgctattttactccaaagattttaaatcattaaataggtatcataatttgatataatttagaattaatttgtgaaaaggaaattaaaacattataattattaattatagtaatttgggtgggttcccacaattacaatgcctttcaatagatagaatttattaaggaaataataaatatgttagttggttttatgatgggtaagaatagactttggaattggattgtagaatgaaaattttatctatggaacttatgagtatatacttttaatggggtggagattttccttctaacatgacgatgtcatttgggatcattaaaatctctaaatctcttttaattagagggagagattcggtggtttcattcaatatacatttttttaattatttttttgtttttgcaaataacaaaaaggaagaatgttgtaaagttttcgggacactagggtagtgtcggttaattaactaacagtcaaatcgatgaagtaattcaaaataagtaaattgaaatcaagaaaatacttaattagagttgtcattaaaaggtcgaagattgaatggtttaaacaagaatgtttaaagaataagagcttaaaaaattgagagttcaatttagagtcattaatcttttctttgagccgactctcaaagtaagcaattgtttttttgtaaaactaggtatggaaaaccagaaacaattaaggcaataaaacaatagaaatcaacttcaagatatatactgattcaagtccaatagatcgatgtgatctatggctctatttcagttctagaacaacaaatcatctttattgattaagcaagaacaagtacaattcagtcgagatcaatttcatgatgagttctctcaaagtgttta

SEQ ID NO: 69452 - DNA, 2951 bp, Cannabis sativa
aacatggtatcagagctttagtcttttttttcatggagcaatcttctgccggcaacaatggaggatcgttggcccctcctgcttcgtcacaacaagttacacttccaaaaacaaatattgtagccttctctcactctctgtccgttcgtcttgatgaatttaattacctaccatggaagcaccaggtgcttgctgcaatcaaaggcagtcgattgcaaaggtttcttgatccaaatcttgctccgccgcaatatctctctgacgatgatcgacgccgtaacagagtaagtccggaattcgaggactgggagcagcaagataatatcctcgtctcctggcttctctcttctatgtcagagaaagttctcacaagaatggttggatccgattccgctgctcagatctggatcaatcttcgtgagtactatacctctctcaatcgtgccaaaataggtcaatacaagaccttgctgagaaacactaagatgcagtcttctctgtccgattatctgctcaaaataaaaagtatcattgatactcttgcttcaatcggtcacaccacatcttctcaagatcacattgaagctctcttcaatggattacctgctgaatataatgtcttcatcacttcggtgaacaccagatctgaagcttacagtgtagctgaaattgaagctcttttaatggcacaagaggttcagttggacaaagcagcaaaagaacttgatattgtcaaaaatgaagccaacctagctcatacaaaggctcagtcagggaaaggcactacctcagtttctcaaaatatcccctcacctggctctggcaacatgtatagaggtattactccaacttacactcaatttaatccctctcaacctggtttttttgttcctgttaccagaggcacagggcccccaaatcgtggtcaatttgggaattttaggggaggcacttctcgtggccgtggcatctccactacttggggtcaaaaacctcaatgtcaactatgccacaaattgggacacactgttcagcagtgtttttatcgctttgacaagtctttcaatggaccagaatcctttcaaaatttcccaggccatgttactgccaacatagctgagatgcaagcttactacgctacacctgaggttgtcaatgaccctagttggtatcccgactctggagccaccaatcacctcacaccaaatgagcaaaatctcacaaccagcagcagttattcaggagatcagcaagtccatatgggtaatggtacaggtttgcatattcaaaacattggccattcttcatttatctctcccttttatgatcatactcttgttttgaacaatctcttacatgtgccacaaatcacaaaaaatttgcttagtgtctcacaatttgctcaagataatagagtcttttttgaatttcacccctttcattgtgttgtcaaggaccaggttactttgaagattttacttgttgggaagcttgaacatggtttgtacaagtttgattctaatcaactcaatcttctctctgtcaacaaacaatctgcctcatgtaatctcactagcacagactctttttctactgtaactcagtgtaaatcgagtcccttgtcaactcaatgtaacactagtactctatcctctccttgtaattcttttactttgtggcacaagagacttgggcatcctcattataggattgttcaacaagtgctcaactcatgtaatatccctacaagcaataaaaacattgatttgtctaatcaactatgctctgcttgctgtcttggaaagcttcacaaactcccattcccaaaatccaccactgtgtatactgctcccttgcagctcttacattcggatttgtggggtcctgccccaatcaactcctccagtggttatagatactatattagttttgttgatgccttttcaagacatacatggatttacatgcttcgaaccaaaaatgaggctctttccacctttattacctttaaaactcaggttgaacttcaacttggtctccctattaagcaaatccaatcggattggggaggtgagtaccaagccttcactcacttcctacaacaatccggtattgttcataaagtctcatgtcctcacactcatgaacaaaacggggtagttgaacgaaaacatagacacatagtagagagtggtcttaccttgttagctcaagctagtatgcctctaaagttttgggatgaagcttatcggtctgctgtttttctaattaatagaatgccatctcctcaactcaataatctctctcccattgaaattctatttcaagtcaaaccagcctatacttctttaaaaagtatttggttgtctttgttacccccaatctcagaccttacaacaaagctaagcttcaatttcgatctcaaccttgcacctttataggctatagcttagctcacaaaggatacaagtgtctttcaaaggatggaagagtctacatatctagggatgttttatttgatgaattagtgtttccttttgcctctgaagcacaaattaaattcactcaacatcccttgcccactcaccaacaggccactgttagttccattcccaccaggttaagtactctcatccctcctcctggtttcacattcccacccactaattcctctaggcctcaacatcctaatgttttgaataatgctatgcctactgtgtttgctcctactaatctgtctcatgcagaaaacacaacacacagtgccactgctactgctacagctactgctactgctactgctcatgaacatgaagttacatcttcatctggtgccattgctactgctcatgacagcaaccaggccactgctacagctgctgcccctggtacaacacctgaaactgctgctgcaacattacccttgtctcccattcctgctgaaccagttg

SEQ ID NO: 69453 - DNA, 6426 bp, Cannabis sativa
aactgtataataaacagttatgttagttttctgttaacagttaattctgttttacttctcccctttttctggttttatgtcagaggttagttaggataattagtcttagttagttgttgtattccttactgttttatcttttcttctcctgtataaatactctgtattacaacttcattcaacatatacaaaattcctttttctcatttccgtattagtatgtaagcaagaaagggtggggctgtgacagtctgttgagtagttctcggaaccaatacctccatttcttcacaaatccatatagtgagatgttccaatgatggaagataacaaggtaacccaacattaagcttgagacatctatacagacacagttttttaacaagtgggaataatatttgaccttcttcaagaataaattcattaccaaatgaccaatccttccacatcaacatattttcaatacttaaaactttctaaacacctgaattgaggaccactgctatcaatctcatcacctattgacaacacactatcgcacccttcaattctaagatctttcagagaagctagtcgtccgaggggtggcaaaaagcaacaacttttacaatctaccaacgtgattgacactaaattacacaatctttgggaaatatggaacaatatgcaaaacactgtttgagatgtgtaggtaagtgatgatagctcaaccataaagttggaagaatggaaccctccttttgtacagctcctcccatgtgtcactgttaagtatatcctcccattttttggcatctcgttcacaacgtagcaatccaccaagtgattttattgttaagggcagacctttgcacttgtccactatttttttgccaaccacttgcaattcttgtagtcacagaccatcgtcattaccaaatgcatgtttgacaactaattggcaacaatcatcatccaacaaagtttgtagataatgaacacgtccagttgctatgcctatagtagaggcgacaattgtgcttcgggtagtcacaataattttactaaacaactctacaaactatcccacaaagaataagactcgtaaagtgtgttgtcttattccttgtatacatcaaaataaggcaataatctatttaattaataatggtcctttgtttattatatgattatatatatatatatatatatataaaaaaagttgtgttttattatgttggaatcaattgtagtgatcaccctgccccaaaaattaaagaaaaaaaaattgcatgtgccgtgttggtgttctagagcagattaagttgttaaaatttaagttggataacataaggctgtgaagtgaacatccgtgccaatcacttttcttgtggtagagaaattagatacccaatttgagcacacagccaatctgccattgatagttttttcttggcttttaataattagggagctgtgttagtggactagtcttcaatggtcctttttttcgttaatatttttcttttgtttattattatatgattatatataaaagcaaaaaagttgtgttagtgcgttgtttaatataatacttaactctgactattcttcttagtatataaattatgaacttcattgaaattgcatcattttctcaagcaaaggcagtcattttctcttccaaggttggctccataatagtttctagctatacaatgattgagagaacactataaatttcaaaaataaaaggcagataagataaatagtaaagatgagaatcgtaggaagtcctcaataatggagatgtacagtgtttttattctcattcattttggtacacacacttcacttgtattattctatcattcctatattaacacaattgctagaataaaaatcttattagcaaatgtggccttttatatttacatatatagctcaaacttgttattatcaatataattaattagtttcatttcatgtaaagggaaattctttttcattttcatgttcaattgcagaaatacacaactattttaaaaacagaaaccagaagaataacaacaagaataaaaagatcatttggtcaaattgaattacagatcaaataatccaagtctgactattcttagtggttatattaaccgaaacaccctccgaatacccttctatgaccacttgagctagcctatgcatgagaattacaaattgatggtattgattccgtcccagtaataagcatcatcccaccggtccttgtatcgatcttgcatttctatgatgttcttgacgcactcttcgtacatctgatatctccactatccaatctgcattgcacagtaacctccaaaagtcatttgatcagataaaagaaacactaatataaggtactttgtccaatttcagggtacaatactagaatcagttctgcacatgcgatcagttagaagactgaaaatgaatttgatttttagatgattagttggtatgatgataaataaaactgaatttaatgtacccttattatttacaaattacctaaacataccatttaagtgataagttcaccatccaaccatactaatttaatgtgttgaatcttaggccaatcttctcctttctctttctcacacagtttgctttactaaaggacactcttcgattattaaacgagtaagagatgtaggcagcccatcttctggcaacaccacagccttctacaatttttaatcaataagtgagggatgtgagttgttgaaaaaaaaaaacagaaaagaagaacaaaagtcacaatagtgcaacaaaatgagctacgaaagtttaaattcagagagtaacttgcaaaagtaaaacttaaccgaaaaaggctaatagcttgttaagtcaatgcaaacttgtatgaaaagtctggagatttcgtaactatagaagaagaacagaatttgatgaaagataagtaacaaaaaaaaaagataagtattgcaaaagagttattgctcgtgtttatatgcagcaaaatttctagtcatggaaccatggcaaacgttctgcattgatatgaatcttatgattttggttttcatttagatcagtgttgttaccaaaagcatgtttgactaataaattgccaaagatcatcgtcccactaagtttacttccgtttgctccagactcgaaacaactcttcaaagtgtcccacaaagaataagacacattccaaccatcaatatcaaaatctgttaagaataagaggggacttgattactatcctaaaacacatgtattaaactatgaattatgagtatgcaaataaccttaatgattaaatatgattacaaaggcaactctacttagcataataaccaaagtcattcatagagatacaaacacatgaaacatatctcattcaactatatattccttgttaataaaaaaccatattaatttcctcataaatatgctcctgcttcaatctcggccatgcttaccagtcacctcattgaccctcgttaccaaatttcctagtaaagtataaataaagtaccttgtcatgtcaagccgtagtcagactcataatgatagacctcccataaggttcactcatgtgaggtttcaattagttgagttgtattagtgatatgttttgtttctattagtataaataagtgattaggagcggtaataaggagttttggactcttgggagagtggctatctcgaattagctactgttatcttgtattcttgtattgtgttggacataggctagtgttttgaaaaataaaagtaagagttctggtgtgtttgtgagggttcttggctgagattttcagagatcttatcacataattacctcagcacaagaatgttaagaagattaaaacaaacagcactaattaagaatacatcatcatcatgtatagatgccattgaataaaataaaagattttgtttaaatcatatatcagatgtgtagagagagagagagagagagagaggttcattaatacctgattttccaactacatgcatgatgaatacaaaaatacatcttcgatgtgttgaatcttaggccaatcttctcctcctttctcacaccgttgctttaccaaaggacaatccagtatatctaatttagaaagggaagcaggcagcccttcttctggcaagcaccgcagcctttcacaattactaatatataagtgagtgagggatgtgagttgttgaaaggcctttccgttgagggtttcaaggttgctacaatgttggattccaactgcatcaagagtgataggaaggagcccttcctcaggaaacgattcatcttcccatccattgatatttaacaatctcaaacatgagagtctctgtagatcccatttactacggttctcaaaaagagcttttgttctccatagccaaatctcctctactacggagtgtgatccccaatctagaagtgactccaacacaggacaatctactatctccataagagatagtggggctatgacagtctgttgaatagttctcggaagcaaaacctccatttcctcacagtcatagatagctagatgtactaatgatggaaggtaacaaggcaagccaatgttaagccttggacatttatacagactcagttttttaagacgagggaataatatttgaccttcttcaagaatagcttcattaccaaatgaccattctttccacatcaacatatattttatacttaaactttctaaacaactgaatagaggaccacagctatcaatctcatcaccgattgacagcacactatcacatccttcaattgtgagatctttcaaagaaggtagtcgtccgagtggtggcaaaaaccagcagcttttacaatctttcaaactgattgatactaaattagaaaacgcataatcagtaatccagttcgagaatgttgtacctctataactttcaatctcaagatccttcaagtttgtatgaggctgaagtgcgtcaagtacatctaattctttttgtgaactatcagctccaacatcattgttccacctcaaagttagtttcgtaaggtccttcttacccttcaaattaccctttgaagcctccattgcatcattaatattttccaggccagaaatctcaagctctctacatagatgttcagcatctgctaactctgtaattttaaatacatcatcgttatgcttgtcacacaatactacttttggtaagatgtgcaagtatttcatctcattgattccttttggcaactctttcagaggtacacctttaatatctaagtaacgcaacttgatcaagcttcccattttctttggtaactgagtaagcttttcacaccgtgaaagcaataaagtttgtaaattgtacagactgcaaactgaatcaggtaactcttcaattttagtactggacaaatccaaataccttaaatgtatcaaactaccaattgaatcaggtaacttcttaaaagaagcccaacttaaagaaagcactcttaaacaacttacctttgtaagcaagatctcaaagaggactgagtagtttttagagactggtctttcttgaatccaagatggcaataatataaaggtacgcaaacaactagctttactcaagctgctaagcttgttaagtttttgattgcttcccttaaatgacatacgacgaacatttgttgaacatttaattaactcattgctcaaatctaatctggaacaaaaatcacctgatacaagtatggctagatcatgtacgaggtcatgcatttggagttgggattcattccacttactacttgaatgttgaaagaaggaccttgataagagatcttcaaggtattcctttccaaattcctccatctttttactttgtgtatctattggcagaaacccttcagccatccataacaaaatcaaattttctctttcaaattcataatctttgggaaatatggaacaatacgcaaaacattgcttgagatgtgtaggtaagtggcggtagctcaaccataaagctggaagaatggaaccctccttcttgtacaactcctcccatgtgtcactattaagtatgtcctcccatttttcagcatttcgttcagaacgtagcaatccaccaagagattttattgccaagggaagacctttgcactttttaactattttttggccaaccacttgcaactctttgatgctattctcgtcgaaactatttccaaatgcatgtttgacaaataattgccaacaatcatcatccaacaaagtttgtagatgatgaacatgtccagtggccatagtggaggcgacaattttgcttcgggtagtcacaataattttacttccaattgcgccagactcgaaagaactcttcaaactttcccacaaagaataagactcgttccaaacatcatcgtgaacaaac

SEQ ID NO: 69454 - DNA, 2328 bp, Cannabis sativa
  modified_base (2077)..(2079): a, c, t, g, unknown or other
  modified_base (2138)..(2138): a, c, t, g, unknown or other
ttggtacatctttatctccaccaaaattctcaaaaaattaagtctccctttattttttgttatcgaatcaaccataattggtgttccaagttgcctcacaatcttgaacaaagatctctcaccctaatatttcaattctaagccatgaagttgcttccaagttggaacagaatacacatcctctttattaaattctatgtaagggtcccaaggcttcatgattactggctttttatcgaaaaacaagtaatcaccttctaagaaatcatctggagtattcagagcatgaaagcaaactatgaaaactcctcgctttaatagtccaactttatccactcctttttctgcccaaattctccttgtaaatccaccaaatgcaccaatcagaggattagcacccaagacatagcataccatagctgatttctaatacaaaatttcttcctcaatatcagaattatcaattttaaccacaagtttctttataggactcccctgtattggctcttcaaatgttttactcaaatcatttataatagtatttcccagagcaaaagagaaaattagtggagaaggagatttacttgaaataatttgagcctcgcatctcttagttacctccaaagaagacatgaagtcagatcgaacttcctcctgaaccaattgtcaaagtgaagaacgtggagcaaaaacttccgccacatcttcgattgttctcactgtttgtgatatcgtttgaagagctaccatctcctcctcatctttatcaaaattcaacatcgacagagccttgacgccgagaacctctgccatggacttggtttttagaataggatctgaagaagtcggcccctgcttctttttcagacttttttgttttcctctaaccttcgaaccaaatgcctgtggattggtctttatcggataagaaaccttccgtggtcgaccccgacccgccatagcagcagaggacctctgtaagcaaagatcccctgaggtgaagccttattgataagtaatataacctatattaaaaatatagaaaattgatctatttagctagctataggtttaactgcattaacttattaaccaacatgatggtcttaattaaattatagatttgttttcttacatatatagttttagaagtttgagttttatgattttctattaaaaactaagttataaaagactgtatagtggataatttcccttattaatatgtattttcaactaaacttgacacttgtcactagacttttatttaaattttaaaaaatatttatatatcttatattaaatgtagttatttaacatagtttttttttctttaaagttaacagctaaattataacaccgttaaattaattgattaattattttttaaaaaaattaattttaaatatttaaatttaacttaaaaatataaaaaattaaataattatttttatataaatattaatttaaatttaaattaaatattaatccacttaattaatcatactttataaaaaatttaatagttatattattaaaacatatttactagttagatatattttttatacataaatttaaaactaaattaaatttttctattaaaaaaatataattaaattatataaatttattttaattatgatttttttttctaaagaagaaaattcattaatctagaacaaccaatacaaaaacaaaagccacaactaagcggccactcatcacaaacccaccaaacacccctattgagtcaagcgttaaaaaaggccattcttagccaaattttgatttaagctaagtaagctatacaatctatattttactatacttttaatctcctttacaatattctcaatagtatagcaaaaattattatgtacacaattgtttttatttttccacaatcgaaccgcgaagagcatttgagaagatctgctcgacttctttaccgtcagccagttcttccagccagcaatcgaactcgaccaagcttcaaatttaatccacttaaaaatctctttaataacagctttagggctcgtttggtatgtcgtataagggtcgtattgtattnnntaataaataacactatgtttggattaagcaatgtattgtattaattattacgaccatantttttaatacaatgtatgtcgtattatttaatacataataaatagttcatattagtttgtattataatatttacaaaggatatagggtcaacaccaatctccgacctggaccacggacccggactcggtcccggacccgaacccagacctagaccgaaacccggaccccgaaccccaaccccagaccccc

SEQ ID NO: 69455 - DNA, 2333 bp, Cannabis sativa
tgcattaaaaagacacaaatagttttctaagtaatgtttagattaaagtatattattgttcttgaatgaatagagattacttgtcatataagccaacattaagaagttgccaaaaaagttgagaagcctgagctgggaaccttgataaaaggtaggaggaaagttagtgaaaatgatatgttaattatttattaagataagataatgactcctaattctttccaatttttttatacataaataaatttccatttcctaattaatttgtcattacattgtttgcctaattgaatataaatactcatataatacttagccaagaaagtaaacttcaacaccaaagtcttttatttcttcttacatttttagatcaccaaattcaaaacatgatgcaacaagagctatttgagtcctcttggccactagtctatcatgacatgaataataattcgtgttggaacaataataatcaagttgaagaatattgtatggaatttgatgatcatcagtccttgcaagtgttgccaatgatggaagattttccaatggagttattggagcaagtgtttgagcctcaattgagtggcgaattcgaggctatttatggttctttaatggaggatgagagtgttgggagtcttcaatattcaagtccaacctcctcctcctcctcatcatcatcatcaccatccatagtggatgtaacttcagtccaaccagtactgttcttgcctgaacaagacatggagatcgaaaacgagctaggcttgtttcatctcctcaaagcatgtggtgaggccatagagaaagagcagagtgagctaaaggatgtgattttgaggcgaatcggtgacagagtcagccctgttggaaaagctttagagagagttggtttcatcttatcccaacaaattgacactaaattcattgattatttaatccaagagtcactcaaaaactccaaccctgcattcaaggccttttgccaattcttcccttatgtcaaatttgctcaatttacagcaaattcagccatccttgaagctacaccagatgatgctgacacacttcacatagtagattttgacatgagagaagggctgcaatggtctcaagctattgaggcagcttcatcgcgatggaaatcgttgaaactcacttcaataaggttggcaaaagaagaagaagaagttgattttgagcaaactaagaggcaacttcttgatcatgctagctcctatggtctagagcttaagattcaacaaattgggattgaagatttagttagtgaagtaaaaaaaggaaagaaaaggggttgtgggaaagagtttttggcctttaatattgcagttggaatgtcacacatgagaatcacaagaagtagaaagcttgttatggagtttctaaacttagccaaggatttgttatcatcaaacaaaggtataatagttttatcagatggtgagcctagtgagaatcttaagaacagtactaatttcactcaattctttgatggtcatgtgttgcattaccaagccttgttagactctatagagtcaactttcccagctcatctctcagaagcaagaatgacaatggagactcttttcgtggcgcctttcgtctcttcttcggtttggtcacaaaagtgggaggagataagagaagggtttcatctcaaggctgagtttggcttgaaggagtggagattgagcaatgagagtttaatggaagctaaagaaatggtaagagataataattgttatgaaattaggagtgaaggggtcaatggaaatgaagctagcttaaattggaaaggagttcctttggtaaaaatatctgcatggacaaactaaatctagaaaatacttacaagtattttctgtctgctattttagttagtgtaaaatcagatttgtataaatatagtttgagatgcttaaattttgatttgtgtatataaattgattgtgttttgttgtagttatgtgtagataatattattggcccaattggcatatcaatgtatttttatgcagttatttcactcatcagaagaacagctttaacactttcttatgagctattattcttatagattaattttgaaccattatggctagctattttaggtctcccagtgttaatattattttttttaatttgtttgggctctaaaattgattgtgaacataatatcaaaaattgccagatacactaccaaaaaagttccctttattggatcagtgtgaagaaaatcaaaggttatgtttatactcaatgtataacacctcatatagtaccaccactaatttcttttaacaattctttaa

SEQ ID NO: 69456 - DNA, 6851 bp, Cannabis sativa
ttaatttttttttttttggggggggggggaccatttcactctatgttacgctctactcttgttagtgtacgggtcagccaaagaggcgtagccgtaaatattatgcttgaagagattgaaattccatgtccctggttcctagtttatgatacaaatggcagtacttgcattgcatagtatgacatgagaaaacagtacgagcactcctatcccatcaaatatattttctcatgaagatcaaacaaaggctacatttagcaattctcgattatgttgtgtaaaattgaagtgcacttttgaacactcatgaataaacaaatatatagatataaacactgaagaaataaagtaaaaaaatggaacaccacaacttagatgctcaaatgcgagctcaaccatcctttctttttaataccatttcctacaaaactcttgggtgtgggtatacaaggtaatcaaaggctatctctgttaaaagatgttggttcttgttaaccttctgtgtgaaaacctttccgtggtatcaatccaatactttggtttttgcttgcagtcacccaattgcagttgagttaccggggctaatcaagtcatcgcaacttgttctctcacacaagcattcttggggatttgcataaaaataatcttcctcctttggcctgtctgcaattactctgcgtcgacttggttgtcccatccttttctcatgcaccgattgaacagaaacagtaaactcatcccatgataacgtcccattctgttgcatatccaacaactccacaagttttctccgatccagtaacacagttcttttaaagcccagaaacctgcaggaaatgtaattaggagtttgtcccattttgatcgcataaaccaatgttgagaaagttattacacacctacggtgaccttcaacaagttttgccatgtttccgtcgtaggttggaataaatgtgttgctggctactgaaaccataaaatccaaagcagccatctgagatgaatggttctgaaattgttgcaactcctcaggggcaagcaacatttccttcttaatctgacataattcatgataatgaagtatgagtccataaagaaacaaaaacaccaaatgaaaacaatctactgttaagaaacttatccttagcttctaacaaaacaaataataatagtataaatcatactggggacagaataaaaattttcaagaagaaatctaatggagtcattggcttagatagagataatagggaaattactagaagcaatgtcattttgttagattgcaaaagtaaatctgtgttagtactttctagctattcaatatacaagtataattaactactatctaataatacttctccaggcaaccccatcaaaagcatgctaggctgagagtatgaactaatcatggaaatagaaacttgcccaacgattctgatgcccagtatttggactaaaacagatgtttattgcagcaactcaatctacaacatccaacagataaaagagatggcgaaaacataattacagtccaaaatagcatcaaactcacaattcgtggaaatgcagctcttagccctgcaagtctccgttcactaccatatatctcaccagctgctatatagatctgtgtgttcctgtcaaatcccaatgcttgcaaaactgttgatgcctcctctggtgtcaaagggcacaaaccttgcgatcttctcatttcagaatctatttctttatctctccaccagatgtatgcatacctgaataaaaggttcaatcaggtggacattagaaatggagcagaaaatcatgcactaatctcagtttaacaaatgcattataaactgctctgccaactgcctttgcacgaatgaagaactatcatcactagtcagctaagcctaaaggttttatacatgaaaatgctgattacttcagccccatcccatgtgctttcaagcaattcttatatagaaagcataacactccaatagatcaaaagtgtttgaggagcaaattaggtcaacaaacaaaatatctcattcacttcttaaccaagcaagcactgcaacttatatatttacatacctcatttgtttgagctcctcagcttctttctctgaacaaccacgagtacaacctgagaaagccaacatgtccatttcatatctcaaatgcaaagccacaaaaggccccttttcctgaagtatccgaaccaatttgtatcccaacgtctcaatctggggagtgaattttagagcctggaaattaacacgacacctaagtttctgaagatcaagagcaatccaattgtttgccaaacgtgcatctgtcttgttaaaatgcaacaccctatgtttcttgaacagtggcagaatctgttaatgcaaatgtagctttataagaaagatgaatcaaaataaagaaagggttgaggatcttcaagcgtttcagctttcagtaattttcaataaatttatttaacaatgtacgtgatgtcttggttactactttggttcctataataaccggattttgacggagcaactgagctgtcatataccctcctaatatatagattaacattctaaagagctaaataaacccaattaacaaataatatacaaaatacaacttccaatggtacacatcatcatctgcaagtatatgaatgatgagcccatacaacaaatgctatgactgatacagaaaattggcagaaaacataatcaggtataacctgttgcaagtagtaggtttcatttgaccaactaacaggaggcatttgaaggggtttgtgtccgtgtttcctgttgaacctcttaggcagtcttctgacaattcgaacttcatctctcagcgaatcaatgaaatgtctcacatcaaagatatcttcaaagttactgaaagagaaaaataagggtttacaactccaaaaaaaatcatgtcacaagatgattaaagaaagtactcagcatctattaaacaagtactttacctaggatcagcccagaaagacgtcttatcaagctctggtacaaccaacgtaagattcaaaagccgagcaatcgtcaccatatcacatatctaaaatgcaaaattgcctgtcaaaactcgaggtgacagagaagaaaatatgagagtggaaaattacgaaccgctgcacgcatttgatttaagcccccattgcaggacaccctgagaaaaccattacttttatattttcctgcaaaatccaggacttaaaatcttagcattcacccaaaagaaaatgagtgaaaaaattgatcaatgacattcatcaaatcaatctaaaatattgaattaaatacgatttcatggagctttatcttatttacacaacaaaacaattttttttgttgtattacaagtcccttttcaaacaatcatggttttccttataaacaatcaacaaactataaatttataaaaattacaataaaagaaacatgactttacaaatgaaaactaatgttctgtcacgtctaaacttgaagtaggggtaagtgcaaagtattttattgtgactgaaacttggcaactgcctctcaagttgacctacgtggtttcacattctggccaaacgttcttatgaggatgttggaaaacctctcggtgctgtacactgatagattttatgactttctaacttacctgataacaagggatcaatggtttcagggtcttttttgctcttatgtttagtgtccaactaaaacaattaaaatctcatctcattactcgccatctctagtcaaacctataatagagccttgacttttcagctaaattatcaatgacagtaaaatgatcagccagagggcaaagggaattatacagtgagtttcaaaattattgagttattaaccattaatttacatatacatctctagcatgcacttaacctaccaaatgaggtctcaaatccacgaaaacaagtattgagcaaaaagaatttcttctccaataaaaactgttctgccttacgttgttctaaattaacattaaatattcaaccttaaaaagtgcatttttctccatatctaactggattttcacattccagccaaaaaaaaaagaaaaaactggcttttcaccaccccaaatgaaaaacaagttcacatacaccactccttactttaactttcaaacatcaaattaatgcattaacattaatttggtgctctcctttaattaatgttttttttctccataaaaaacataattaaaagagagtatccaaaaacaatcagatgcaaaagaggcttgaaactaagaactcacttgctggaagcagtggtggtggtgattgaatggcacgcggaaccatggcaatctgagatatccgatttgttatattgttgaaaaaatgtggatgccatagctccccaacagctacgagctgaaccaaacacgtccatagcaaaatgctggagcagacacgaatgaaccagacctgtaaacgggtccggggaatcaccggagccggaatcttatcgcaccgaaccggaacgccgtcagatctaacctccatttctctactacacaccacatcgccgtctcatcggctaattattcccaaaaactaatcactgcggcccaattcaatgcaccactccaattaccgaaatttccattcacattccaaatcagaaccacataaaaagccctatctccaatttatctcccaaagtccaaaccaaaattcaaaaaaaaaaataataataatcagactcccaaaataaaattaagaataatcaaacaaacatatgagaaaaactaaaaccaaaaacataaagaaagaaaatctcgacaacccattacaagaatcagtccaatgcttggtgtgatttccttttccgggaaaatattagtttgtttttgctgcaaatataaaactaccccttcaatccttatatgaccaaataaaatatatattatataaatatataaaaaatggtgtttagtttgggggtgtttgtgtgtgtatctgttatctctcttatttttaagttggttaaaagattcaggcttttcaaataaaatcacgggagaaagggatctcctcccttctcatttatgactaatcctatttttttcactttaatttaatttaattataattgttttgtttatctactttgtacataatgaatgactctattgacaatgactctatactttggtgaacataacatatctttgtttctgtcttaataattgctctttatatattgtcaaagaaataaaatttcccatacagaagcaggaaaaaaacaaaattaaattatgcagtttttctgtttcctttcacacaaattttaaaaaaattatgtaaggacatgcatccatttctttatcagtatcatcagtttctaattataatttttttttgtaccttaaccattaatatcgtaataaaaataaaaatgcagtcaaacatatctcatttcacattccataatattgatgtatatttatggcaaagttttgattggttctacatttttagagttcatatttcactaaaaaaaatgatttattgtcgaaagagaaaaggtgatttttgataagtatttaataaacatttgcaaagcaatatttgttgattatacttaacgacaaactagagtatgatcaacattacttacaaagtaaacggattattttataaaagtaactttaaatataacaattttacaaattaaaattgccagcatataatttttttattatatagtcatttgttcatctatcgtttgtggtttgacaatttgccacaacaaaaaaaataggaatgacctttcggcaagaaaaaaaaatcaaacgaataggaatgaaataaaacaaacatagaatcctttatttatttatttttgcaaatatgaaaataataatggtagctagacaaatttctcattgttagtaaacagaaaattcaaatttggccgataccctaataaaatctaaattaatttcttttggattgataatattttaaataaatatttgattttgtttgtaaattttttattggtagtgtagcgtcgttgtggtaatttttcaagtagtaaaaggtaatagccctggaagttcatttattttcattttgaattatgctcccaaaactttcctttcacgagaagattgcctaaatttttcagtgtgcggagaaggagccaacaaaagtgggaaagcaattatgttgtggaacgtgtataggtaaagggcaaatatgttatgcatgctgatataatataatataacatattatttatttatttattgtatatatactcactctaactaagaactaaaactaatacacaaccgtcattcaaaaaaaaaaaaaaaaaactaatacacaaccttaatcactgttatagatattttattattgttgttcgaaagcaaagttatgtaatttcaaactctgattgcgtccatttaaaaaaaaaaaaaaaaaaagaaaaaaactctgattgcgtcgtcgttatgtgaataatgatggtaaaagattgtggccatattcaattttgtgaaggattcaaaagaagactccaacttaactcttgtatagtgaaattctaatgtgtatgacctgtgtggcgaactgggtggtcatttaatccaatctgtattattttactcatagtgcattcaatctacataaagtgtggattttttttttatccaatccaatccgcactatagctcaaatctaatctaattcgcaaaaatgcaggttgaatcagttattttagaatggttactttttaatattaaattatttaatatttatgaaaaaaaataatttttttttcacataa

SEQ ID NO: 69457 - DNA, 2989 bp, Cannabis sativa
tttgtcatttaacaaaacaaagggtccaatcggtaacttttgcaaaacacaggatccaaaataatatttatccttctacgtaaatgatttccaatattataacattcattttcaataatgtttgtgttcgtatttcctttcatgaaaaatattgttatatattatgattaatttgaatcaaactttattttagttttcttgaaagcgattctcacactatttattactaagcgataaagttttttcttcaaaatgagcaaataaaaattatgcggaaaaaaaaagctcaccgacaagataaaatacttcaagaataatatcaaggtttacaaaatatcttaaatctacatagttaatattttgatgttttttaaagctagatcctcaattgatcaaatagaccattgaattattactttacttaatgttgtattttattttatgttgttgtttttagttttataatttacactatgtttgttattgttattacatttaaattaattattatttttgtgataaattttaattccacaattaaataaaacaaataaaaaatgagtagaataaaaaaaactcaaataataatttcccattaattattagtaatcaattaaataactgtaaatattattttagactcagtattttacaaaacttatcgataaaattctctggtttgttaaagtaataatctaaatattattttccaaaatggtacaaaatagtactctaaattcaatttttattaaaatgaaaattaattataatctgacatggaggtgttataaccaaattagttatattatttgtatttatctatgctaaaaattcactttagcttggttatattaaaaagaggattgctaccgtcaacctcctgttacaacttcttagtcaacctccacgtccgaaaacatatgttaaaatattttttttttaattttttttttcacgacggtattggttatgcttacaatatcatttttgtaaatttttaaaattttttgaatagtttatagtgtcgaaaatacgtttgaagttttttaaacacgcgtggtaagctggaatatcaggaactctgttttcggtactgtaaactattcaaaaatttacatggatgatattataactataacgaataccgctatgaagaaaatatatcagcatgcgatttcgaacgtgaaaattgactaagagattataatacgagattgtaattaacactcttctattaaaaataaaatagatgaaaattgagctacgtgtatattttatattttgtaccatatccaatttatcattttacaaaggaaataagactcttatgtttgtaaaatacattgtctataaatattatggcttaaatcaattactatttactattagtgtgttatactttcttattggacgaattatatattattatatgccatttagaccaactaaattctaccaattttcacatctccacatctccacacctcacaaaacacatggttaatttgttcttgtttgtcatgaaatggatcacttatatcactttagctagcttaatatgtataaattacatcttattagttggataataattaataatattaaaggtaaatatcattattttgtaaaagttaataacaagaccttttattttgttaaatgataaaatagattttatattttccaatatataaaaataggacccttaactcaattttcaataattttatttttaatataaacaactttaagacaacttctaacacgaacagatacaaaaaatgtaactagttttgtcattacatctttagatcaaattattatattaaattttattttgataaaaaatcagttcaaattttacaaaacacaggatctgaaatggtatttactctaatattaatattagattggtacgtagaagagcatatatataataatagggaaattctcatttttatagttttaaaagtataaatttacacttgcaaaaatataattttttttaattaaaaatttttagaaaaaattaaaatatatatataaaaaaacaacataaaatatctggttactccggttactataaaaatacttagttacttttacttaattttttcaaaaaaatatatattttttaattttctcataaaatatttttttgaaaaaaaattatattattgtaaaaaatataaaaattcataaaatttataattttctcctaataataaagagaatatccttgaatttatgcttgcatattgcaatatatatcataaggttttgcttagtttgtacggccgttattaatggtcctacctacaattgatgcaaaactatctattattttctattaacaataacttaattaattaactaattgtgatttgtgtcaaactcaaattgattcattcaacacaaatggtatagtactaaataatactagctagtcattttcaacataaaatattgcttagaaattcaattaatataaagaacaattatagttaataaaatgataatatatatgatgatgcctaaacatttgtacaaaaggttagcatcatgatagcttgacaatttaaattattaagttctaattttcatgattgtgtagtattgaaaaaatctatatttatctatataaaaaataatatttatgtttcattattattagaagtctattaatttttcctacttaccattttatatttaattagacaagattttgaaaaagtacatcttattattagttgttgtgttgaatatttgaagacattttatgtgacagttagcagtaccgtgatctgtaaagggaaatatcgagtaagctatacaatttcacatcgcttggggaatgtcaagtgtgattctgagactgtgtaggtatgagactacaccgttaaaaatgacttaaatggattaattggtactacctataccaacaaggttatcttatttttcgacaaaagaactacatagttaagcatgc

SEQ ID NO: 69458 - DNA, 5021 bp, Cannabis sativa
agattagaatgaagaaactacatagcacaaattcaagatacagattctgaagaggacttgcaaacaatgatgtgtctatttatcatgcaattagtatgagcatggcatttattcacttaaaataatttaacacaaatcctatctctacatatatcattggtgaacatttgtaatactatcaatttttctaattttattttctttaaaaaatatatattaataactcactccacttgttctaaattaagactcaatccaattctaacctatacacactcatcagataaatttcatttatattttctttgcaaaacatataatttcaagaaactagagcagccataagaggtatgactataatccttttgcaagatacatatgttgaggttaagaagcaaacccttttctctcttgttccttcccactgctcctcatgttcacgctttcttttccacatctctttggtttcttcttcatcctttttcagcctaccttcctcttcagatatctaaatttaaatagacaaaacatcaaagtcaggaaagcctaaatgcttaaaaacaatagccaaaataatggaaatagccaagacttcaacataccctcatctgcatttttcttctcctccattcttgttcagttaataattctctaacctttaacttcagttcttgtttaaattcttctgactgttcatactgttgatcatatttcccctgcatcatgtcaaaaggcatgtaagtagctctcttcccaaacttatgactgtaacggtgatcccaaaaaacaacaacaaaggattgcatctctcttgagtggaggcagaaattagaagcaaacaatgagttaaaataatttaaataaagaatataacaaaggaagcaaaggataacagtctgagaatgaagattactttcacagtgaatgtgtatcttcataagggattttttagtaagattttagagataactcattgtccatttttttattgaattaagttctgaatagtgaaatgcaaaattggtataaaagccacatttgcacccccgtatctagaggcatgaaaatcccttaaaactcaaatagtgttatcatatttttgttttacaagaaacataatggtcttattaataaatataacaatacagacaagtagacagaaaatccttgaaccagaagatcaaaacctatttgaccttaaactaggctgcattgaacctcttaattctacagtcaaaattttaacacagataaatttgttgcagtaaatagctcaagatgagaagtatcttcagagaaatatataaacacagatgaaagcgtaagtgaatatacctcttctacgaatgacttgattttagaagcagtatctttcctcagatgctttttcctctttgctctaagttcttctgaaactcacataacaggcaaaataaggtccttccaacacataatacaaggataagcctacagcaacaggaatagacactaaatttaacacaatttgagaaaaagccaggcgactcattaccagaattacctctggcaatccaggagttatattggggatatgattaagcatgaggtggctgtatggatcttcaataataatgacttcaaggatttatctttttctgtgcttattataagtgattggcagttgtggcagtaatttgcaatagtcttatgtatgtaagtgtagtcttttgtttgagtggtttagaattcagtatcctctcactctaggttgcaatctagatgatatctcaacttttttaatgaaacttttgtttccagtaaaatgaaattaataaataattacctctggccatcctaagaataagatctgtatttttcataaactctgacgaaatcactagcccgtcgtcaacaaatttaatattccaaccaaattctgatttacatctggtaaaatttaatcgtacagtgatcaaacaaataaagatcatactgaccttttgctgcattaatctgactaacaagataatccctttcttgttgatcaagtaataactgttgagcttttgctaatgctgcaagaaaccaacaaccttgtctcagtatttaaattaacttaaaaaaaaactagttgatgtctattaatttgttaatcatcgcaactcttctgaaatttaacttaaccacactttcagaaactggcattcaaattacacagataaaaacctaaaatgttatgtcaatatacacatgaaagctagtagaaataagcagttaaatgacagttctacacaaaatctattatacccatgaagcttagagggaaacaataccctgtagtacatgaacaacaaatcaaatacatttagcaatgcgaaaaaatacagagcagaaaacataaaacatatcaacaagataaaacatttcgggaggtggaaacaatgatattaaaaacattcaaacttcttaatggatgggaaagttcgtttctacaattagggggaaacctgctgtggtgtgcgtctggttaactaaacgactgaatggtttgtcggaacaaaagacagattattgtctataggaaaaaggttgactcttattcagtcaacattatccatgttactcacttctctcttttgaaaacttccactgcagtgttaaggagatcgaaaagctaatgaaaaaattctttgagagacaattatgagtgcatggtagaaattttgtcgatttggaggtggtttgaaaattaatagtgaagggggtttaagtacaaggcacctgcgactttttaataaaaatcttggaaaatggttgtgaactctcgtgtaaactaacaaggaaaagttcaaaccccaaatttcattttaactcccttatgtcacaaccaactgctttaaaggttgagcataacatccgtgttatgcccactagtagattttccaaaagttagtgcatatcttttcagcatgttgctctaaatcaactgaaattcgataacccttcttttgttctgttatcccagttatagcttataacttgtcccatgtacttctacatgcattatgactacttgggcagcattaaaaacaggatgaaaataagaatatacataaataaaacacctgttcggaatttaaaataatctcttaacttgcaattataattgtttcgacgtgaaatatgtactgtataatttaattagacctaaaacaataagccgcacaaaaacaacaagcaaatcgagaataaaatatattcccaaccctttgcaaaaaaaaaaagcatgaaaggtagagctacacacctccaaatgcttccttggcctgaggatgcttgcatttgtcagggtgaactagcaatgatagctacagatgttttgagtagaattgtcaatgaaatgacaaaattataagcaaacaataatcaaaataaaatttactatagttcaaattgaaagaataaaataccttacgatactgccttttcacatcttctggggttgaatcaaatgatatgtttagatactcaaaaggatttaacttgaagcatgaaaggatcctacaatttattatttgtttaaaataacaattattcaaccatatagactaggagcaaaacaacattaacgtgaaaagcacaaaattataattcaaacccaaacagacatagctaattggctaaaaggatccttaacatttcaataaaacaaccacctatcgtggcttttcaagaaacattttaccctaatagacatcgaacaacttcaattgatgaaaaacagaaaataattcacaagcaatcaacatgcttcctcacgagtgccccaacccaaaccacctcctcccacccctaaaacaaatcttagcaagggcctttgaaatgtcttgcttaatcctcatacattgaaataaaaattagatactaatcagggaaacgcatcattccctttacaccctaaggagtaaggatcataatccatataccatcatcaataacgactatttttcagcagtgaatccaaataaatgtcaattacacaatctccaagcttaaaaaaaatataccatgttgtcactgcaattagatgtcgtctaactatgttcatcaaaatccatcttttgtatcagtaggcaaatacgcagcaactatggaaattagacagaacctaattcaatctgtgtaatagctatataggatccttaaaattcctaatttcatagattatccaacccatcagattctgctccacaagattatcaacgaattcagtaaaaatctgcttctataaaggaaattctttatcggattgggaaccctagttggccaaatggaagaacgccataacataagtgaaaattatctatatagtctataccacctatatctatatacatattacatgtgttctataggtaaattgatatgaacaaaaaattgaagagaaggagagagataggtacctgaggacttcgttgtctctctcgacttcgctgacttcagcgaagaaattcttgagaagcaaatcgtcttcggtggctgactcgcccatctttggtgtctgggcttttccccttttgttcagattgaaaagcggtactctccaatcgtcgtttgatattgacaaggatgaacaccgagtcagtttcacaactcgcccgagttgtaataaccttttaaattagaaaaatttacatacaaaataacacttttattacaaatttatctttattattgttttgcggctaattagtaatttttctcatgaactttaacatgtatcaaattgtgctctctaaactttgttagtcgttaaaaattcctcgagattgttaaatttaaggatttttgtctaatttcattcaattttactatttcagtgattttttatgtactaaatcatgctctcagactttgatatctaccaaatcacgcccctcaaattatgatatgtactaaatcatgtcccttaaactttcatccatcttaaaaaaaaatttactaaaattagacaaaaatccttacatctaacaatctcaata

SEQ ID NO: 69459 - DNA, 1966 bp, Cannabis sativa
aaaaaaaaaaaaaaaggtttttgtaacaacacatgaaaccctaaaaaacgctttactgttatagaaagatgaatataatttattttttaaatttggcttatggatttggtccctaaatctttgtcagcctttttcctaatttatttatttagggttttctgttttagcttaattacatgcaaatatttttatataattccaagaaaattttgtacaaggaaagttcttaatttgtgtgtatgtgagtaatttgtttcaaccttttgattaaagaggaataatttggctcacatggtgaccaaagttcacgatctgcacatccatttaaaattaaagaagaaaagtttccaacttttttagttcatcacatgaaaattagaagctataatattcttcttccaacaactgtaattagggttttacttcttcttgttggtaacatgacatctaagaatctttgggtgagaatatttttgaacttggcctggtaaaattgggttcaaaatgaacccaataaaagggtaattttgatttatgatttaatttgaaaataaattaataaaagaaaaattatggaacttcaggagcttgaagggctagcagatccaatgagaaaggaagttgctatggttagaaagaagattgatgcagtaaacaaagaattaaagccattaggacacacttgccagaagaaggtaacagctttttaactatatcttaatactaattattactctaataattttgtcatttattaaaaatttgttttacatgaaaggacaaattttgttgaaaagcaattaaattaaacatgacaagctattattatattttatttttgttacaggaaaaagaatacaaagatgcccttgaagccttcaacgataagaacaaggaaaaagtacagctgatcaccaaactaatggaggttggtctcaaatgctattatatcaatcttatttgcagtaaaaatgttcatggggtttcttatttatctttgtatattggagtttgacagtgtttttttcactaatttcatttcgaacagttggtcagtgatagtgagaagatgaggctgaagaaactggaggagctgagtaagaacatagattccatgcaattgcactgatttgatgatgatggtttatgatcatgatcatgataatgattatcataacagccacttgatgatataactccactgattaggtttgtgtgatgtatttaagaattgagattatgacctcttcttcttcttcttcttttcttcttctatatttatatttattatatatatatatatataatatatataagggtgtttggatttggtgtattctaaaaagtcagtcagtttgtttgtttcattagtaaaaagaaccttagctgattttaggcagggaaattacctcccctcttaaacaggtttgtaactaaaacgtttctgtgaaaactccttttattgtaattttcttcttagcatttttctttttacttcatgttaattattacaacaattctatttatttatttattttactttcttttcaatgtttcggagttgtgttttatagagcaaattccttaaagtggccaaccttgggatgtgaatttgttaaaatcattttcattaatttaataataataataataataataatgctaataattatatgtataattaagtacagatcttgtcttattctttgttggagtaacggctataaataataaataccaacggctataagaagatagccgttagaagataccttcgattctgccgcaggaagctagtttaggggaaattttaggttgtcagaaagaaaaaaaaaatatatgttttttctcagaaataaatgatgttaattgtattaatgtttgggttaataattaataaaattcaactcccgaatgtataaagaaaaaaaaaagaagttaagagacaagtgcaagggaagggagt

SEQ ID NO: 69460 - DNA, 1512 bp, Cannabis sativa
tttgtcttcttgtaagtaaaggatttttagttacaatacttgagtataaatgaatgggatcaagtgaataatggggtagtgaaacaggatgaacaagactctggtgaaggaatttatgaagaatgcgaaggctctgttgaggaaagagaatggtgagattcatatatcacacaaggagggtgacccctatgagaaatggaatctagtgaagaaagcagagaagatagggctgcatttacatgacactgtgcccttttataagaacgactaccctggttatcaaaacaaaagagcccatggtagctcggccgatgctccttttcaactcggtcaggctaatacttacaaattcaggctaatcactcaccctatctagtttgctaattatctatatgtttaataaatggatcacagaagatgacattattagaacttgtttgtttcatgctatgacttgtttcttttctttatcttgtgtaaaagctgcagtgtatgcagactaatgaaacatcaagagggtgaatttcttgtattgagatatcagattgttgttgtgaacttggagcatgctcttggattctaagctaattaagctgcataaacatttcccccatctttattgatttatttgtttttcttgcagtctggtttgccattccatccataccttggtaatactaataagtaagaatttagatttaatattgaagtgttattttgaccaagattattttgttgtttcagttgaatgaatctctgtactacttatactatatccatttcattttgtttaagcatatatgctttttccaaacttttttaattgagcatttgttgctcgtcctcggaatctcggatagtaacacaggatattcattcaatgtttttaaacttattgagatccgatctaattatatattaaatgttagattttaatatccgatacgatccaattaatttcagtcatccaatcgatctaacaactattggatgttagattggatcggctctatacattgaatgtatttcatatgtatttattagtttaatttaggattatctgatatttcagtcctaatattttttggatcggattgaattcatttaatatattaggtccaatatgtattggattggatcggatctatccaatctaagaaaaaaagagtaaaattttaataataatttttatatatacatatatattttacatgtaacaatataagatacaattactcatcaaaactaaataaaaatattaattagttcgattagaagttggatcttttgaatttttgaatactccatccaacattcgatccaattagatattcaaaaataacatctaatctgattcgatcacaatttgatatctaatgtttggcggttggttgtaattggatcgatcgattatgattagattggatcgatttatgcacactgttaggctatttttagcctatgttttggatccaatttatgtgcatctttagctgtgttgggacggaatta

SEQ ID NO: 69461 - DNA, 3620 bp, Cannabis sativa
tcttgggtcatttgtgtggttgtaaaacactttataaaagaaatttgatgctaatagcaactacaatcttattagtatattgatgcatcttataattaaggaataaataacttgattgatttaggatttagaaacactaaaaatttgggatcaattatctgttttcgtgaacacaaactcgttccagtacaattgcttgggatgttctcattattggtttgattttggttaatagacgaggtctctgataaaattgtgtggtgagctttattggcgcttcctgttttgaatccccctattttcaagtttttagattcatacaagagttaagtatttttctttgtttgttctctgatcactatctctggatgtgctaatttttttcttggcatgatgtatgcttagaatgaacacaaacagtatttgactgataatgagcaagccctggaaacggctattttaattttcaatcaggaggtagacaaatttgaagctgtgaaagaggtaatttatttagtgtgcgttgttagaattttatctgcatcataactcgtaagtctatagaatcaccttcagaagcttcactacttatcattttaaattgagttttgcaggctcttcacattatatctcgggctctggaggctgatccaagatctatatctctctggatattccattttcttatttactatagtagtgtgaagtctactgggaatgatgacctgttctcttatgcggtatgttatttcatgattcctattgtttagaatcttgtgtggtcagagtactccatgtttggcgacagctctatgatgttgtaggtttttttcaaaaactttattttctacttttcagttgctttttgcggttaatctcatatatctgtagtgataggaaacagttgtctatatacctgttaatactgactgattcttctacatctctgattatcacttccgaatttccattgagtgatcaaatctttttgagaggagggggttgttgggatgtgaatttggtatcatggattgacatagttatttgagattttttctttggtgaagtgatttatgctaatatttcctttgcaagcttatatttccatctatcttttttactatctttttttaagttatagtattgttcacagtatccgaagttgggtttcatcactttacatttgcatgtagttttaaatttcaaaggggtcctctttctaggaatttacactgtaaaaacacaaaaaataatatgttagaacagtgagaaaagtggaaagtggacatttatgctgacaccattttctgagaattcaaatagcaatgtagcagagctccatgtgccagctttgttattcttttgctgtcaattttatattttttgttgttgcattggagcttggaggcatgttatgtttagatatgccttccccatttcattcaatacccggaattgaaacttctctgtggaacacttcttttcctgttctcaggtcaaatacaatcaaggatcttatgaactctggcttatgtatatcaacagctgcacacatattgatgatcggttaagtaaatattatgcagcactctctgctctttgcttccatagtactgcatctgactgggatagattgcatgctagtgcttgcatcttagatctgtttttacaaatggtggattgcttgtgcatgtctgggaatgttgaaaaggctatccagaagatctttgaactccttgctgttgacagtaattctgatgaacctgcagtcctgctctctgatatacatgcacgcctgacagtttctgataaattcatattctggatttcttgtgtttacttggttatttataggaaattaccagatgccgtggtccagcaatttgaatgtgagaaacaggcctcagaaattgagtggccttccattattttactagatgatgagaagcagagggctgttaagttgatagaaaaaggaatgctttctattgattcattgatgaaaactgaattacttaaagatgatattaatctgacctcagcacatttttttgctgtcaatcatattaggtgcatggttgctctagacaatttggaatgtagtagaaatttgttggataaatatcttggactatttccatcatgcttggaacttgttttaatacgagcacatgaaaaggatttcggggatcttagtttctcgggctttgaggaaatccttggtagctggccaaaagaagtcccaggaattcagtgtatttggaatcagtatgcacaatgtgctgtccaaagtaaaggatatgaatgtgggaaggtactcatggaccggtggtttcattcggtttggaaagttcatgatctgcagaatggtatgaatagtgggaatatagaattagcttcggattcaatcttggaatctcttcctaatctaagtccaattgatgtgatgtttggatttcttaatctctctctttataagctaatgcaaaatgatcgtcttggagctagcatagctgttgaaaaggcattaaaagcttctattcctaaatatttcaagtactgcattggagaacatgccatgtttttgctcactggtgaatcgctattgaaagagaatgcttctgtcagtggtgtgctgaacattttggagcggtacataggtaattcattacctttctctgtccctgagcctttgcctagaaaatttatcaaaaacatcaagaaacctagagtgcgacagcttatgagcaacatattcagtccagtttcgtctgatttctctcttgtaaacttggttcttgaactctggtatgggccaacttttctacttgaattattgtgtaagccaaagcttttggtggattttgttgaaggcattctggacatatctccatccaactatgaattagctatgtctgtttgtagacatttgagcagtcccaacagctctactgatcttactccgaccagtatattgttctgggcaagctcaaacttagttagtgcaattttgcatgctgtcccgattcctccagagcatgtatgggttgaagctgctcgcatcttgggtaatgtaatgggtgtcaacaccatatctcagagattttacggaagagcattggtggtatatccattttctgtaaagttgtggaagtcctaccagaccctttacacggatatagagatgaaaaagagtattgcagaagaagccaaagcaaagggtttagacctttgctaactttgtttatgacttcaattggattagaaaattgggtaatgagtattgcatttgcatttgcttcaattggatgtttcattgataaacatccctggaaagcacaccctcggcaagggatgttttgttttggttactatttttgctgacacaggttagtggacctttcttggacctttttatgttttgaatttaggaactacgtacaaagctgcttgtacaggatagaaacacaatcaaaaataggttgtagcttttaccagcttggcattagccattcccttagttttttaccacttttgatttttgttttttgtcaccattcatattagacacttatttttgtttatcaatatatgtagagtaattgtaattacatagacta

SEQ ID NO: 69462 - DNA, 5002 bp, Cannabis sativa
ataatatttattaaagttaagtaggactcaatattgcaccaataataatattaaactttatatgggtgctatttagcaattctcttaaataatagagtgtgagattataatgccaatatgatgctagtactgggagtaaacttagaagtaaatgtatcaaaaataatgtggataataaaaaaataaaattatattttgggattgttggcactatttttagtatggagatatgggacaccattgtgcttaacatttttataacatggcgtcttataattaggagaattgttaaaagacactattgatgtctaacactcttttcggagtcatactactattagtgtgattaagtatcaagtccaatacaatttaagaaaataagttgtagagaatatcgataaccaatcgacaatcgtgtaacactacttttagaaggtgttaggcagtactgatacctaataagaattctcattaatcattattaaattaaaataaatcaattgccacacaagtttatgacttcattccatcggtgattggtccagttggcggagtgaaagtagttcgacatagacaaagaaaaccataatatattaggaaataacggtcacaactaccggtccatggagttgaacatcaaacacgaagactcattgttgagacgagagacgccttcactacaaactcacctcactctccattactccaatccatgcaccttcttcttcctcatcctcctcctcaaggtgcgtcacctcacattcctcactctcaccacttaactagggttagggtttttactttttcattttgattcaatcactttccaatcccacattcatttttcatcttcctctactagaatgttggaaccagagcgtggttcgagttccgaagctgggattttatcttccggcttctcacatgttcgtcaggaggaggttgacggtggccattttccgccacgaaatcctttcaggcgttcggagctagaggaggaacgacgagagctagaggaacaacgaattgctgattcttatagaagagactttacggtattgggtgacaatgagaatgttcgggaggatacctggtcttgtgtcatcgtcctccttaccttttggttcttcagtttgtactcaatttccaataactctgctttgtttgatttgcatgttttaatggctaatatataatggttttatggttatgttttttattttgttacagtatcgatgactataattctgggcgtatatgggtctgtaaatgttcagcttggtccaaattgttcacttcttttgcaacctaactgtatatttgtgcagtctatgaaggttggttgttatttatgaaagcccctttttccatgtgtggtagttatttgtaatctcggttcatttgatttgcttcatttcagctggaagagttaaatggatcaaagcctggccccatggtctttggttttcataaacctccacctcttgatgttgttaaaatttggtcagaaacttataaattgtctatctcgatggattcttacaaggcatgtttctcttttggaaatgtcccttttttccctttctttatttagtaactttttttagcttgtaaatgttgttgtgacttagaagtaattgttgcaggatttgatgtacaacttaaatgttgggtctcaaataaatatatcatataccgtgaactctccgagttcatctattatccttataattgccgaaggtatgctcaaaaagtttccaatgtgggctctgttcatgcttcatcttacatgaatatgctttatttgtactggtggtgatgatagagtttcttccttgaaatgctagttttgagttgataaaagtcatttttaagcattctatatgaagaaacatcctttaaaaatacttttttcctgggtagtttctctgaacttttaagacccttctttatttgttttcttcttcttcttcttattcttctcctccttgtactattgagtgcgtaataactgattgcagttttttatgctgtctcaatagtgttgtgaactggcatcttgcagggaatgaaggtctgactcgatggcttgagaacccaacacatgtcaattctactttatcatggaatattattcatggtgagattccaatccaaattttagtattttatacaacaattatgacagttacgtatatattgtatgaccaattattttctcacaggaagtggtatgattagccaaggtatctcaaagtcttctagttattatgttgcagcgggtaacttgaattcagaggatgtggaggtaattctttgaacatgtaaatatttcacagttgtttctcttgttttattggtctcttgctgagccataaaatgtgtggagacaagaagctttagcatattgctaagtaagaatctaacctacaaggcctggccatttgatctacttgtcatgggttcttgcttgatatttttatagactcaaaattaacttgtgtaatagtctgttttaattatttgatttataagtataactcgtggtcaatgaattaaaagttggttgcttagaggtgctaagtattttgacaatgacaagttttaaatgctcctagcttcatcagcatgatcgctctaagttgtaagaccctgtgaaattatttacagcttataactgttatcatgatgaatgccacaaaaatggaaaggaaaattattacatctatctctgatgtttaggttgtataaatatatatttatatatatttttctattttgggaggtgcatctgaatgtttgataattctgcttgaatttttatcacagtgaagtttttttcctttctaaatcagaatgggtatctataaaaaattggtctgaaataaataaaacaaagatctgtcatcttatgttctcacaaatccgttcatctgtatctgtttatttaattgtctgatagtcagactctaccagttttgtttagttaaacataagaacttagcaacaacattgcaactgtactttgcaattatatcaacatgttcttttttcatgggaggtggaatgataattgccaaagctcatttgacatctgcatgtccatgaatttgtagtgaggggtagtaaatgagctaaatatatacaaaggataagaactaagaagaatgaagagaggatattgagtgatatgctgtaaagctttgctctagggagaagaattgaggtctattgaatacctctagggaaatttgaggtctctcgattgttctattgtgtactgatctctttaatcaatcaatgatcatatttgcctatgttccatttccttcaaccttcaatttatctctgtttttgcctattgactagaggatccctacttggggtctatcaattggtatcagtgtatttccaaatgatttaagggcagttataatgagtactaatcacagcacatcatatcttattgactcttaactttactattttaatatgtaaggatttatttaacctatatttctttattccatatatattcattacatctgaacttaacaggtgaaactaaaaataagaataagggcttcccaatatgatacaagtgaagcctattacaaatgcaatatcagtgaagggccctgtagcatgcaaattctattccctgagggaaatgcagctgtcttaaccaatcttggtcctgatcaggtaagaattgattttaattgacagttagtcacactttttctttgtatgctgtttataagtgctataaattgagtaaactgaagaaaagaaattaggacaacaaatttagacaatacatgtctaatttaagacatcttgtttgacagtaacactttctggaaagctaaaggcactaagtatgtttattattgtcttttaaaacgtggtaaagtaactttctgttctcacatacccggtactaaataattttctacttttggctgctccaggttgcagctggccctaagttgtatgtcaaactcacctatgggccgagatgggccacatatattgttggtataggtatcccccatccacaatccacaggttattcttttcttctttttcccccttattaaattgtatcataaccctcacgtgccttgtaggttcgatgaccatgctcatgttattcctcttcaacttcctggataagtgccactccactcgtgatggaactggaggccataatgaagtgatacaacctgagagacacccattgctttctaacaaagatgatgatctttcaagttggggttcatcttatgaatctgtatcccaggatgaggaagatctggcaattggttccatagaggggaaatctattgaagatggggaaaatagtaataacactcgacgcctttgtgcaatatgctttgatgctcctagggactgctttttccttccgtgcgggcactgtgtggcttgttttgaatgtggaaccaggtatactctctaaattataattcatctgatgtgaaaattggtctcttcgtttgactagttaattttgatagaataattctagagtagaaatattctatcggctattttccaaaataaacaccagtaataaattcctcaagtgatctttattctgaaaaacagtaacaatgttaaaatatcgagctttcgagaggctcatctttccgaattcctaatcttaaaagattggtctctccacaaaagaatctactcttatctaattctaagctattttaaatgaggttgctccctctctattggtcttaaaaagacttaggcgacctaagattacaattggaccaataaaattaaaacactaagacaactctatgttcataagagactaagtattttgtttaattattttgtgatacacaagataagtcttaggcttatcaatagaataatcctagagtaaacaaagtgtattggggtttatcaaattcttaataatttcggctgtctgaacttgagaagaaaagctggttggatc

SEQ ID NO: 69463 - DNA, 899 bp, Cannabis sativa
gaagttacacaaaattcagtctttacttgatgaggtttatgcttgtggcataactttctaataatagtaatgttttatctttcttaataggcatctggaacgaccacagacaatagttgtgagtctgtggtcatgaatggtcaaaaccaacaacaacaaaacccaacacctcagcagccccagagggatgctaacaacccagctgggtgagtaatttgtcaagttaaagtttattgctttactatactatatgagcattttggtttaagtaatttatgaactttttttacttaccagcctcctagctatagcagaggagaccctggcagagttcctgtctaaggcaactggaactgctgtcgactgggtccagatgattgggatgaaggtatatactcgaagcttacaccgtaccgtctctcacttaaatgaactcaaatttcatgccatgtttttaatttgtaatgtgtgattttgtatagcctggtccggattctattggtatcgttgctgtttcccgcaactgtagtggggtagcagctcgagcttgcggtcttgtgagcttggagcccacaaaggtacttttatctatttctaattgtgatatcttctactgcatagtacaaataattccccttttctttctctggtctaatacgattttaataattgactataggtcgctgagattctcaaagatcgtacatcatggtatcgcgactgccgttgcgctgatgtattgagtgtaattcctacaggaaatggtggaactattgagcttgtatatatgcaggtattaacaaattttatctttttatgaaggttctatgattaaatgtcatatttttctaacgaaagtttcttcccgccagacttatgcacctacaacattagcagca

SEQ ID NO: 69464 - DNA, 4313 bp, Cannabis sativa
tttttttttttttttgagaggtttatatcgtttttaatcagtagataacatatacggaaaatataattacatttatatttttggtagtttcacaagtgacgaaaagatgttttgttaagacaccagaagaaccataattatgaataatacaagctaaaaagttattggaatctaaaggatgaaatgtacttattaattcgataagtacaaagccataatttaatgagtgagcttcctaaaaggatgggaactcgatctgcgaagcgcattttccattgggaaaaactgggcattcaatgaggttggaaccagaggtgtccacacacacgtaaatttggtaaagctggctgttccctgacgagtccacattgcattctatccacggagtgtagccaatcccattttgaatagcttctttgatattctctatgctgtaaacttgtccatttggttgtattcctatacatacatacaaatattcattttcatgattaatccaattctataataatttatgtatgaaattatattttatccaaaaacatactaaggccagtagttaatgtagaattcaagaatggatatattctcaatttatttttatggaaagacatctaattaattagtatttgaagaaataacatattgattctcaaattcaggagtaattcctcaccaccattattgactgtcttcaattttttttcaactatttatggttacaaatcttctaatcagtgtccgcaatccacatcttaagtatatgtatatataatgatgtttgacatcaaggaaaattagtaaaatatatatgtgtatatacctgcatctttaagcacttggagaagatttagtttccttttgaggttgagagtagtttggaaataagcatgttggtcaagcacagactctgagcaagtcccgtgtttttcccattcatgttcccaaaatttcagcccactcccacttgggcatgctagtgttggccagttcttttgtaaaccgctggacaagtctgatatctgcgccatatatttaaaaatcaatacaccaactccaaataacatttctattaatcattgttcgggattatttttaacatataatatttcaatgacaaacgttgtttatatttgtcgttttctggtcatatatacggcaaagtagaaatgtaaaaggacaaaaggcatgagaagtagtaagattcccaaaatccggaaacgtgtatgacactagaggcacatgcgcgcgtgatcatttgtccagtaatattatattattgtaatatattgatcgatagagtgcataataaatgggcatcttcatcgtgaaaccaaaatcatatattcagtctttactaaatagaaatataatacttacttgagattgatcgaagggattgttgggatcgcagtttgaagggtacgatccgtccttatagttaggccataaaccatgaatcccaaaatctgctacaggctttcctgtcgttggatagcagcagctttgtttcgagtcacagtacgaacctggccacttcattatttaaccccacaaaagaaagaaacaaaaacctttaatatcttatacgaatacatattatgattctgttggtaaaattaaaataaataaataaataaatcactcacttgttggacaaagtagaagaaatcgaaatcctcagaaacacaaagaagggagagatttgcaagtactaaaagaggaacccatgaaaaagagtacagcttcatactattttttttttttctctttctttcaatgtgtctatatgatatcaattatgaaatacaatgaattgatattggtagttactaaacatagtgttatttataggacaaaataggaagtttgccggacagggcagcatgcaaaatgatatgagtatatgctctaaaatgtctcatttcattttttacgtgtgaaaaccgtcactatcatcattgccatatcggctcacttttttttatttattatgtccgttaatttagcttctttctttctttattaactttttttttttaaataaaaaaaaaatctcaaagctacaaaattatccaataaaatatcctgttcctcagtgttgaaacgacattttttttttttttttttttttcattttgccataatttgaaaggatttcgaagagtcctaacaatacaataattagtttggagtttctgtaatggtaaccaataagttgttcaaaatatatatgtgtatagtaaccaatgagaatcctgaatgattgagaaagtcaaactagttatatgtatgaatatgacacatggcatgataacagaggacgatgtagctatcagctgttagacttgtttggctggtgagtttatgtgttacgaagccaattatttgtccatatagccctacataacataattgctttcatactgaaaatcatgaaacaagagtctgcgtacacaccttacacaaattgtgttggagcttgctatctagacaatgctttgttttgttttcgtctctttgaaagcgacattatttaagcgggctagatttaatattgtaaatggattggatggggatcggatccaactatgatccgatcttttcacctcgtcctgtcctactagattagatacttggtacagttcagatccgatcaaatttatttgaatctgatctaatcatacccgacgtatcatcttttttttttaaaaaaaaaaaaattatatccattttaatcttttattagtattatttaatttttttttggatctaatccaactccgggtcccccgtcccagatctgggtaccggactcgagtttgggaccaatcctggttcttgggtctgggtccggatccaatctattagttttatggtactaaattaggtacgaaaatgttttgtattgtccgattatcatagtaccatgtcctattggatctccaaatgaatgtacattaaattaaaataataaaataataagtttagaatatatctcttaaagtctatcaatccaccacacacaaggaatagtattgtggctagctattaggataaaatatataacttttgttcttattgagttctcaagacatgagcaagaataactcagagagaaaatagtttggttatctcctctataatttcaaaaataatagtgtaaactgatgtcaaagtgttagtctgatttctcaaatcttgattctatttatattagttaaatcttttaattaagttatatttaattatttaaataaataatatctacaacaagattcggttactgatatttatgagggaatctctcaaccatttaagagaatatctcaacaaccttaaaatatttaaaactacttttcaaattagatatttacctaattgaattaattaacccaaaaagagaaactccataggcataggaacaacaccttagtcacataccttgtcaaggttggtgtcttttgtcccaacaactttgtggtgacaaattatcttgtcttgaaaatttttgtcttaaaatttttcgtcttttttcctatttaattaatttttaaaaattatttatttattacaaacataaataattactatcttgccaattcaaaatagatttttttaaacatctttatacaactttctccctacccttgatagagtttcaaggtcaaaattcggggaccatggacctataattgtaaccttgaataaattagattatttattgagtctcacgaaccaaataattccttgtttattaaattcatgattactccactataaatatggaattgcactcttagtaactataaaattatatttactgagtttaactacaatgtccattgatacaatcaattccagtgagtagccctcaatatattggtcgtaattagttttggtcaaaataccattttaactttctaattacttttttatcctttagtatcattaattcactagtggaagtataattcaatgatcctatttaccgagttttttgaaaactaagtatttagagagaataaaggaaatagcaagtagtaaataatatgaatagaagattttatgtggttcaggcgttaatgatccttagtccacgagtctatattattgcactctttgggcgaatagtgtaagattacaatgtattacagtaggaaggccttgtgtagaaagagttacatctaggtatttttgtaggataacagaaaatgaaaagtcccccacttcatcataagaatgaggatatatgtaaacacacatggggtaaagggcatgtcctttacctacctaaggtttcgtcctccacg

SEQ ID NO: 69465 - DNA, 2363 bp, Cannabis sativa
cattctaagcaataacacatggaaaccttttaaaacaggcagaagtgtgcaatacacaaaagctaacaataattagtgatattgttccatccatatatataacataccacttcttttagttcacttgtctctcccttcagaactggattctgtagaaaattgctgagaaccttttctgtcctactaccatagggtgtttcaattgaagggtttttcgatgaagtaattgcataacttgaatctttacttttactttcatatccagtcaggccttgagatgcattgtctggtacttgtgttgccaactgcatgatacttcccattggattttggcttgaagaattattcagcaagctcatacctccttgcaatgagcttggaaggactccttgaccaaaaggtaattgggaaccaagacccaacttcgtcatcacctttgacatggctagctagcaaatatttttaactctattttcaggtctatgattagctaatgattaataagccgcattacacataagagaagataatacttacagcaaaagaaacctgaattttctgcaatgcggtcggtttcaaagcaaggcctgccatgtgaggacaatgtttaagacaaactattattttaagaggaaagttgtatcaataattggttcctaaaatatacttaatcattacataccaattccaaaaccatggccaaaaccaactccacatcctacgccagcttgaacgttcttagctccaatcttcttaaacttgaagaaaaagagatattgttagtgttaaagcttttgattaccattttcatttcccgatttcgagtcatagaagcaaagaggtttgcctattcaaaaagaaaaacaaataacaacacaaatttgacttactgagtcgtttacatgtctggtagcaccagaaaatgcatatgttgcacctcttgcagcactcataacttcattcaatacaggaatagaacctggcacacggttaatccaattcatcagaacaatgaataccaccataataatcaaattctaatttgaaaataacaaaaatctcaaaaattgtcactgtcattatatatctacaaacactttcgaaaaaaaaaattatactctttagccacaaaatcggctgcgtacagtctaaagatacaaaatttaacagagaaaagtgaagtacatggtgtcttagcatctggtttcaaatgggtttcaccatctttggatttaaagagcttccgaaaatccattattaaataaaactatatcttctgagagaaaaagataagcggaaagaattagaactgaacaacgagaaaaggcagtaccgagatttatggggcgacccacgccgataccaataccgcaaccaaagccaaagccagtaaatacttgacccactttcaaagtaaatggattctccaatcggattccctcacttggctttttctgattcgcaactaaaacgccattgttagtgatactgctggtgctgctactattctccattcctgaacaagtttttgacagtggaaacttctctctctaaagcttaaaaggtaaggcgttttgtcttttcccctccattaaagctaaagcttcattcttacagagctcaaaacctctccgccctggaatttccctctttttgcctgaaacgaattaaagagagaaacagagcttaacttattctctggagccaaatcttttctccttgcttaggtctaaaagaattcactaatagaaaattgccacgtaagcaaataatatttgcttcgacgtcagttgacagtttttcttttaaaaaaaaaaaatctttattaaaattgatgtaaatattcacattcttttcatttctaagcaatttgttaatttttttttaaaataaaatgttattatattaaaacatgaatgttataattacaataggcataattggtagaggcatcttctcataccatgaacattagtattcacggggagagtaaattttgccagagcaacattattagcagatctaaacacatgagagatctgactaccaaggaaatttgacactaaaagagaaatattatttaataaacaatgaaaattttcaaaccggcatttgggaagattgcaatcctttaaccaccaaaagagagtcagtctcgataaaatgaattggtagttgaagctcatgaagccatttcaagctatgcattagtgccatagcttccatgatcatttatggtttaaagcatcctttaaaggggaccgccatggcaacaagtatatctcccgaactatttctaaggactgcaccaaagcctgtaacatgtttcgttatgtcaactgcagcatctgtgtcaagtttca

SEQ ID NO: 69466 - DNA, 1721 bp, Cannabis sativa
catgcaacataaaaatgttatttctgatctttattaataagtaaatctggttatattgaaatgtgttttatttagggcacaaaacccaacacaaaaatgagttcatcttaggagtaatagcagtattaatagtagataaaaaaacttgcaaagcttcatgattaattccattagaagagaacagattcaaaaaataattgtaaatttctaagacaatgtcttcctctgcatggacaatgccaccacttctagtatgaagagctttgatcttataaatggcattcctcaatttggccctagcgtgaaagaattcggtattggaatccccactttctaactagtcgactctagcacgttgatgccagtaaacctcctctttttctaacaagtcatcaagaattttatcagcattttccacattttggatatgttgagaagaaatatctctactgttatgcaactgagcagagattctgtgagcatctgtaatatcacggcccatttggccatatttcgaaatgtgttattcttgaagtgcattagagcatactacaatattatgcagtagaagagtaaccgattgaccaaaacaattagtcttctaggtggattaaataatgtctcgacagtcagaatctttaagccaaaattgctcaaatcgaaatctatgatgtcttttatttgtagccaatatctgttgtggtaaggatacaatatattcaatagcgcgatggtccgagaggtagaagtcaagatgagagggttgggcttcaacacaaacctcaggccatataccattaatgaaccctcgatcaagacgttctcgaattaaagtcccagtatgatttttattagtccatgtaaattgatcaccagtgtatggaattgccacaagattacaaaaatcaatagcctttcaaaactcatccataagattttcacctcttggagggccaccttctttatcctcattacttaataactcattgaaatcaccaagaaccaaccaaggatcattgctagaaggtgaagcaagacttctcaaaagattccaagtgtgaatccttaaatgagttttaggcgctccataaaaagcagtgaaatgaaaatgacagccgttatcatacgaaacaaaaacatcaaagtgattcattgaataagaatttagagttacatcaacatacattagccctccataccagcaataaacccccctttaatccaacccttgggactttaagtccattactgaatttaaggataaagcgaacacaatctaaggagttacattttaacttagtttctataatagaaagcaaatcaggacgctgctctttgatcagaaacttaagatgtctgaatgtcgaagggtttctcaagcccttggcattccaactgattattttcatggctgtgagcagggctgctgttgcgcaaccttcactggaaaagatgaattcacatcagccgaatctgttggaaaaccagaaacatgctgtggaagaagatcatcaacaatcgggctctcttttttgttacttcgacaccttttaagaacacttctgaagttatcagggtcaacatgccttttgaaagtcttgtgaaagtcgccacaatcttggtgttacgaattttatgtttattacgcaagtgtacgcaatcaagtagtatctcacgcaagtgaggtcgaaccacatggaattggattaagtaatactaaa

SEQ ID NO: 69467 - DNA, 4948 bp, Cannabis sativa
aaaaaaaaaaaaaaagataatatactcaaagcaaaggagaagtaaaagataatgtactcagatccggtaatttttatgtcggatcgggcttgatccgacccggtttagactgtaaatgtcctaattaacgcctgaaatgaatgaatcccaaattggaaaatccctaaatttgttcagacctaaatcgaaaatcgatttcagattcagttcagacccactttaccattctcatctctgttttgaatcgggttttcattttccagcaaaatttcaaggactgtggaagtcagttcgctccagaaaacccagttcatcagctccggcttactctggggtgccggcgacgttgctgctcaatacatctatcacccacacttcctcataaaggcgccttcactcactggtatagatcttgccttgcttttctcttattagcacgaagatggataatttgattcgatttcacatcaatgacaagatgtttaattttccttttttttttctgtaacaatcactaacctgaatgaatgttgtttttgcaataattacttctgaatcatctttgaactgaattgagagtatttttatgattttctggggaattagaaaacatgaaaactctgcactaaactgatttgcttgctaaaatcgctcttcctttcgttcttgtctttcacttctcagatttcagcaaattttcaatgaagagtgaagtcatttgtgtctcattttcttaaaaaaaaaatactgcatttttccatgttgattatttttcattatatattgataattatttgctaattttacatatatagctcagattttcatggctcctgtcgctcctcgttctggtgatgccattttcgctagtgttgatcgcgttgtaagcataaacctttcctcggtctttgttaattttatttattccccttttcagtgctatcgtttatgaatttgtctgatttacttatttgaataaaatgacctaagagttttctcattatcttgagatctcattctgggtttgacctattgaaaatggatgcagaatgcggagctatttaccctgacctatggcgccattgtgcgccagttgcttacggatctggaggaggttgaagaggtcaacaaacagcttgatcaaatgtaatgattttattcaatcacgtcaaattatattgtttattgttttgatgatgctgttcttgtttagtatgattttgtgtattcttagtttcaattcaatgcccatattagatgcttttcggtgttgctgaataatgctttctttcttccctacatgggaacaatctgtcggtctatctgcatgtttcaattgaatgcaattgtatacagcttctaatgtcacagcaactttttgttatgtgcaaatcttcctgagaacagatttcagcaagaaacagtagtaaaaaaaacaataaaacagtagctgtagtaggaaaactaaatcattttagccatgaattttcattgtatttctcaaaagggaaagcaattatagaaaaggttagtggtccttttggaccttgacgcggaatgcaatcccaatatatgcatgactcatccttatcaaaaaaattaaataaaaatacatgcacgactcacactctcacactaacataatgaacacttttctaccactcacaactacgaaaaaggtccctcactcaacacacgtcacaactcatacaaaagtaacacttaagcacccttgaccctcctacagtatgccaccccctcccaaatccttcaccttgtcctcaaggtgaaattttggaagttgtgttcgtatactctcaaattgttctcatgcagcttcgaaggttggtaggtcttgccactaaattggaacctccaggctgccttgagaactgtgcctggaagctcacatccaacaatctattgagtcatctgcaactcaaggtcaacaatgagatgaggtggcactgtcgaggaagagtgggtgatgctgtgagctgctcgaagttaagaaacatggaatattggatggacagatgaagtagctggcagctctaagctatacattgccttgccaattcatcagtgtgtcttagaaatgggcaatcaacttctcattctttcaacatgcaagtgtgctctatcgataggggcgcaacgtgacataaaccgagtcaacttctcaaaatcaacatggcaaagagacggatcagcgttggctttcatctttttccaagctcgcaacaagtgcatcctctaatcattgagaaaagtgtcttgatcctccaatagttggtccacaaccactacaacaatgatccttgtagtacaacaaacaaaggatggggctcacgaccataaagcaccttcaaaggagaacaacccagagaagtgtggagagaaatattgtaccaatattctgctcgggaaagcaacttaacccacgctcaaggcttatttgaagccaagcaacgaaggtaaatttccaagaaacgattgacgacctagtctgttaatcagtttgcagttgatatgttgttctatgctcgagtgttgttccttggggatggaacaactttgccaaaaatgattgagaaacacccggtcttgatccaaaataatagagcaggccctccatggagcttgaccactttagcagtgaatgggtgttgaagtggaatgaaatgattatacttactcaaatagtccaccacctcgaaggtggtgtcaactccctcctatttatgcaaacattaagtcatcttgaacttgcttgggggacaagagggactagaggaatccagctagagacatggttctatatttattttgttggcaaacctcacagttatgaacaaagtctaccacaacctcttttattccaacccaatacacatcccatgctagtcgttagtatgtgtgagtcacccaatacacatcccatgctagtcgttagtatgtgtgagtctcaccttattgtcccccaacgtgagagcaatgatatttccttaaaaaacttagaatcaaagtataagtggctgacaactatccagcctttatagagcaacttttcgggtgagagaggagaaatcccggcatggttgtatatttatttcgttggttaaccgcacagttctaaacaaagtctaccacaaaccttctttatttcaactcaatacacatcccctactagttgctagtatttgtgattgtcaccttagtgtccccaatgggtgagcaatgatattcctttaaaaattgagaaatcaaagtagaagtggccgacaagcttctcgtggtcaaaagagaacactagaacactattaccttactctaaattagcaattatcttggctttatagattggcttctcatgcttgaaagagaacccttgagcactatcaccttgctccaaattagcgaatatttggataaaagttgtcttagctgatttcttttttttttttttgagggaaaagtcttagttgatttcttgtgacataacactccaatctagccaagatgtggtagtaagcacggtaaactccactggaggcatatgagatagagcatcagcaacatgattacccctagcaggctgataatttatctcaaagtcaaattccaacaacttaattacccatgtcttatttctccgtagtgagagcttgctgctcaagaaggtacttcagactcttttaattcgttttcaccacaaaatttcaccaaatatggatgccacttaaggacagcaaaaacggttgtcaccagttctttctcattgatggacttgtgtgcccaaggcttcaatatacttggatgaaataggtggtcgattaccctcttgcatgaggaaaatgcctaaaccatgtcccgaggcatccgtctcagccacaaaagccttagaaaagttgggaagagccaaaatatgtacagtacttgcaattggcaaaaaacttttgtggcctatgcggaacaacaaaactgatccttcttcacttgattgataagggggcgggcaatactcacataacatgccacaaacttatgatggcccagaaaacctcacaattcttgaatggaggtaggtatgtcgaacaccactaagtgcttttgtaacaagccgactagtgagtgatttgttgcattatctttcgaagacacttggcattgccgaactttaccgaaccccttcttcttcgtgttgaagagtaatcatcgacttgaatgttatgtcgggacagatcaccctttaagtgttatggattgcctaccaacattcaatatcatattgcattcctttcaatggtgatagctgcccccaagtgtctccaatcactatacctggagtattatataggtatttcccatggtaggggaaggaaatcgtcgataatttccagctcttgtagtgtagggaaatgactttgcagattcctgccccatgaactgcttgttggcacaccacacgggctcttgttggctggacttcggggtccatccatcatcttcatagcaatctgcatcctggccttgacgaattaaatgcagcttttcggtgataacacaacccatgcttgcaagtggtaagttgctctttccaattaagtccgtagcgtcaaccaatttcaccctatcccctttttggtttgtggttcgtatctagttatgatactgttttcctttttctttcatttagattttcatttgattcattttatcttggtaatcctggtattcggcgttcaccagatcgaacagctttgataccaaatgttatgatccaatcttcctaagaacagaattcagtagcagtagaaaaaaaacatataaatcagtaactggaaaataaagcagtagagcagtaggtaaaccaagccatttcagccatggttttacattatatttctcgaaagggaaagcaataacagaaaaggatagtggtttc

SEQ ID NO: 69468 - DNA, 9275 bp, Cannabis sativa
  modified_base (38)..(43): a, c, t, g, unknown or other
atttatactatttaagaaaatacagggtccattttgtnnnnnnacaaaacagaaggttcaattggtaacttttctaaaacagagaatctaaaattgtatttacccattttataatgacaaaatataattgtggttccaataataatctaagcaaacgccctcaccttttaaaaatcggttccaaaaacgactcagaacacagctgtttctgagacaacgctgaagaagcaacactgtttgggtcgtttggatccgggcaatggcggaggtgtcgatgtgcagtaccagtggcagtacagacatgactcccgaggaagaaagggttttcattcgagacattgctttcactgccgaagctaacagcaaagaaggcgatactttttatttaattacccaaaggtttttccctctattttttctttttttttttttctcatccggaagaaaattagtcgctaaatagtaagtgaatttttcaggggaatttcgatgtaatattttttgtccatatgaagcattctggaataattgaattcaggtggaaaggggcagtgtaatagtttagtatatttatttagtgtagagtactctttatatttaacctgtttgtgttgatacagcatatgatatggggagacctgtaaggcactaacttgtctcacttttaaggagaaggcggttagatttttgagaaacaacccatttataataattctcgcagtctccttttttctttgtctgtgtgtgtgtgtgtctagtctttttctctctctcccataaccccttttgtgttgaattccattagtgttatcttgatttggattcttgttttgaagtctaatgtaaattataaggtcgtgcttttgaaatcattgatgcctcgagctatggagcttgacagcctagtgcttatttcatttctgagtgaagatttaaaagtgagagcttctaatattctctatttttttcccaacagatggtggcaacactggattgagtatgtcaatcaagaccagccgaacaatcccaatgatgcttcctccttgtctgaacattgtgatttggttggctcaagtaccttgaaaaagcctgctggtattgataattcggatttgatatctgaagttaccttagaggattccagtgcaggaatcgatgtacatgataccttacttgaaggccgtgattatgtattgctaccacaagaagtttggaaccaattgtatacatggtatggaatgaacaaaagtcttatagtgaaagttccttctatttacaaggttttcatgtcttctattgaacatgtgaattcatattgaaaggcagaagattgtctgttagaatgatgttctcgcgctattgttgctagataatggataggactattcttctatcattaccaacttgtagttgaaagtcctagaaactttaaatagtttgttgatatgagctcttgttatattaagttgggtactcctaacatgttgaaggactcatgttgcggagcatattttacattgtgaaggcttttgtctcttacaaagttcgctcatagcccagggtttgatttctagcaactcctggaaattgtagagaaaccttgtgacaatcacttggggtatagtttttgtattcgcggccccttaacactgtcgtgtgcacttttaaaacaaaaatctgtcagtataattaatgttaatagacttgattgtaatgcatgtttagatccttgtgttttaaattgtagtgtttttagaggtattaaaaatgactttaatgctttgtgctgataggtatggaggggggcccacattggcaaggaaagtaattagttcaggtctctcacaaactgagttggctgtagaagtctatcctttgcgacttcaattacttatgatgccaaaaggtgactgttctaccataagaataagcaagaaggtacagtatgaggccaggacatgagatatttaccactattttttgtgtaactgcaatctcctttactgtaaggtgtctgtagttatttgctaattttgtttgtaaactttgacattgaaatatttttgtcaggaatccattggagagcttcatagaagagcttgtgagatctttgatctgaacatagaacaagtaaagttcatatgttttaataacccactgcatattatgtatttatttaaaatatcttgagctttctttcatgctgttttggaaatgttaattacttttctgtcttctaggtgtgcatttgggattactatggacgtcgaaagcatgctttgatgaatgacatggagaaaacactggatgatgcgaatatacagatggatcaggatgtgagtcattattttactatctgtattatgctttttaagctatattctcattcaagtgtggatggtgtaatcttatctagctttcaatggtttttgttgttggaacaactggtagcagactttgctgttactcttgaaatacatctttaaaatcgcataatttttcagtttcaaaataaatttgttgtctgatgtcaaggtgttttcttttttgttggactagtcttctataagttaactgtttaacttgctacttattatcagaaacgcagggatgcttgaacatgtgttattggtgatgcataatattacttatcatgttttgctgctctgtttgtttattagaaacatcttcattgtttgacaataaaatgggtaagatgacaaaggatagattttcaaaatttaaacttgcttatatttgctatacctaaacttgtcatagatgttttgcagaaagaaaatgtgtggagtttttgttggttggcaggtctcttaactttttttttttttctgtaataaacttaaagcagattctggtggaggtccttaaccatgtgaatactactgtatcgggtagctgcatgagttctattcaaaacaatggatcccttgagaaggaagctacctctattcttgtagagccttctaagtcgagcttatcaattgcaggaggtttatctgctagcaagggtgcatctagaagctacaacacagagcatgcgcaaagtcagaacgttactttagctagagagtcggataatgcttatgggattagtggcgttagtacaagggggtctcctggtggtttgattggtttgcaaaatcttggaaatacttgtttcatgaacagtgctattcagtgtcttgttcatacaccagagtttgcaaaatattttcgggaagattatcaccaagagataaactggcaaaaccctctaggcatggttgtaagtttcaaatactatataacatatgtgatgttcttctggatttaggatataataaatgtgtgatgttcttgtatttcttttgcttttgttagataaaaagaacatgctaagttctaattacatagaattatgtataatgattatgtaaatgaatttgttattcttttaagaatctgaattccacttgtgtgaagcaaaaagaattgtcattcacttcagagaatcatttactactgacttttaaatttgattaggtattattatctgtaactgtgtttggtaaaggaagattgtttccttttgttggctgtttaatcttgtccatctatattttgtgggaataaggtggtggctgctggaagtagagaattcgaaatctaaagtagtgatgtcttaagctgtttttatggagtcaaatgatcttttaatataacctcattcaaaatgtactctcttggggtttcgttctagtaattgtttgagatcagcataagtaatgtattctatctccttttcttcaactgatggtctcctaaattatttcctactaatgctcgtgtatatgggaacaatcttcttgtgactttgtggtttatattgtagggtgagctagctctagcatttggcgagttacttcgaaagctgtgggcacccggacgaatgccagttgctcctcgacctttcaagacaaagcttgctcgttttgcaccacagtttagtggatacaatcagcacgattctcaggtttgctcaaattatatgaaggcaacaaatgatggcatgcagtgcatgaaccaaaggcattaaatagatttaaagtttttattttttcaggagctcttagcatttctgctagatggtcttcatgaagatctgaatcgtgttaagcacaaaccttacataagatctagagatgctgatggccgacctgatgaacaagttgctgatgagtattgggcaaatcatattgctcgtaatgattctataattgttgatgtgtgccaagtaagtacaccttttgatgataatatgtaattgatgtctggtacaaatgttgggaatgcaggcctgaatgatgtgattacggaaaatgcccaacaggtcattcaatcacatacttctgaaaatatttctgaaaatattggttgtcagtgataaacatgtgtatggcatcatattccatatctatcactgtctttgtacgtgtatgcatctcctatgcattgaaatgctttacatatatttatagatacacaatgctgaaaatagcatatattctatctaatgagttttgtgtagagcatttatgggttattcattttccagggtcaatacaaatcaactctggtttgtccagtgtgcaataaggtctctgtcacatttgatcctttcatgtatctttcactgcctcttcaatctaccatcactcgaactatgaccgtaacagtttttacatgtgatggaagtgcattgccaacttcttgcactgttacagtcccaaagcagggacgttgtagggatttggtccaggcacttagcaatgcttgtttcttgaagcctagtgagaaactcttactagtggaggtttgttgcattttattgactgttaatttttcgattttcatttgcctgcatgtaattaaggtgatttaatttgacattttataggtccgtagccatataattcagaggtttttagaagatccattaatatcactgtccaccatcaaagatgatgaacgtcttgctgcctacaaaactcctaagttattgaagaaccgaaaatatcttcagttgatacatcgccgtagagaacagtaagtacaatttttctttatgatcaatctaacatgcaaattaacttagggaggcttatattgcaaaattattgtatttctgcaattgaatttattatatcatgtaaatgaaattgtagctcaggcactcattattagagtaactttagtattgagcttgtagtcccagtccaaaagatatttatggatctatattacccaattaggttctttctagtagtttttccatttttcaaaaatgtgctgtcttatgcttttttgcttttaattttcttagaggtgctagtggcaaccatagtacaggatggaaaccctttggaacaccagttatattgtcaatctcatgtggtgatgcaattacgagaggtgacatacagaaaaatgttcaaagaatgctctcatcgctacgaagaactccgaatcatgtagatgttgatgtatctgatattagcaagtcaaccactaatttggaaccacaggatgacactggttctggtatagcttgcactgaatttcacgcctctagtttagtaaagaacaatgtaacttcttttaaagcagcaactttaccggaactaccactccagttggttgatgaaaaaaatgcatgtattgatttgtctgatggagaagaaaaacccattaagatctcctcgacatcaacatcaatagtaatatatattgattggtcacagaaactcctggattattatgatactcaatttctagaaaacttgccagaagtgttcaaatatggacctgtaacaaagaaagcccgatgtgagcctctttctttgtacacctgcctagaagcatttctacgtgaagaacctctggtacctgaagatatgtggttagtttcgtattctctctaaaagtataggtttgtgtatatatatatatatataaatttatcaaaacaaatgaataaattggttgcgaaattgatattttgttaactattgtcaattctgataaatgatggatattttattaaaggatttagtctaggtaataataacctggaggggttgttgagcggatagctctggaaagcttgctattgtgtaagctttggtgtttatcaatgagaaagctcaagagaatttcagttgttgtttgtgttctaagataaggaagattcaactaaaagcttatcatgtttgtaattatagtaatgagtagtggataagctgttttagagatggatacatagttgatgagaatattaaaggcagcatgctgattgtgtttttgtttgagctgtgcttaggaactaaggagagttgaggtctctcgaataccttcgttaaacaacaattatctgttttcctatttaatatttcattattcccgcaatttctctccgttttcccttattgttttggatattgaattgacgatagcagtggggtctgtcagtttcattagtcttgggtcagtttttgaagtttagagtagttggttggtttgggggtttagatattgaaattgaaaaaaaaaaaaaaaatacaatgatgaagtaaagcatatttttctgtttgtttgttttgtttcatccctaacttcagattcccatgagaatatcataatattttcagatacactgcatctgttgtggtactattaaaaaggatttctttacttagtatgctgcttatccttaatatgtatttcctactttgcgtttcagacattcatcttctgggcggttggttgtttttcttaatttttgatcattttttaattatttcatggaaattacacaaggaccctgtggaattaattgtagtctgatttataatatatgtcattgtgtatgtgctgaaggtactgccctcaatgtaaagagagacgacaggcaagcaaaaaacttgatctatggagacttcctgaagtgttagtcatccatttgaaaagattctcatacagcaggtcgatgaagcataaactcgaaacttttgtgaacttccccattcatgactttgatctaacaaattacgtagctaataaaaacaactctcgtcgtcaactctatgaactgtatgcgttgaccaatcattatggtgggatgggcagtggtcattacactgcacacattaaggtgagtggagagttcatgttgttcctttagtttgttgtgtattagcaaatgtgatataaataccaaaatcgatcaattaatgtatattaaatttgaggtcaaaacagaaaaggatcacgtggcacatttaagcaaaaagttaaaggaataatcatactcttaaggatcctaatatattgcattatattgtttattacatttacagatattgggtgcttcgttgctcatactaactacgttacaatttgcagcttctagatgaaaataggtggtacaactttgatgacagtcatatatcaccaatcaatgaagaagaagtgaagtcgggtgctgcatatgtactcttctatcggcgggtgagatctgaagatgcttctactaacaatggagctccaccaagtgcagatgccattgccaaccatattcattcccacaagtagattccaaggaattattcctttcagaaaggggcagcaatacccaacatattttatttctatgttagttgaatttggtgtattaaatccttccaaacttgggctgaagtttaggcttctgggactaataaagttatatattaaacaacaatacactattgatctaatccaatacttgaaaaaatttattagaattagtagataattagttaagtttgttattggtaagttgagtggttagtttgttaatttagttagttaagttctcttactaacttaagcttctatgactgtctgttgcctatataaagccatgtacgcggattacttcatttttagcttattacataaataaaagcaaaacaactcttttgctctattattgattttctcatatggtataagaaaccttgcccaccataacttccatggtgagaccttctacatgtttaacttccatggtgacaccttctacttgttttcaagataagagcctactcctaatgctccttttgctttgttaattcctcccccttctttggtggctccacgatgaacttagaattctagatcacctactcaatctcaaattggatttgattcctcaaatccaattcattctcttggcgatcttctccctagtggcgttaatccccaccagcttcttcttgacgctctcaacctcatcttgattgacccacacttgaagattcatctagtcccttcttcctcagcactggagatcgccctaggttgattctcgtctcttctgttctaaattatgctaattaccaatcttggaagcgtgtaataacaatggcccaagctacaaagaacaaaactggtttcatcgatgaatccatccctcgtccagctactggtaatcctcttttcaattctgggatttgatgtaacaatattgtcatgtctttgattttacatcttatatcccatgagatctcccaaagcatcatatattttttattttgcctctaatatgtggcagaattttgctaaaagattcaatgagggtatggtccttgcatctttcaattacaaacacaactcactcatctacaacaaggtgatcaatctgtcacctcttatttcaccgaacttaactaaaagagtttcaacccaataccatttacacttgtggtgcaataaaaaaacttcttgaccactataatcagaatctagtgctttatttcatttctagctcaaaactccaccaaaccttccagagtacctaattatggtatatacaatatattccagccaatatttcacagaaaaacatacaaaatcaatttatgccattagagatcaaagctttgaactcaaagcttaaacttgcacaaaacttaaaccaaccatcaataccagctgttaggacctaaaaccaactcaaaggaaccaaaaaattcaaaccctaaacattcccaaccctaacagcccctatatcacaaaatcacctcttgaaaccaactaaaaacttaagaaaaccataactagagagcaactagggtttaccttgattgattcctcctctaacccttgctgaaaacacaaaatccagcaacaatctccttggtctaaggctgattcgaagagagagagagagagag

SEQ ID NO: 69469 - DNA, 2991 bp, Cannabis sativa
  modified_base (2542)..(2559): a, c, t, g, unknown or other
ttctcgatggtctctcgacatttttttgatggtttttcaataggattttgataggtttccgttacaagatgacttcaaagtttgcttttaaataattcaagttatcgataggatttcatgtttacaatgattttttgataatttctcaatagtttatgtaattattattgagaaactaataattgtaaaaataataataataaattgttacaaatactcgtctactagttcgtcttctcagtagtgcaaacaaagaacaaggatcggtagttcttggctttcttggctcccatttggtgggtcatcgacggtgcagacacaaaagaaccatgggcctttgtgcatttgaaggtttgaggcttctggggtttcgatgtgagagaggtgggagaagaaggaggtggcgctggaagaacttagggctttcatggggggctttcgatagtggcgacaatacgggaagggaatttaaggcttctgagggtttctctttagatctaaagagaaagaaagagagatagagagagaaatttttttaattgaaaatggtagaattggtatgctaaaataaactaatgatagatattattatcaaattatttgggaaatatttttagatatgggataaactttatttagtcaatggtagaaattaattttgataaaggtgatggaggggaaagggaaagcttacatgaacaaaagattcaattattaaaatgtcatcaactataataaagggtaaagaccgaccgtgtttgtaattggaccctttcactttgttggtgaatctgttaaggtgattagaatttagattaggtggttgcaaaagagaattaattctttgtttagaaatgagattagtattcaaatcaatgcctatatttaagggatgtttagttaacggatgcttcaatcttcacatgtacctttatatatctacttacatcattaaacaaatataacattatcattaaagatctattattattacaaaaagaagttgtaataagattgaaagcggttggtaactaactcatagtaaatctattgattggtataacaaaatgaaataatgcatgcaattttgtctgattaacttgaaaaatcatgataatttagctggcagtactactcttaattgactctgttaatcattttgcactgaaagctagatcaagcactaaactcattcggagacacagcatcttagttttgtaattttcaaaaaaataaaaataaataatagatgtttggttaatgtttttccacaaaaaattaaaacttttttcattaaaatgttaataaatatatttatagaaataaaaatatttcaaaaatttgtactaaaagatgaaaaagtaacgtgaaagaaaaattgatgaaaaataaggagaagagaggagaaaaatattacaaataaggtgattttttttttagaataaaaataatgtaatttgagaaaatcccaagaaagaaattcaaaaaaaaaataataatataaacaaaaagattttgaaaactcaaaattttcagctttatgtaagaagaaattgtattctgaaaacaatgttaaactcaatttgtgttcaaaaatagcttttagattttaaaaaccaaaaaaaaaaagcagtttttttattagggaaccaaatacccatttatatttgaagtcctaattagccaatgttttcccagcacaaagttttgcttacgttcattccacaccaaaaaaaaaataataagtgaaggaagcatctcttttagcatgtccaaaggccttttaaatgttcgacttattctagttctaggattgcctcccagtatctcatcatataacgtggttagctttggaattactttttactcttatctattgactttatcattgcatggaatctgttaaagatagatgattaacactttaactttaggcctaaaaaaatagagaaaccaatagtcaaacaattttgggatggagaaattaaggggtgtgatatgataccaacagaaattatctttagaaaaagcatggtcacacgcttgtttttaccatagggtgcagcagccatcattcattttgaaatctcatcttttgactctcattatttccctttttctttactctacctcattaaataaccttttattttcaccattcaacaacattgttttacagcctattcactcaaaatctatgtacaacatattagttatttactctttacgtatgtgaactttatatttgtaagtatatttatatataggaaaaatttccttcaaaaaaatgtataggaaaaggttggctacggtatcacttttgctcttattgtgaaaacatattttgtttttagtacttcaaaaactataatttaatatttttatatgataatttataacatataaatttttttggagccatatacataatatgcttatcacttttgttcttagcagtacatttatgttttcagcatttagataaatactttgagctggctaaataaacaaatatacagtcaaaataaaaaaaaaaaaaaannnnnnnnnnnnnnnnnnacacacaccttcaacccaggatctcagcttcttgggcaactatcgcgcaaccatcacgcaaccacgcagcaacccaacacaaccgaaacgaaaattcaaccagaaagagaattaccattaattccgatgacttcacctaagaagatgaccggaatcaatcaaaatattggttgtttcgaattcataaaaaaagtgtagaaaaaactactaagaaactaaaattcaactagaaattcagtttaatttacataaaactaatgtcctaaattcaatttttaaatccatgaaaggcaggtctcaaaaagttgaactggatttcccaagcaattcaacccaagcataatccagaaaaaattacatcaatactatagtaaaatatttatcctggtgtatttttgttgtttttcaaatttctaatggtgaatttgttca

SEQ ID NO: 69470 - DNA, 2832 bp, Cannabis sativa
attcatttttgtaatgtaattttttcatttatttttctgaattaattgagcaataaaagaacagttataattgtttctcatatactctctaggtttaactgttaacctttcttatgtaaatttcttaagtgaatttatatgaccaaattatatcttacacgtacgtgatctaagcttcttatcattattattatttcattagctgctaaaggaaacataaaagaaatctctaagtttaaccaaaaacaatacaatcaactttctttaatagcttaagaataagaatatcaagtacagaacaccaaaacctcttaggaagacactaaagtagtcaatctgtaatatcaaaacaaagcttggcctcatcccaagggccattgatctcaaacttgtattcctgaattcgtatgagccaatatgggcaaaccacatttacaaaaaccaacaaacccataaacattacaaaaagcaagctgtgcattgtatatacaaaccccagtgtcagtgtcatcaggcaaaatgaaagcaagaggtgcaagcggaacgagtatttcttaatgcagtaagtcaccaacggagcgaaaaggaagacctgtagggagaatagcatgatagcaaacacatgaagcctcgatggaagacgagaagcaaaaaaaaccgaggccacaacagaagaatttaaagagatgcagctggttaaggtaggattctgaagagcccccggagctcttacagtagatcctgagtaatcgtggagaaacagatggagcagaagaagtaacacagttaccgcccaaatggagtccgagctgattgacctagtaagggtgtaaaagatgggagctagaatatacaagccggtggcgaaaaaagatatattaaggagataatgtgagaaaagattgagagaaagcattcctccagttaacataacaactgtgaagcctaatccaagaagactgacattaagaaccaatagtgatttttcattaagagttgatgtaagtgtataagtccataccaggccaacaagtgcaacaatacataaatactgagagatggaaacagaatcctgcatcacttttagcaaattccttttcacaacattggcattcatgaccatgttttcaagaaaagagtcatcagtatggttgtcatcaaacccaggttgcatccctccatatgcaacttttctccattttggtcgagtttgagatggtatttcagtaatgacagcatccatggtaataaaaatactgtgctgtaaatatgatcacagtacagtatgcaaatcaagctcagaatggtaatcagacttactgatgctgacactacgctacgataaccaacctgcccaagccaagcaaaaaatcaagctcaaaatgatactatcctaaactaccaccatatagaccaaatgctcattctcttacattcagcatttacgttacacttcaatttctctgtttcatcatatatgttctggcaggcttattgagaacataatttttttttttcaattaaaaactgatattgacatttttctcaaaatcactattaatataaacatgtagaacttaaaacatagtagcagaaaaaagactaacagaaagcacaagatacaaggacatcaatgcccataaattcaggctcaaaatctcatatagatttcaactcaaattcacagcagtagtcaaatcaaaggacaaatggattcttacacaagaattcaagacgctgtatggataggaatgacagatcagaactataacccaaaactcctaaagacaaagatatgttttttctgaagaaaacatgtaatggtgcagaaataaattctctatttctaaaataaaccaaattccactaaaagaaaatctaaggagattcatttactactatctctatcagattcctatttggtatatgagaatcaagctacaaattgtataaataactctttatcataaaaccataaaagtatatacacaagaagtgtcaatttttattgttcttcaccaaacaaattgtatgaatataagtataactctcatcagaaatgagatttttctctctgtaaaccaagttgagctagactcgtccaataagaccttaaattatccgaaaaatatgcatataatagcttagcttacctttcttgtggattaatgaaatgggattcgatatccgaaggctatgattaattggaaatgtcgaatgaaaaccctacaaattggggctgagaatggagaaaaggggctgagaatgagctcaacataactgtagtatgatcttgagataaaaaatgaataatatgaaatttactaaaataacaatgaaaaattttacaatggaactaaaaggatgcatcgcacccttatctatttcggcatttaagagaattttttagtataatttttttcataatcgtgtacgttgtagttatttaagatatgttgcaaaattttgagacctgataattttatctgccgaaatagggtttaaacagtatgttgcaagagtgacgattttattttatacgaatgtgattaagttgttcattggatcacatccaatgtttttagacccatctaggtccaatccaattatacattggatgttggatttctccaaccgattcaatccaatattgtaggctcaacgaaccgaaccgatccaataaatcataggattggatcggttccatccaatggatgaatctctgtattggatggaatccatccaatacttttgatccaatattttttagaccggattggatccatccaatatttttaatccaatattaattggattgattggatccatcca

SEQ ID NO: 69471 - DNA, 4769 bp, Cannabis sativa
gagtgagtagttgtctagaatcacaatctgctaacatacacctctaaaacttcagcttggcattttcacaaacacttggtagactttgctttcaacttcagttttggtcccaaaaaattggttcagaacataaagaatgaaactttatggcctttctcttaatggggtttcccaaatgtctttgttaagaacaacttggcttgtagaatctttgtttggaaaccaatgcagattcatgaccactagtaaaagggtccaagatagaagcaagaccaagagagttcatgatcttgaaatagtgacagagaaatggaagatagcttttaaagctttgttattaatggaagttctgaagcaagagcctgaaatggtaatccctgtaaggtctctacaacaatacaggagacagattaatcttccaaagcctcataaggtctctgattttatccgaaaatcgcctaaacttttcgagctttacaaggatagaaaaggggttttgtggtgtgggatgacgaaaagtggtgaagatttggttgaagaggaggagagattgattaaggagcatgaagataaggctgctgaacatgtcactagattactaatgatgtcaattgataaatgccttgcattggataagatttcccatttcaggagagattttgggttgcctgtcgattttcgaaccaattgggttcataagtatcctcaaaacttcaagcttgttaaaaatggtgaaggtgctcagtttttggagcttgttgattggaatcctgcttgggcaataacagagttagagaagaaagtaatggggattactgagctcaatgatcataccccgggaatgctttcgcttccttttccattgaagtttccacctgaatataagaaagtttatagatatggaggaaagatagcacattttcagaagaggtcttacttgtcaccttatgctgatgcaagaggacttgaggctggttcacatgaattcgacaagagggccattgcggttatgcacgagctgcttagcttcaccattgagaagagattggttactactgatcatctaacacattttcgaagagagtttgttatgcctcagaaacttatgagacttcttttgaagcattttgggattttctatgtttctgagagaggaaagaggtttagtgtgttcttaactgaagcttatgaaggtactgagtttaaggagaaaggtcctttggttctatggaaggagaaagtccagagctttactggttatagaggaaagaggaagaactttgaatgttttgatgacggcgaatcagacatggatgaagaagaagacgaagataatggctcggttcggagaaattctgaaagtgagagcagttgtttggaacttgaggaagaagaatatggtagtgatttagaggagggtttagtagctgatgatgctgaaaatgaaatggagattgaagaggtttgcaatgcatacaaggaagatatatgaaagtttttattattaacttttcccagaaaaatgtaactagacataacaaaagatataagggagaatggatcagtttgatgtattaatatacaattcattttatgaaaaagtttttattattacaataatacaagacatgtttgtttgaagtatgtattaaataaactagctttataatggtgtgtgtgtgtgtggatacagattaagagactaagaggttaaccatggcattggcagaatcaggtccctcattattcacactaggtattatgtttactggagatacaatcttcacaaactctctaagttcagagaagctgctatgctcactgtatggcacttcatacctgagattattacaagtaaagttgttaagtgtttaaaaggcaaaaacttaatcttaacaagttaaatgtttttataaagaaaaataagatttttgccctttgaactctttcggttacatttcactcattttttaagacaatttattgatgtggttcatgcgtataattacagtatgagggcctacttaactaacttaagctagttagaatcaagtataataatctttaaatattcaaacattaactcaaaagttctagatatacagttctggattttatcattagattatgtaattatgttttgtatgaaatctcgaatcacagtaaattagtaataaattagtcttacatcaataaattgtttgcaaaaataagcaaaatgcaaccgaaggaacaaatttacaattatttcaaaagttcgaggggcattttacaaaaaccaaatcaagggcaatatcattcaagtgtcaaagttcgggaaaaaaattctaaatttattcttctgtaaaattagcaagtaaattcaatgtatgaatgtagtcaccttattattgttccctgctgccactttctccctggagaattcttctttcctttaccaaatgaccagccagttggagaaaaagcaactataagattgaatctaccctgaaattttttttaagaaaaaattattagcacccatctaagccaacaaatcaactagaattacatagcaaaggatgaaaattctgtttagtctctcactgcatactgattggcgacatgcttaagtcgtttgaagctcgcaattgtccacataggaacaacatgaatctggctttctttttcgtttggtgtaaaccattgcatatcttccttaggtagccccaaacattttaaaatacgtagcttcgctgtggtgatgtaaatctttttacgtagcacacgagcaacctccaagaacagccgttccttgcctgtgaaacttaatagataacgcttaaaaagtcactattgcaaactaaagtttttgttcaatgtgtttgagctcaacaaatttagaggaaattcccacaaaaaatgcatagatataacatacaattaatatcttcagcatgttagaagacaagcagggaaaatacattgggataaagagagagaaaggtctaccaattgtgtagctgccaatcaggaaaagagttttggggttaaaggtttcagcttgaatggcatcaaggacaaattgtattaccgtttcctgctttggaaagtcatactgcaataagatatgagataaaattatcacttgtgtattttaacttaagagactaatgcacattcatcattacgagcaagaaagtgggaaagtcaaaggtaaaacttgaaagtccagttcaattctatctctctctctctctctctgactacaaatgttaacattagcttcaatgttcaacatttttccaagtagaaagttggagttttagtttttttcctctttctacaatttccagtttagagtccaaatgaagcccattatcatggtttcaagcacataataaacaacctaattagctattcctttattcattcacattacctgagaattacaataagttgtatccagtatgagtgtatgaataggacatgtccgtacaagagacataatgtctttgtccccactaaagcgaaagtctccagtgtgtaaaacagcctgaattcattatcaaaatcagtacataaaagagcaagagacaaaaagctcaaatttgttgtacaaataaataggtgggaagtaagtttggaccacaccttaccgttgggtggttcaaaaagtaatattatggcaccaggacaatggtttgcatccacacaggtcacatcaacaccaacaatgttgatcttttggttgaggggtaagacttgtaatctgtcccatggaatcccaatcttcatatttacaagggtagctgtgattaaagagcaataaatcttcccatgacagaaggatttcgttagaccttgataatctgcaacaaccaattcaactatgttaaaaccgaaagcctagagtaatgtaaaataatatagccgctttaggtagtaacttccattgggatcgaaagaagaaacttacgatccatatggaaatgagtgagaaaccaatgtgaacaatcccctctaagatattgaaaagcatcctgcattaccatcataccatgttagatagtctaaaccttacgaaggtgggcaatattggttttcatatgcttaaaagattagactaagattacattaagaaattcttccagttttacttaatcaaattgtaaaatcagtttaccacttgaaatggggttcccggaacacaacaccaagatggaggattcttgagttttcctttcctaacatttttcttcgcggtaacttgtttattaccagaaccagtggatctctttgccaccatgctctgatctttggagatgctgcttactttcttcctatcagtggaagatcctggaaaataatctgtaatcaacttgttagcagcaattttactagcactatcagttacccgctcagatacatcgttgggcatctcaaatccactagtgatcttttcgggttcaccagggacctggaatgttgtacttgcatgttcttcacttgcttgcccattggcttttctaagttgagagagagcaagcacaatcttcttcctgggaccaagtgttgtgatgcctatgcttaagagatccttaagatcaaacaaattaacaaccgaataaaactcatcagatgaagttaaactcacataacacaaacacatagcaaagtaccatatcattcactacaaatattctacctcttcagtcagccattgcagagtatcccaatcaatctcttctcgaacaaaaacatcttcatatttcgccaaaccaagaccg

SEQ ID NO: 69472 - DNA, 3378 bp, Cannabis sativa
aacaaggagttctgaagattcccaaaaaaagttggataggaagggccaaataaatcactgtaatttctttcctcatgaatctccagcatggagcccaaaaactaatgtgaataggacaacggtaaccaaattaagtaacccaaccagcctcacatactctcatttgagcttttaatctcatcaagttaatcttcaaacctgaaatagctgatgataatcaaactctgcaacatgtttaaaatcttatcttggcctttgcatacatagtatattctatatcacattcttgaaagactagctctaacttagatgtgcatgtgtctgcattatctttgtcctcaattagcttcaatatcaaactcctgttttaccttgtccatcaatcctcacaaaatcccatccttagtcacaggaaacttacagaggcattccattcactgtatgtaaatgggttgttgaagtgagacagcccctaatccaacttatccttttttcaagaagaccgcaatctaaaacatacagttagggtccatgatcagttaattgttgccatatttaatctcagaatgcgcaattgataagaagcttgaggtcatattttgattgttcatgatatatgtagaccatactttatcctccaactgatatgccccattaaaagaaagtctccaggaagtttattctccttgtatatttgacgattacagaaatggaagattttactgcattcatgttcttccagtatcattgttttcaatgaagagggcgcaagagaattagtttttcttttaaaaattttcaaattcaaagtttattctactggctcaggaaggtgatggcaacatatatcgatgtaaaaaattgaacaacacttttactaatcaagtaaatattacgaagtctgttactctgacatggcattactgctactgcaggactgggcagatttatggcggcctgaacttcaaggaaggatagcaatggttaattctccaagagaggttgttggtgcagttctgaagtatatgggagcttcatataacataaacaacatcaatttggatgttgatggtggcacagatgctgtccagcaaaatctagcatttcttgcaaatcaggtatagatgacatttaagccataaaagttgtgctatattgataatgtagacaatacaacaggggttaccatatcttaatatgtaactctttagatcagtaaaaattgattatgaaaaagaaagaaaatggaagacagccaagtaaacagatcacttgctcaaggcctcttggggcttaaatgcagccacttaacatatgggagactaatatattcacaacatgggccactaaattttgtgcaccttttgttttattttcaattatgtttcgcctaatttaatacattaaactatttataagtactaacctataggtgtacttttccaaagaggaaaaacacaatagaatgggaggtcttgatgtaatatgtagttgtgttaccttcctgtattttgtgaaaagctgttgtctatgtgtgactttattttattaatattataagaaaatattctgatatcatgtgaaaaagatagatatggcaaagaggagaagtttgaaattcttctctatttttcgtatatcttcttgtacgttttatgtaaaagataaatgcaaacccacagatcagtgctataaatgtgatcctataaacttagcgcaatacataaacgtgaaatacatacaaataagaattaactaaaatatatacccaaatttatcttattatagatataaatctgatatatttacagctgtaaactaatatttccacgttgttcgtacaatttgtttgagtagactcaggcatgtcagctccatctgtaagttcttaagtttaatacagttatgattcactatgctcattcaaattttaaacatatatttgaaaagtgatgtatctattggtgacaatattttacacacttctgggtatccaactagtataaggctccaaaatggtgcttaagtgaactcaattctgtttttactttgtattgtttcatctccattggctatatgcaggttcggttatttgataatacacactacctaaaagcatttggagttggagatgtttgggtggctgttgggtggagcagtgatgtcattccatttgcaaagcggatgtctaatgttgcagtagttgttcccaagtctggatctagtctctgggcagatctttgggtatgccttgtttcaaatttttacactaaatttcctttctttttactacaacttcaaatgaaatagcgttatttaattttacgtttaagcagtaacagaaaatatatatttttttcttagttaccattcatattgcccccggacatatgacgtatgcattattatgtccttaaatttttcaacgcgttgaaatagtccttgaactattcatgttttgtcacatatgacaaacaaaatgatgatttggctacttaaactattatcacatcattaatttaaaatgttataatttattttttacttaattttttttaaatcattaattgatttttagtttaatgattaattaaaaatacacatttttttaattttaaattacacgtgtagtgtgtgatgtggcaatggtataaacatttacgccatcattaggtacaaaacctgatagaaaggattaattttcagcactttgaataattcggggacactttataacgggttgaaaaatttaagggcacaataatgcatatttcaggggcaaactaaatagccttatttaatcatgatatctgtcaatgttttgaaaggcgaaaacgggttacgaggtgttttgccatagtaccgcgaggcataagcctcgaggccctccaaggcgtaagcctcaacaataagaataaaaaattcatacacatgatatatatcataaaattcataacaaaaaacacataattcataataaagtcatgaaattcattgcagtcttaagtttcaaacataaagattaaaagatatattccatgttccaagggagagaggagagcctcgtgttggtgttgctgctgtatgcatgaagagaagggagagaggagagccttgtgttggtgttactgttgtgtgcgtgaagggaagggagaggaggagagtacaaggcaagttgtggaggatgaaggaaagtgatgaatttttagggttttttatttagttttgggcttttaaaatttacaaaataaaactcaaaatagcccaagaaaagtttaaaaaaacctcacttaaaatcttttaaaaagacccactaaaactctttaaaaaagggaaacttacaaaaatactgaaattttggttaacttttacaaaaat

SEQ ID NO: 69473 - DNA, 4862 bp, Cannabis sativa
atatatatatattacataaaagactcaatatatatccagcttttacgtacattttgtcatcaaaattaacataatcgaagaagttgaattcagtggaagcagaagaagacccctatggaaatggctgaacatttggaccataccactcctaatggtaataatggacaagtctccgatgccactactccccagaatgaagatcttaatgagtcgcactcccaatccttgattgctgagtcttttgaccatgaacaaactcttgcccacgatgaatctttgaagaatcttcaagtgatacatttggaggcaaatgctaatgaagatcagattcttcaaggtaacattttctttctttctttctttctttcttgggtcatgtatatagaaactaaagatggtctacatcttcaccaactcagatctcataggtcaaaagattgatcaagaaataaaaaaatgtgaagataaaaacgatgatcttgacaacagagccccaaagcctattgaagatgttcaaaaggtaaatcaatgctccaaataaatgcaaaacttatattttcatgatcttcttcggttaatgaattaatgtgtttttggggattgtaattaatttcgagaaaaaggatgatgagctatatatattccaagaattacaccaagagttggaacgtatggaacaacaagcaagtgaaacattaaaagccatggatgcagagagccaacacttaacaagagtaaataataagtaaatacatatctagtacttataatattaattacttgttttaatttcaaagtaattattaattctaatattgggacactatttaattctattgccatgatcaagactctctgacattcttggagaattgtcgcgtttattacaagatcgtaattcagatattaatgttgttgacgaggcattgcaacaaacacttctagctctagatatggacaaggtatatgaatatattaatgttgttatttttgctctattattagtaacataattattaaactgcatattgttgatctcagtttgacgaaaatatgattgacaaacgacaagatttaacatgtgaaatctatgataaatatgacaaggtaatgtatatatccactttttcttaaaacaactttcttcattaattattaaattatagctagcaatagcaacatctattttcttatgtatattggtgacatttaacttcagatgttggaatatgttgaagtcctatttgctgtctattcgaccactgagcatgacaatgacactaatattaattatcctagtaatcatcacatgaatgatgatcaagatcaaccattgccacccaatgataatcttgatcagattaatcaacatgatgttactattcatgatttggagaagagcagcagcagtaggatggcagcgccaccaccgcagagtatggcggtactgacagggaaggagaagaggcaggtaagggctaaggagatgcagaataacatgcttaggcttcgggaaatcattcctgattcgaatagtactaagatgaccaaatctcaagtgctccaagctgcttataactacatcatatttttgaagacacagcttggccttgatcatatttccaggtaattatatttaattgcatgtaactcctttttctcaagtcaaatgtaaatataattattcagttgtttttgcagcttgcttatgttgaatagttttgcagatcatatttattaattaatgaatttgtatgtgaaaacagaaactgaagatgggtaataaagaggtgttagcatctccaattgttcaggagaaattgtactgatcagaacagaactgtggcttcaaaacaatttgttgatcgatttactaaagattagtactattgtactgatgatacaaaagagagattttagttttcataataatagtataattgtgtccatacatttattcatgtttttttcattgttttcgctgttctttgattattggtcctttagattgttaaaaaaccaaaaattctacattctattaaaatattaattttcatgaacgtgaacagtgtcttagactaagaatattacatgattaatattaatagtgaatgtttacaaaattaacctattgaccaaaaaagcaaccacaacaaataaagccttggacccaataatttatacaaaaagagatagaaatagaacataaattgtgttttctaaagaatgattttgaaacaaaaatttaaattttgcatgttaaatactgtattattctaaaaatgtgattagttgtcattatttaatatttttaatttttaaaaaattgaatttgttattggttggaaatctaaaattaataaaaagaaaatagctaattaggatttttagtgacttaacttttaatatctaatcattaaccaaatcgtgccttctgaatttttttaggtcgtttaaattttcacccaggacccatttccggacccagacccagatccgaaccgagactcggggcccggactcagactcggacccggactcgaagtgggatcgggacccgggacccgaggccggaccgggacccggaactgggaaccgagacctaggaccggactgggacccaagactcgaacccgagacctggacccggatccaaactaggaccctgactcgacctggccccggactgggacccgagaccgagacccgggacccgggattcggaccgagaccgagaccgggacccaggaccgggacccgaacccggtcctaggaccctgacccggacccaaacttggacccgaacccgacctatagttggtgttggggtcgagtttattgaaaatatattatctttacacaatctattaatacatgtcaataccaaacatagtattgtcttaaataatactaatacaaaattaaaatggatataaaaattataagttaatattaaaattcttaaaagaaaaagagtcgggtcggatttgatctgatccgatccgagtatctaatctagcggaacggggcggggcagatccagatctttacattacatgatctggatcatgtcagatcatagtcggatcagttccaacccgatcaatttacactcctaggggcactatttggtacatgaataattgctacattagtgaaattgaacgaaattggacagaagtccttgagtctagcaatttcaaaaattctaaaaaaaaattaatgacttgaaaagtttggaggatataatttattacataacaaaattcaagggtaaaaattttaattagcttaataaaatctttagagaatcaataatttagaatagagaaaacataaaaatatttcatttataaaagattattaatattagttattagataatatatgtgaagatataatattcaaatgatatagagaaaaatataaagaagccgatgtatagtgtaatgtaaatatgtgaggtaaaatagaaaaagtgaagtattttaaaggatagagtagagaagttgttgggagtgctctaaaaacatacgttgagaaccaattttcctaattaatttggattcgatcatctattacattaactatcagtgaaaatgtatgaaatctatattttctttcattatttattatgtaagcatcatattaaaaaaagaagacgtaatattgttaattttttattataatttttttattaaattttgtatttgaaaatacaaaacgccccaaataattaacacgtttactaaggagagtctcacgaaatcttccctctttgcctttaattacatttaaaaacgacttgtaaatcttattatgaccgtctctcattggttgtccacaaatttcaatatcaagaaaggtatctacaacttcttgtaccaatttctcttgacacatttttttttcttgtgatgtagatcttgttgttgataaatcaatagaaggattattctgataaatagctcttctatagagttcgttaatatcaaatttattagtttactattatctatttaaatgattggtcttaactctagagcaagaatgagtaatagacataaaattatctatatagttctatatttgttggaataaaatgtttagctaattttgtgtgtctaactgaaaaaattatttcttcttcaaacttttcaattttcttattcattattcgtgggtcctccttcttcctttccattctattaacgaataatttataataattcctaaatccctaactattctcgaataacacttgttttaatagaaatttctcgatttggaaattcgtcgtagccattagtaaaaaaaataatattatcttggcctcccttgtgcaatgggatgaaataaggatgctatcttggggtttttgaaagctaaaatgcagaagcgcattcaaagctgggagggtcgtttcttgtttatcgctgggcatgaggttctaataaaatctgtagcgcaagctttgccaagctttgctatgtctgtgtttttactgcctctgaaaacttgttcacatttggaaagcattatggctaagtattggtggaggtcaagttgtaggaagggtgtgagctgggttagttggaggaaattatgcaaagataagaaatctggtgggatgggttttcggagtttgcatgagtataatctctcgttgttgggtaagcaaggttggcggttacttctgctccaggattctcttgtcggtcggatatataaggctcgatattttcctaaatgctcatttttggaggccgagttaggaggtaatccgagttttatatggcgtagtgtctttgcgtcacaaaagctgctcagagatggtgcccgtaggagaataggatctggtt

SEQ ID NO: 69474 - DNA, 3895 bp, Cannabis sativa
  modified_base (40)..(47): a, c, t, g, unknown or other
tttttaacggccaaaaaagttcagggggcacaatttagtnnnnnnnnaagttcgggaggaaaaattactaattagccaacaaaatatgtgttactacttactatgcaacagttcgtgtgccacctccaatcccttctactttcagttagtctctcccgccaaaaattttcattttcatcatccaaatatctatctctgttattaataatcatgaatcaggtttcagaatatttatgttcatcatttcaattattttaattttaaaggtaaatgtggcttcggaaaatggggtctccaagctcgtcttctacattgtttacttccgatttttatgtgtatcagctccaagctagcctcaaatctagagacccttttgctggaaaattaatccatgcccgaatcattaaatctgggcttcatatgggtgtcttcttgatgaataatctcatcaatttttatgccaaaactgggtctctctctgatgctcaccacctgctcgaggaaatgcctgttaggactacgttatcttggaatacgattctctctgcttatgcgaagcagggtagaattgatgtggctcacagaatatttgatgaaatacccgagcgtgattcagtttcttggactgcaatgattgtgggttataatcaaatgggtcgatttgataatgctattaggatgtttgtcaggatgatttcagataaagttctgattacccagtttactgttactaacattctggcttcgtgtgctgctattgagggtttgaatattggcaagaaagttcattcctttgttattaaacacgggcttagtagttatgtttgtgtagccaattccttactgaatatgtatgcaaagtctggggaccaaaaaacagctctggttgtttttcaacggatgagatcgaaagacatatcaacctggaattccatgatctcttcacatatgcaatccggccgctttgaccttgctctttctctgtttaaggaaatggcagaacgaaatatagtttcttggaatgcaataattgcaggatacaatcaacgtggatttgatatggaagcactagctttcttctctaatatgctaaaagattctcccttgaaaccagataagttcaccttggcaagcattttgtcagcttgtgcaaatcttggaaacttggaacttgggaagcaaatccacgctcaaattataaggaataattttgaactctctgtggctgtggaaaatgctttgatctcaatgtatgctaaatgttgtggagttgaaattgcaaagaaggtcttggagcaaagtggaacttcaagtgtcaatgttattggtttcacagccctattggatggatacattaagcttgggaatgtaaaaccagctagacatatatttgattcattggtggaccaagatgtggttgcttggacagccatgattgtgggttacacgcagaatagtttaaacaatgaagctttagagctcttcaggttgatgacaagagagggccccaaaccgaacaactatacctttgctgctattttaagtgtcagttcaattttggcatcgttagatcatggcaagcaaattcatgcaagcgcgataagattgggggaagtgtcatctgtttctgtgagtaatgctttgatcacgatgtattccaaaagtggatcgatcacttctgcgaagaaagtatttaatctaacgcataggagcagagatactgtgacttggacttccatgattatatccttggctcaacacggtctgggagaagaagccattgaactttttgagacaatgcttgggcttggtattaagcctgatcatataacttatattggtgtactgtctgcctgtacacatgtgggattagttgaacaaggcaggagctactataatttgatgaaaaatgagcacaaaattgaacccacactcagccattatgcatgcttgattgacctgtttggccgtgctgggttgcttcaagaagcattccagtttatagaaagtatgccaattgaaccagatgtcatagcttggggatcactgttatcttcttgtaaggttcacaagaatgttgagctggctaaagttgcagcagaaagattgctctttattgagcctgaaaacagcggggcttactcagctttggctaatttatattcagcttgtggaaaatgggaggatgctgcaaggattagaaagtcaatgaaggataggggagtgaagaaggaacaaggatttagttgggtgcaaattcgaaacacagtccatgtatttggtgcagaagatggtagccatccacagaaagaggctatctacagaatgatagaaaagatctggaaagagataaaaaagttgggttttattccagacactcaatcagtattacatgaccttgaagaagaggtaaaagaacaaattcttagacatcacagtgagaaactagccattgcatttggactgataagtaccccagagaacaccactctaaggatcatgaagaatctcagagtatgcaatgactgtcatactgccattaaatttatatcaaagcttgtgggcagagaaattattgtaagagatgctactcgttttcatcatttcaacaacggttcgtgttcttgtcgagattattggtagtcaggaagaatgagacaatgaaaaatatgccattgtcaactattgaatacaatatttaaagataagaagatattgaacaaaacttaaactttggatgttgatacgagtgaacggttgagctgtcttcatttgacttcaacctcttattttcatataaaagaaatattatgatacgttgcaactacaaggaagctcacaggacaagttattagctagctgacttgaggtggcctctgctttcttgctactcaatccttgccttttgaggtaggttgatcagtttgttgtcataattctatatatacgttttgtttgataattagaaataattatgcatacaatacaagggtgggctttcctctctggaaatattatttgttcaataattgtgaatacggtagtaagtgacaagcttatctagttgagaccagatacagacaagttaaggaattattatatttgaatgatttttgtgcatcttaacctcacaccccattacacctaaggagtggaatttcatgtatggcaattgtggagggattccaccatcctaattattggttttgttgctgtactagagatgtcaatccgagcaggatgtccattactgactcaatttgatacttattaatggagaatgagagatgggagtagattagaactgacccataatcaaaagcactattaaggggtacacagtaagcaagggtcttaatagtgactacctaaaaatcaacatgcctgtctttctttctctgcgctttctttttcatcgcctgcttctgctgaagctctcctgggtcttgcagcccttcaactaccacccaagaccgtacaatggccctagggctgaccaagtttgggagaaaaggaaaaagtttctgggtccttctcttttccacttttatcagaacagttttcatttttcctcttgtttaggtacattttacagacaaaaatatctatatattcatatgtttttatacagtggtacttttgtttctgttatcttctttttctccaaagtaaaaaaaagtttccattcagtccatatgtatggaattaatcgacaaaaccaaacaaaggagtgatgtcaccatatccataatattttatatattataattgatattttgttagggaattactttataaattattttttaatttttgttttttaaatttacggtttgagtttctcatgtgatttttagacgagttgttatggagattttagttacaatttaggttg

SEQ ID NO: 69475 - DNA, 2177 bp, Cannabis sativa
  modified_base (759)..(761): a, c, t, g, unknown or other
  modified_base (859)..(866): a, c, t, g, unknown or other
aaattctcctatttctctttgacatgctatctcgtgaggcttttgaattgttgatgacaactctttggtggctttggtatgattgaaactcagtagtatttggtcacaagcaatcgagattagatgttgtcccaaagttagcccataatcacatgttggagtttaaggaatatggtagacaaggccttcatttaggattgggccttacaaacccagttacaaaccgacctactcgatggataccaccactgcctgattcctttgctctagcgactaacttcggtggtaccagagaggggttttgtcggatggggggagtgatacgggatgttgcgggtgtagtttgggtggcgtgttcatccggtgtgttaggtgatttctctgttaatgtggcgaagctactttccattcgtttgggcctgactcttgcgcattaatatggtttcaatatctccattattaatagtgattctacagtggcaattggttggattaataagcttcacatgaattttagttttcaatctattttattagatatctattttttattagctgatgttggtggttggtcttgcagcgccatttcgcgttcggcgaatggtgttgcccacacactgacaaactttgttactagtttaggggattatgtttggacagatgcttgtctacgatttttgaattcttttatgatagtgtatttatcttaatgaattatgtttttctaaaaaaaaaaaggaattaccccatatattattnnnttttattttttttttaaatttacggtttgagtttctaaaatggttgcaacgctagttgcaataggagtttctctacgattttttgttgcaatttaggnnnnnnnnctagttgcaataggggtttcaatgtagaattctgtaaaaatacaaaaaaaatgtttagaagtgtaaaaatgaaaaagttaaaaaaaaaaaaaagtgttacaattattatttatttgagtgttgggaataattttatgttttgtaaataaaaaagattattctatcataacttatgttgttttttaatttagggcggattatacaactagatttgacgtagattctaaatatttttaattagagtgaatgagatttggataaatgttccaaataaagagggagtcatggacgtttgttttttattaaatatacaaattaatgctgtccaaacacatggacaaagctacttataacgtacatttatacatattttatacaaatcaatgtcacatactcacatagtcactatcactagatagagtagtggttgggttggagaataaaatacaataattaaaaacaggttcatagctttggaaattttattaattttatgagatattatactttttctgtattcaaattattatacactataatctataatatataattaaatatgatgtaatttttacttaaaaattatcattaatattaaataatttaagtgtataagttgaaggtgtgttcattgttaatttttctcaatatattattattaagggtggataattggataataaaatgggagaaatagaataaaagagtggcataatggagacaaaagccctctagagttggaaaaagtctataaccagctggagtacacacataaatagatataggtttctatcgtacaccattaccatcatccctaatcccatcatattatttgattcatttcaatatttttctgcctaataaaagaaacattcaataattaaaaacacagtaaacaatctcaatagtttgaggagaatttttaacggcaaaaaaaattcaaggaacacgatttagtacatgttaaaatttggaaaaaaaattactaattagaataaattaaacattaaattaagccaatacaacaaagaaaaacatgcatattatatatagtgagatatataattaataatgatagagagtaaatgagtaatgtactataattttattatatcacttttcatatttggccaccaggacttttacatcttgatacattttgattgtccctcgatgtaataagtatggcatggtatgagattcgtatagaatctcctaggggtgttcaataaaatttacaaaccgtctaacccgaataaaccgtccaaaccaaaccgaataaaccgacaaaaaatacaacccgaaataata

SEQ ID NO: 69476 - DNA, 3218 bp, Cannabis sativa
ccactcattgccaattggttttgagatggaaccacatgattctcaacatggtatcagagccatatcccatgattctcaacaataacaaataaatatttttttagttatacataaaaatatgaactcgatgtcgttttcttttaaaaaaagaaatccctccatgtcataataatggatgatttgtgtttacttatcctactgtttgttctaatgagtcttttgtttagtactatttttttctttatacatttcactaaaaagaaagaaagaaaggattttagttttttgtttcatttcaacgactgatttattttgtttatgtgtttttttacatcagctgcaactgttgggatgtcttgctggtgtggagatgatacttaaggatgttggatacccagttaagctagggagtggagttgcagctgctagtgcatacttgcagaataacatccctctcatcccatcaaggatttgatttgagtcatctgcaaaatcatcttattttagtttcttctaccatcatttccttcagaaaaaaaaaatgtaaataagacataatttatttctctctctctctcttctatcttcactctttggaggctttttaccaaacttatctattatttatacatacactaatgagtttcgtgaattactatgtattttttaaaatttcataatcctgtattatttttcttcgccaagtataatctttattgaaaaattcctgggacaatgggagttgttcctctaagaatacttgatcattgttatggtcaacacaataccatttagagatggtgtttgcttggtcattctgacctcatggaacaaagtctagtgtacaactctaaaactagttcaaaatcatccacaattgaaaaaaaaggttagtttccagtctggagatatgtctttgtgattgaaaaacatcaccatgaaggaggcagcaaatgtgataattgagacaattataaaaccttaactaaagaaattgtgctagtaaaatgccttgttcgagacaaggtctatctcccaaagcaatttcttactatttcattcaacaacaaaaccaattgattacaattgttcaattttatcagtaattttaaggaaaatacaaataacagaaagtagcaatttacaccaacaatcagccatgctccatcctaacaaactcttagagccatttgggtcacatgcgcatacaagatccacgcacacacacgctctttccatcttcattttggtgtttcttgtcctcttcattaacatcttcattctcaggtgagaaggtgaggaattctttttgggcagcaacatctatccatctcttaatcttcccattacccactctcgaatccaaggctattgaggctgatatttaagttgggctaacactacacccttcctcgaaaaggaccttatcatcaaggtttgtaaggtcatacagttgacaaaatttagaaaactcttcccaagttgcgtcttccagagcattcaaagacaattgcaccaacacttatggtttgttttgagtgaagccaatggctaagatagactacaaaaaatcatacttttagtgtcacaataaaattgtgactataagtaaaaaagttatgactaattataaattattattcctatgttgtgactaaaaaatttgtggctaaagttattagtcacaaaaatcacaatttgttgtgtctaaatgtgtttttagtcacaatacttattatgattaaaactaaattagtgacaacttgtacttaaatactatgttttaatcgcaagtaattttttgttgtgactaaaagtcaaatttagtcacataaaatttatgttatggctaaaaggttatcactaaaagtagctattttttatagtgatagcttgtggtaccatgataagcttgttgttgatggagagttcgagaggtgcatttcaagtaggtggggtgttaccatagaatggtttaagtacagagacatgtgaggtgggatgaatgcgactacctgttggtaatttaagggtgtaagcaatagtccctactcgagccttaattggaaatgggccaaagtactttatggagagcttaaaattgagacgatgaaccatcattgctagacgataaggtttcaatttaatcagtactgaatttctcggtttaaacttaatatctcaatgcttcttgctagcttgttgagtcattcgatattgagcttggactaggtttttcttcagttgttaaaggataacatctcgtgatagcatatcttcttcaacagcgtgaatggttgtagtaccccactgtaagcaggtatagatgaaggagttcatccatacacaacttgaaaaagggtcatacaaataacggaggatggctagtattacagtggtattcagcctaagaaaaaaacttactccattttttggggttgtctacagtaaagccccaaaggtattgttctagatagcaattagtcaccttcatctgaccatctatctgagggtggtaagaatagctcattttcatgaaagtccccatcaactcaaataattttcttcaaaaagcactagtgaaaatcagatcacgatcttacacaatggagcgaggcatacaatgtagtctaatgaacatatgagaaaaaagtacagcaactttattagctaaataatgacttggaagagctttgaaatgggcattggtgaagcgatccactaccactaagatatttgtaaccccacataagttaggtaaacccacgataaaattcatgacaagatcctctcaaacatgttttagaaattcaagtggttgtaacaatccataggggcaacgggtgagtatttaactatctgacatatcacacatgtttgtacgaattttcgcacttcttcatacctggccaaaaaaaattggcgctcaaccttaagaacatacactccaaactagcatgcccgccaattggagaggcatggaattccttcataagttgttgttttagattagagtggatactcacgtggagccgctatctgtaattaatagcacatgctaaactaaataatcagaatttgatagtgtgtcattaaataattaaacaaccaatattaaaatacgaaattttatttttctatttctattttgagaatgaatataatgttaataatacccttatataactaagggtattttaggtactaaaaaataataa

SEQ ID NO: 69477 - DNA, 2837 bp, Cannabis sativa
ttttttttttttaatttttcttcccaagagccaaaccaatgcatctaatatactatatgagaatttggggtaacaaaattgataaaaaaaataatggggttcaagaaattgtgtttttttcttcacttttgtaatgtggttgttgggtctaatccatcaatgttctaaaaatatcatggaatttagttgaagtaagagattgaatggtttgggtttttgtacttttgtgctatgtgagctgtgtgagaggttttggtgggtatgaaaagacaaagtggggtttttgattgttatagagaggttagtcctcggatgtttattaaaatatctcactttcttttgtttataattacctaggtttaatggttgtttcgatttgagagttttgtccaagtcatagtgagttcggcttagaaaaagtacaaatgagtttttattctttgttaataatatagttagattccatatcatatagagatgggaattcgaataatttgtatctgtatatctatatataacacaattatgtagtagtttgatgttatttatatgtatattttatatttttagctttttgggcatctcatgtgtgaagcactagtgagattttaccattgtattttgtcggtaaaaatatagaagctaaaagaaatgaatgaataggtttaagggtataatcatgtggaggtgtgtgtgaaagatatgcattcttcattttgtccctattgtcataattctaccagataagcttgattttctattcatgagtttctcacaactgtcataatggaaaatatgtaggagtgataataattgcatatcaatgggggtgcatgaacatgtatttttcatttaaaaataaatattaagaaatatatacttaaaaaaatatatgtattttccctttggtgttttcttgatttagttgtgatgaataagtctatgtcatgtttgttttttatcctaaaaaatgcagaaaaaacttgtggtattcaagaaacaataattgaaaaaacaaaactcacatacctatccattattatagttaagatgtcatacttttttttattctaattttaagaacttccaacttgtcaacaactcaacatcatatttaaatttgtgaattgatgtgcaattcttctggcccaattcaatcattcaaatcttccattacttatataaaaataaataataattaattagtaataaaattaaacaattataatgcatgctttttcaatatctaactttattattttctcttctttttccaagtttttggtttagttaattcctctaatataatcttgagctatatacgctgcatccataaaatctcatgtctaaattgctccactaagttcaactcacatcattttgagattctgaaagatttacttttttcatatttctttttcattataaatgagtatttgggagaaactatatcaaagctaagagctaatgtaggaactaatcacatggttagaactatggaccactttatatctttcatgcacacatgagaacccttttttctctgttaaatcttttatgttagcataactttagttagaagtttgtgaaggataaggaaagcaaaaggtgtcacaaatatacctttacaagcctaaatattagtgaaaaaaaaaggtagaaagagaagagtaatgacagtaacttaagcttaaaataaataatctgatttttttttttgttgggtagaactctttagactttagtagtacaaacttttgagagtacttactgctactacttatttccttaaattgcgcactctttgaaaagcttttatgtgctgttcatgagtgcatagcttctttttttaaaagaaaattattaaatcactgcttttccaatgtgcatcttttaaaagaatcattcattttgtttgtatattattcatttttgtatcccaataataaagtgttcgaccttgtttggttataatatttatgaatatatgtaacctgagcaacatgatatgattattcatacattgtggggggtagctaagtccccttagtgtgtgacattgttgagagatccaatagtttaacattgctcaccaaaaagtaaaaaagaaggtaagattggataaaaaaaaaaaatgtagccacgtgaaaacaataactagtagtacaatgatttgtggtaattttaatttgtttattggattggggtttaataatggaggttaattagcaaaagaagcctttatttggattggagtagctcaagtctagtctaggtctagtatagagactagagtctagaccataccacttggtccattattactgtccaaaactgcaatcaaggggcccatttcccatgtcccaacccatgcctggcctaacatttggcatagagtaaattggttgctctctaagtaattaggagtgtgtttttttgttaaaaagagtttatgttttaagagtaaatcttaacatgacctcatacatagataaataataatggtgtgaaagttaaaaggcatgatttaccagttagaaaggtgataaagagaaagtgggggagtaatgactaaggtgaagaaaatatgatgcttattttatcattctcgtagagaagttttttctttttgaaaaagactcatgaaaacgtcattaggcccacaaaaccttagaaccatcataacaattgtgatggattttatttaagtattatttcataaatacacacaaaataataataaaaaattataaaaatacgattgtactaaattttagatattttaaacattttatataattttatttacaaaaaatataatattttaatgtattttt

SEQ ID NO: 69478 - DNA, 2556 bp, Cannabis sativa
tttttttttttttttaactctctcactacagctagctatcagtatcaagggaagaacatgaaattcaagctctcattagcacggcaaccaatcactgggtggaaatttatttttttaacatttttgtgacaacaaacaaaagcagtatatcctctcagttactatagattttattgatttataagataaatgcaactggggatactaactctgctaaaagctcgtttgataaagaaatggaagataatgaaattgtcatacataatacttattcatgggtgaatacaatttcagcttgaggagatgctcgtcgaaacttaaccatttcggtcagcatattcaatcgtctagctatagtacacaatgaacaaggggcaacactcattgtctcgagcactggagatctgctgagcaaaaacttgatgaattccatttcatgtggcacaccagacatacatgtcattctcactaatttgagcttttcgaaagagtactttgaaaggccttctttctcccaaaatttcaaatcagacgcttccaacgcaatcacaaaatccacagcatttgtgggcccctattaatcaaaagaattttaaaattaaatggttgaataaccatgacagcagtgtcacaaaacttaacaccaattgccattgtaacttaagactgaaaaatcaattcttaaggtagcttactgagatttgaagttctgttaaatttggagagctcataatcaagcgaagaaccacatatatctctttcctatcttcgaaacacacttgatttaattcaataaccttcaaatgttcataggtaactaaaagttttcccaagtcataacctatactcaaatactaaaaacaaaagggtcagcaaacaaacaagtctactatgcagaaataacttgagcattcaccttgtcatggactaagaatatagagggaaaaagagtatcaattcagtaaatgaaacaattagataatcataatctctcaccttggtaaagtacacgcgcccaataagcttctcaagaagaggcaccccaccaagaaacttgacaaaattgcaacttgagctttgttcaaagtgctcagcattgtcctctgtcatatacatatcaacagacatagcaaccaaaagtggagtattctcaagttttatgtccttaaattcaccttcaaggaacaaaaacttgagatttggagcttttatgtttaaagctaagctatcaaagtaagatatagccagattttcaagtagagggcagccagaaattagactctcaattacatcaggggcaaccagcacttgatgaagagtgagactgtttaaatacgagaatcccttaaaagtaaggggtggatctaactcacaacgaaataggtccaaacgggtcaatttcttacaatgaaataaactagcaggtactctaaacaactcgccctctccttcctcttcttctaatacaagaaccaattccttaatgtcattccttgaaagaaaaagtaaccattgatctatgtctgagcagttctgcaagtaccatgtagaaagctggaacttgtgaattggtcctttgtgaagaaagagagccttagttataaagtctatgagacttttctcaactaaagctcggtcactacgtagggtaacacatctatcatcaaacacaagttgagtaatcgaagcccatttgtacctccatttacttgataaaatgctagttcttacagcatctcttattggcaaacgggttagaatactctctataatgctttcaggcaaatcacttatcaaatcttgcactaaagcatcccccattaatgtcctgcaatggcgaacaaaacccataatcaattgaccttagaatataataaatcaaaaacccagaattcttctgtgaaactattatatgattctcaaagaagcaagaatccactatgtacattcttgttcttacatctctaagtagaattgggggtttatgcactttcaaaatactatttttaatgaaaaaaatataatcttttgaatgcgatcaaaattatttgaagatcaaacaaaacccaattgctaaaaatccaaacgaataacaaataccaccattccgtagaaaaccccagaagaaaatacagaaatgtaagaaagaaaaacatacctgggtgggagagggagagaggaggtgagtgccagtgccaccgagtgccaacttttccttcgagaaagaaaaacgcctttatcgtggtttgttgtcgttttatgggtttagtactaaaactaatgaaggtttgttgggtttgggctacggtctttgtcaaacatgtcagctccccggtatccataatccattaaataatttcttttttatgaaattataaacaataatttaataagaagaaattaattttttaaaaataaaaatggaaaatttacataacaatatatatcccattatatgtacaagtacaatgattacatccacaacaacaaaaaaaattaaaataaccgttctaagataatagagtctaccagtaccggctcatgataaactaaatc

SEQ ID NO: 69479 - DNA, 2910 bp, Cannabis sativa
tttaaaaagtacgcatatatataaattggtatgaagcatacctccgataaagtggtacaaattgaagaccccatccagcagaaaagagatatccggccaatcaactcagcacgttccttgttctgcgtaaacaaacataactttagtctttcttaagagacttttaaagataagaactaaagaaggagaagggcaatccataccttatagattcctgatctaccaagccagacaatttgatcaagaaatagaaaagttgatagcaacgcatttttggactgtaaaaccatcagcaagccccaaaaaaggctataattagaataggattctcaaagaaatattatgtcagaattttattagtataaacacagtgaagagagcaaaaaggtcagaagtataatggcacctttccaagcagaataagtggaagaggagttccttgaggagttggactaataagagcatgcaaatcattgacaaactgcagttgaacattgcatcttcatgagtaaatatccaggatgaatatgtttaaaagtataaattttgcattatattacttcacagtccaaggtatataaaagaaaacattaatcacttcatacagataattaatcacactatccttctcattatttctttcaacaatacaaagagccaattaaggaccaacattctggaaacttactatgtctagttagaaatatagatattgtaagggaaactacaaggtaactggaagattatgcagctgaagctaagtaggaaaagctaaccttaaaaagacggaaaactttccttgccaagctagtcgatttgtcgacattttgcgctgtaccaggttgtccattactcaagaattttgaaccatattgtatggccctgcatatcttgtccctggcctcagccttattcaggtacagaactacaagaccaagttcagctctggtggcatccaaagtactcatcttttatactgaatatgcaacatcattgcacagtacaagccatgttaataccatatggaaaacaaacggtgttcatttctcaaataatttataggaagcattgtcaaatacaaacaagtaacaccttgatataaagaagctttcatccttataaataatgtacgcatcacatctcaatttatgtttatcaaatcacatgtttaattaacaaaacaaacgtgggtagagttaaatatgtttcaaaacaacaatccaagagggtagctcaaatggttagacacgtggtttgtccacacggtctcaggttcgagttcctcctggtacttacataaaaattgctatggtcccaaatattgtactgtttggcagggatcctagtgtaaaagaaaaatgctataaaacaacaagatcaaacttctaatgtttaattgtatcgtactaaaagtgagctcacacagcatgaatagcaaaggtgccaagttgaaacaacaaaaatcttaagccaagtaatatggagatgggaacaaaggaagcaattcttcatgttaacattaattgtgtatattctcaacttctaatgtttaattttccattatccacaaaagtaaagcacacaaatatacttggtaatctgaaaatagtccttaatcttctttctcaaacactaaacaaactgtatcctaagccaaaaaaaatagtaaaaagtaagccaaacagctctaagaaacagctcaaatggtcagacaaacagtaagatgtggtcaacgaaattgcttatacataattatccccataaacttcatatgacccccagtaaacgttctttcataagcaatggaaatcttagctatgtactccaaaaatctcacataatcacacatatgcatacaaaatgctctatcagtagggtctagtagagtccattatagtctccccacttttctccttcattttcccagcaaccaaacgcaaatcaatacgaagaaatcaatacgaaatagacctatttcccaaatcaaaagtcaacccaatatttacaaagaactcaatagtcaataccctaacatatactctttttttttaagaaaagaaaaaaaaccccattgcagggtgaagataaatcaaacagattacctaaatctgattctgagcccaaaagaaattgtggatttgtgggttacctgaagcaccgaacaagaatcggagaaagagatatctgagttgaatatgtaaataagagatagagagcaaataccgaaaagagtgccaagcaattggcctcgaaagccgcaaactcaaaaagttttgagataggagggtctctctctcgtcacctttgtctgtctttttccttggctctgtgatagaattggagtctgataagggcttgtttggtttcccatacaaacaaataactttaaatttatattatcaaaatctcaaaaaataaataaataaataaataacaaagatatacaatacaactcatacacacatctttaaaactaaaacttgaaaaatgggtgaagattacacgaccttgtctttttctccaacaatatcaatatcttttcatatttttcagttattgcatctataattgtaatatttattacgtgtatttttggatataaataattaaagatgtaatatttttaaatttaatttctcactctttttcattatatatgttgaaattatctaactaatgaaaaagtaaaaggtcaaaacaatgtttactgatttacaaaaatgtaaacttcatacggttaaattagagattagggagaagacaataaaatgtttgtttcaatttcttacaaatattgttaataaaaaaaaaactacaaatattttaacatgaaccattgtgtggcattattttcataaaacattgttactaaaaacattaaattttaacaacaaaaaaaatattatttga

SEQ ID NO: 69480 - DNA, 2522 bp, Cannabis sativa
atatatttgagtggataatgtgtcttgttctatagattttcctctgtatggaattgaaaaccctgtttttcttaataatagatgatatgaggaacatatattccaagaaatgtgctaataaataattagtaggttatcatcatacaagatattaatacatatattattttagagaactagattccccataccatttagcaaagaagataattatatatcctaataagttagctgtaccatttctttaggtcatatgtgactatcaaataggctacaatcaaaaggactactaaattttaaattggtttatatccaaagccagttttgcttagctaatgagaagtgttaggtgtttttaatacatttaggtacttggtaatagtaccacaaggttctggcttttgacaattgagatggctttgattgcttcaaactaatcctacatattaaaccatatattacttaaaaaagtgggtcgttatcaaataacacagttaagtacatatccgtaagagtcttggagctttatgtagacacctatctaaatagggcaaaaacaaattgaagtggcccccttggcccctttaaattagtggctgaaatcacatttcacctttgttgttaaaagccaaccacaattttgatatctctaacattttcattctcttttgtttgtttcatcttttttttttttttgattggaggctgaaatcaagtttcaaaatttacttatttcttgtatcaatttcttcctatctagagttagaaaaaagtgcacaaaaaacaaaagcaattgtcacctttcactctaactagacacatgagtttttgctctgtttttagtgcataaaatatttcttttcttcttttgtataatgtgtgataatgctttgctgcatcaagttagggaaatcaaatagttaaaaataaataataaataaatgaaagaaaggcaaaagtaaaataaaaaagaaaagtaaaagctaaggtctatatataagaaaataatgttaatatgtaataaatcatataaaattctcaatacgatcgagctagagagaagatatttgaaaatctggtggtttgttgcatacttttcgttttatctgattcaataatagattattttgttttggattgtatctgttatattttattgttatattttttgttttagaacccgtgaactttttctgtggtcattcttttctgcatacaagaggaccttctgtgaaccccactgctcacttgtccccaccaacatatatttggttacttatttcatttcatatattgctttaacagtttatagtccgtgaaccaggccacgtatgactttaatttccttcttaatcctttctttttctcttgatattaaaatataaattatcaatttaagaataaggtatcgaaataatgtaattatgctacaaaagaaagtgaagataattgtatcattgtatcattatctatccatatagtacatagcatgatataattgatggttacctaatatactttacggtacaatctacaacttaatacgatgcttcaaacaaatcactgtatatttattcatttgctgatatattattattatttatgggacaatgttatgaaatatcatttgttttgttttcttcacaggaatatatatatttatatatatatattatttgcatgtataaaaagaatttgatgtaaataattgagaggaataaatgtatatagtttggcactacaaacctcatcttcctttattatatacatttagtttttcttttgaaacttatatgattccaacaaataatttgtttatgtggtatgctctttttttattttaataagaaacctggactgagaagtaatattatatatggtgaagcgatcgagggggtggtttgttcctaattttgtgtttgccgtcggatgaaatcttctcttcatgctctttcgttaactggtgcctgaaaatatgaaaaacaaataaaaagaaatggtacatatttctcctccatcaaaaacaaaattctacaataattgaacttgaattattgtcttattactcgggaaattaaacagctgaaatcagctgaaatgtttttttacagcatatggacaattaataagttgcacccaagttttctaaccaatcaacattctttagactaactttctttcttttaaaatgaaaaaatctcttacaaacttctcttttgattttatttacaagaaaatgaacattatacatattggcattccaaagagtgttatttcaagcttcccaaagatgataaaacaaggcatttaacataccagtataaatctctcttctaagtttggactgctacaccttttaacccacttgacactatattcaagtttattttgttggagattcataccagcccagctgaaatgtttgttgctaataagattatgtttatctgttttggtactgttagggaatgcaattgtttatagtatttttaacaagcaagtgtatttatatatatatatat

SEQ ID NO: 69481 - DNA, 2368 bp, Cannabis sativa
tgtaatagacttgctgactaatacttttctcattttgtgctttgtcaactgtggtttatattttaaaatttagaaccatttcagatatgaaattgatttaggtttttgggaaaaaaaggcaattggggtggagggaatatgagtaatgtacgaattattcattactagtttatttattcagggggagcatatcaccccataattagaaaagtactgtgctgagcttactcgtgatcagttacataaccaattaaacaggcttatctcaagtctgataatatggctattagtgtgcagttttgggactcattatctaaaatggtttgagtcatgcagtcccacgtaactttagattgctggaggaacttgaacggggagaaaagggaatcggagatggcaccgtcagctatggaatggatgatggagatgacatttacatgcgctcttggaccggcactataattggtcctcacaatgtaacaagctcaaatttgcttttcgtttctatattgtttatacatatgctttaaggttgtgtgtataaattattattgaattgttgtttgcctcctcaaattgttgctgcatagtgtgtgtagtttcacttctgaagtagtttcttacatggagtttttgctttccatatattttccagactgtacatgagggtcgtatttatcagctgaagcttttctgtgataaagattacccagagagaccaccaagtgttcgctttcattcacggatcaacatgacttgtgtcaaccatgaaaccggagtggtaagtctccactttcattgttctttttaaaagttatattgtgatttgtgtaggttacaatttttcctactgcagctaatgaaaattacctcgttgacattatctgtattgcattgtaactaagtgcatgagagtactagattttctattgtgatcctctttttgaatcaaacctaaattccattctaattgtaattttccctcaaagaggcagttgacgtagataataatttcttagtttgatgcgaacatgataggtggaatcgaagaagtttggactccttgcgaattggcagcgtgagtacaccatggaagatatactgacacagctgaagaaagagatggctgcgccacataaccggaagttggttcaacctccggaaggtacctacttctagtagctttcaagatcatatacatatccatggatcaaattgcattttcaacatgcaatatatagtttgttatgctgtgtcaatcctgcttagacatacaggggaatgtcccaaaaagcttctcttatcacctctcctttgtccttctgttttatcattgtctttttttattgaattgtgttttaatggatggatgctatttgatttatggggacttttgtgtgtcaaatattgaatccgtttaactagtatcaattgtagcattatcattattctaaactctactgtcatgtccatgttcatccgcaatctgagggaaagaaaatgacatgggagcgttgatgatatcttccatgctgatcttatttcctgaatttaatggaaataaaaatatgaaaatggaagaagaaagctgaagggctgtgaccaaatattgtagctgaaatggtggtgagatatttggattcatgacaaggttttggtttaaaatggcagaatgtcaccatccttttgctctctcaatattttcaaactactggttttgatttacaaggggagagagagcttggtgtgtggatggaaaagtgagacatggagacctaattgggtttgccttttgccttttgacatggctgcctttgcaagcaaatgaatcaattacagcttaagctgtgccgtccacagccttaatcaacaaaacaacacaataaaagccaatgatataaataactatagtatatgtatgtatactatcatatatatatatatatatatataaatatgaatgtttatacaattgaaacttatacacatcttagtagtatagcagccagccccatatggccgacttagcacaccaaactttatctagtggaactggtctgtctggtgagagggtcaaatatttacgacgttctatactcaaaatatcatctattaccatattactattcgtctaatgtggtccaaaaaagccactcttggagtttctgtacttgtactgaaaagcttaattctacattctataattgaaaattttaatttaattctctatttttatggtaataaaccagtgtaggtttctagatttatctgtttataatttaacattttccttttttttttcttttcttttattcatataaaaaaacatgaaaatcagtcttttttttagaatatatactatatatat

SEQ ID NO: 69482 - DNA, 2740 bp, Cannabis sativa
gctgattacagaccttcatttggggtaagtttaaaattgcattgcattgtcttgttgtttctgtttagctttttttatagttgtgtgactgagtagttattcacttcaattgggcaatgtacatttaaatatttaagcctttctatgttttcaattggtggaaatttgattacatagcctaggcaatgtgcaatgaaaaatctgactacttgaattaatgaaagtttgatctaaaaggttttagattcaagatttttgttattgtttggttattgggtgttgaagtaatgagtttgctatcggcaactgttctaagtaaccgatgcttgtctttcgtctagctatatgattagaaaaatgtgctctttattaaaccaacattgtttctttcttaatcagctgtgtttttttaattccagatgaaatgaaaaatgcattagtcattcctctgtctttttttagtattgattctcattcgtgtttcggaacaaatttgcaggggtctggtggaagacctggtttcggtcgtggtgctggtggttttggtgcagggccagctacctctgaacaatagaaaatccatctcctgccttgtaaggtttgtgagttgagaatttgaagaatgaattggggggatgtatagcattcctccattgtgggattaaatatcagttttgttttacttattacattatttgctgagataattaattgttggaatctcttagatttattactcactctacttccttttattttattcaaactttgatctctttcattattccacataattgttggattctcttaaatttatgatgtttgatgatttttttttatttcaatctggaaattaagtattttgaaaagaggcataattttaatgcaatgtgtttgctttgactattaaaacatgagatgatattttaatttatcaaatcaaatggcaaagcttgataataattgtaagtacaaattaacaacattgtatttgtgtcttgtaacggtcccttcaagtctccattgtgcctttatacttatggaatgatagtttttatacaccctacaaactaatgctagtgtttccaatatgttttgttttcacctgcatgcttccttgaaaattttttgtcacctattctgaaattacctcagttcattttgaaattactctaggtagagttctttcgcaatgggctaccaaaaaacaagatacgccttgttgatataggtggttttaatcaattcatcctcttcaactgtgtagtctcatacttacacagttttagaattattacacttaagtggaattgtacaacttacctaatatttcttcttacggaccatgagactactgactgtcatatgttcttttaccaaaaggacgaaaaccaatagaattagagtatggaatttgaaagtaatagaaattcagttcaatttggagaatgatgttataaagtgcatttgagagatttgtcttgtcttgaagagaactcgttacctatcaaatatcaaatttgcgattcaagcatttcgactagccccaacttgctcacaaagaaatatcggtttgtgaataatgcgccagatcttatatttgtttcgacatttgaggaagtttttaagtctattattctgtatatttaaaagtagtttgtttagaaggtgtattatataattatactgttggtatcacaagtaagaaaaaaaaatgacaatagccataatagtagcattataatttatatgattataaaagggataaattttataaaaaatgcaaaaacaataaaaaaaaattataaaaatatggtcgtatgaaattttaaatattttttacgatttttaagattttatttacagaaaatacgattttttaatgttagattcttgttattttgttgttgattttttgttatttgtatatttttttttttttgttgttttcttattactttcatttcatttatgtgagtttgttgtatttttatagaataccgtacaaatatatataaaaaagaaaatttgaaaataagtgtaaattttttataaaaaataacaatgtatgtaattttcaactatagaaaaggaaactccatagttctaattatgtttgactgttagatgagcttttagttaaaaagagtcagaactctgtgctcacatatgcagactagtaggaaggaaggaacaacccataaatttatagagaccagttgttgttttgatgaatctttgatcaaatctcatatattttattattattatcttccaaattattatcctcacagctaaaacacacttaaactaatcaagaaaatacattgataatcaaaaggttaatattatattaaattttgtgtttttgtaaaagttactgattaaattcttcgttttattaaataacgaaatagacttaatcgttttaaaatggtataaaataatatctctgtccaatttttttaatacaacgaacttaaaaacaaattcaaaatacataattaggtttttaatataattaaagtcttgccttaacacatttaaatcagactgtaattaaattttattttcacaaaaaaatcagcatatgatattagtttgtatcattttgaaaaatacaagatttaatttatcatttagcaaaaataatgacttttaccaaaaaaaaaaaatagaataattacaaaatacactattttttgttaatttttacatttttacgtttgaagtttttttt

SEQ ID NO: 69483 - DNA, 6004 bp, Cannabis sativa
caccatgttgtatgttctttctcttaaattctctgttttaattaaactcctttgatttaattaattgattaagttcatcatcagatctatggagagcaacttgttctctggaactattccctctacccttggaaatttggtgaacttggaatatttgtgagttatcatctatagctttaatatttatcataaaaatgttaattaatgattaagtcttgttaattgaaattaatattggcatggttgcaggaatcttattgcaaacaatctcactggacaattccctctagctctcactaatctcaccaagttaacaatactgtaataacttcattaacagaaatcaaccaacatattttgattcattattgctatcttcactactcattgctcatgtttttttcttctcattgcagtaggattagtagtaactacttcaaaggaaagatgcctgattttggcggtttgaaacagcttcagagattgtacgaactgttgatcctattcggtttttgagaaatttatgagcaatttattcatattgatttgctatactactctcaacagagaaatggaagcaagtggtttcgacgggccaattcattctagtctttctaacttgagtagcttgacagaattgtaagttcagtcttcttaattaccttaaatatctatacatctttgctaaatttatctctaatgagagatgttctttgcagaaggattactgacttaaatggttgggagagctcaaactttccggacttgagcaacatgataaaattaaggacattgtgagctctctattttttgactcagatatcaatttaatatttgaagaattgaacttatagaagccatgtttgtaattgcaggatgatgaggagctgtaaattaagaggatacattccttcatatattggcagttttaaaaatctagatgtcttgtaattcctgatcaatttagatatgtccaagttttatacttgtgtgtacaactttgttggactttaaacactttgcttatatttcgcagggatcttagctttaataatctacaaggggaacttccgaatttcgataatttatatatgttgtccgaaatgtaagtaatttcgaaaaaatgtgtaagtcttcaaaatttcattacaaataaaggggattatgtggtgcagatctcttccccaccccttcggtcattttgacgatctcaggtatatttagttatacatttttatgctattgtataaatttcaatgaataggtacttaacaagtaacttactaagtgggcctattcctgaatggaacaaactcagaggctttagcaagtaagttaccaatattatgtaatattatcattttttatttcttctaaatatcatatctatgcaaaaagattgctgcttatagattaattccaatgtgtttggttaatgatgaagaagtttcttactatgtgcaacagattaatagatatttcttacaacaacttttctgagacacctgaatcatccacttgtacagataatttgtaagacttgttctttttttttctttcagttgttatttctatattcatcacaatcatgtcaaactgaatatacttgtgtttttctcatcagcaataagtttcgaagcacatcgggacagaaaaacgactcgtaagctctataacactaaacatagtatgtatgtttggagagtatgatattattgacaaatgatcaaagaacaataattttgggtgcgatcataccagcactcatgcactggattctattagaacttcgcaattaagtgtgtttggacgagagtagtactaggatgggtgacctcctaggaaaagtcctcgtgttgcactcctaaaacttttattcatcaaaaaaagaaaaataaaacaataatttttcacaatgactttacacttactaatgattcctttcattatgcttattatagaaggcttatcaattgcttgaccccatgttcagaaggtaaataagtctctctcaaaacaatatattcactatattattgttacctctttgaatatttcttctaaaccaacatcgttcaatgtgtagattattactcattgcatattaattgtggtggagaagaagttaccattggaaacataacatatgaaggggatgaagaattggtaggtgctgcatattatttaccaaaatccccttggggaatcagcaacaccggtgatttctatggcgctgagacaacgggctacatagcaaacagtgaatcagcattagacatgctctacagaactgcacgcatctcgcctctttcgctaacttatttcggtcgctgcttagcaaatggaagctacactgttaagctgcatttttcagagataatatttagagacaacaaatcttatttcagtttaggaaggcgaatatttgatgtttatgttcaggtagtcatgcttttttccttttgactttggtaaagtaagattgatgcaacttattgtgagtttgattgagttaataagttgtcattatagggaaaattggagtttaaagatttcaacattgaaaagaatgctagtggagttgataaggaaactgtcaaggtagttaagccagttgttgtgagtgataagacactcgagattcgcctccaatggacggggaaaggtacgagaaatgttccaaagataggatcatatggttctctaatatcagctatctcagtggagccatgtaagtacatgatattccatagaaacatagaaactaacattgttcataatgaaaagtagaatttatttttgtattttgttttacttttagataacaaacctccaaatcaggaaaaagagatagagagtagaaaatccaacacaaagttgattatcgttggagcggtttcatctttttgccttcttctcatagctttagccattctttggtggaaatactattttggaagcaatgattctaggaaggaaggtacaatttggttcactatacattgctacacatcattttacttaccaaaaccaatgaattcaaatttgtctaattttatttctttgtacagttcttagaggacttgatctgcaaactggtttctttacctttaaacaaatcaaaactgccactaacaactttgatgctgcaaacaaaatcggagaaggtggatttggatcagtctacaaggtatctaacacttgttagttttcatgattataaactcactacaaaaaattttactttagttacaacaagtgaaataactgtgactaattataaatcatcattcttatgttgtgactaaaaagttcgtagctaaaggtttgatatgtcataacaaaattaaatgtcatgtttttattgcagggtgtgttattagatggcactattatcgcagttaagcaactttcatccaaatcgaaccaagggaatcgcgaattcataaatgagataggcatgatttcagctttacaccacccaaaccttgtcaaattgcatggatgttgtattgaaggaaagcaattgttgttggtttacgaatacatggagaacaatagccttgcacattctttatttggtaactctattttctatgtttgtccctttactaaggctgcaaaattttttactttgattattcattgattaggttctgaagaaggtcgagtgaaattagactggaatacaaggcaaagaatatgcataggcattgcaagaggtcttgctttcctgcatgaggaatcagcaattaaaattgtacatagagatatcaaagccacaaacatacttctagataaagaccttaatccgaaaatatcagacttcggtttggccaaactaaatgaagaggaaaacacccacattagcactagagttgctggaactatgtgagtttattaagctctttttaagttgcaacattgtgattagttgattatcatggcaatgatactaattaattgttgttgttgcagaggatatatggcaccagagtatgcattgtggggttacttaactgataaagctgatgtatacagttttggtgtcatggcattggaaattgtggctggtaaaaacaacatgagatttcgcccgaatgaaaactttgtgtgccttctagattgggtaacacacaactttcacaacttttttctttcttttttctatttcagtttggtactgatgtaatctttttctatgtttgttgaaggccattttcttacaacaaaagggagatgtaatggagctagtggatccgaatttggggtcaaaattcaagaaagaagaggcgaaaagaatgattaaggtagctttattgtgcacaaatccatctccttcacttcgccccgccatgtcaacagtagtgagcatgcttgaaggtcggacaaccatccccgaattggtcatggattcaagtagtcatggcgatccattcaagttcaccgggttgcgtgacaagcttgatcagatttcacaacaaagctcaagtgaaccaacaacatggagtgaatcttcctccaaataatctttctatttgcttagtgagagttaacattagatatgtagctatgtttatatcatttccatttaaaagttagttatgtttgttagtattcttggttataatctgttaactatgattattgttgtaaatgaaatgaaaaataaaaacaacacaattgatataagtataaactaatattatgtggttgtttaaggtccagaaaacaaacattctgatcaccacacaaaaggactctaaaatctaatcttacttagtaaaaccacacaaaaggttaattaacaaagctaatacaaaagcacaaaacacagcttcaatcttacaaatgataaaagagatcatgcagaggcataatcaatccatgatgatgagttggatgactcagcaagaatatattgagcttcattggaggattgttgtgaagtttgatcaagcttgtctcgcaaaccggtgaacttgaatggatcatcatgattacttgaattcatgatcagttcagggatggtagtcttgccttcaagcatgctcacaactttagacatggtggggcgaaccgaaggagatggatttatgcacaatagagctaccttaatcactctatttgcctcttctttcttgaattttgacccaaaatttggatccactagctctgatatatctccattttgttgtaagaaagtagccttgatgaacaaccataaataagatttttacatcattaccaatatgcaacacaacaaaaaaataaataaattgtatatgaagttttgcatacccaatctagaaggcacacaaagttttcattcgggcgaaatctcgtgttgtttttaccagccacaatttccaatgccatgacaccgaaactgtatacatcagctttatcagttaagtaaccccacattgcatactctggtgccatatatcctctgcaacaagaagaagaagaagaattcattagtatcattgccatgataattaactaattacaatgttgcagcttaaaaagagcttaacaaactcacatagttccagcaactctagtgctaatgtgggtgttttcctcttcatttagtttggccaaaccgaagtctgatattttcggattaaggtctttatctagaagtatatttgtggctttgatatctctatgtacaattttaatagctgattcttcatgcaagaaagcaagacctcttgcaatgcctatgcatattctttgccttgtgttccaatctagtttcgcttcacttttttcggtaccaaataagatatttgcaaggctattgttttccatgtactcataaaccagcaacaattgctttccttcaatgcaacatccatggagtttgacaagattcgggtgttgtaaagctgaaatcatgcctatttcgtttataaattctcgattcccttgcttcgatttggatgaaagttgcttaactgcaataatagttccatctaatagcacaccctgcaat

SEQ ID NO: 69484 - DNA, 4221 bp, Cannabis sativa
cttccgatctagtaaatctagatcctggtaaaatatttccaacatctgaaccatttcataccaacataacaaacacatatttcccaaaaggattcaaaaatccttatgtcgccccatatgatggaactaccgatccagtggaacatttgagtaatttcaatattactatgtgagcaagcaatgtcggattaaacctacggtgcatgttgttcttgaattctctcacaagggcaactaaaagttagtctgataagttttctcgacattccataacctcgtgggagcaattgtctcaagaattcaagaaaaaattccaagcatctagaagcagaagacctaaagcctcctcgttaactaacatcaagaaataacctgccaagcgcaaaaagtatttttaagatgtggacatcaggtcctcattcctagcatgacctcgttcatagcatgtcccgaggtgtatatgttgaatatcaagtcaattaatacatatatgaccttatagtacactttgtgggtgggtttaattaataaatatatttaaattagattttatttgataattatttataattattaaaataaaattagtatttaaataattagataagataagtggtaaaattagaaaagacgctttagtttcattagttgaaataaagtggcaaaaatctaactctaaagcccatgagaaattcagccctagagttacacttcaaccaaagtctttatttaagcccatatcatctaaacctagccctaagtgaatgcttatataaaaaaagtgatgagaataaaaaacctaattctatgttaggcaactctcttctcttctttcttctatagttcaaaatttactatgtttttctctctgaaaaatatgttccaaaggtgatttgagtatcagcccgcactattcaagttgatactcagtcctttgtggaagactgtgatgaacacaatcgaaggaggagaagatctgagtttagatcttgatcatactctacaacagaaaggatcaaatgttagagatctgaagagaatgagtcataatattttgctacaagattaaatgacttctacattcatatagcacaagagatataatttgagtaagattgtaaaaaaattatctaaaacctcgttgtaaggataaaggatagttcatttcctgagccaagccatcctttgaaggaagccacaaataaaatagctcaacccgaggactaaaaagccatcaccaaaaaaaaacatgatcgaacgtagtatattttggataagaccaaacgtaactgccacaatcctataattcgaatatgggtaattattcatatatttttttgcctataagacaggataaacaaaatattaggattgtccacgtttcacacattgtggtaaggatatgatttaataactacaatttgtaatgcatataaataaagggaagggaatgccctatttctttttctctctagaaaagagtgaaaggggttccaaacctcgctctaaagactgtcgaagactaataaaaattttcaaataaaatcaatgtaaaagggacggcaaaaatttcttactcaaagttgacttccaatcttgtatcttgattgaagatttttctcaatattctcaaaaataaaatagactcgtggagtatttagaataaactacaaaaccatgttaaaaattcctttatctttcaattattgttcatgattgaatatattatttatattaatttgatatttaaagtattaactgtcaaaccctcatttaatgttagcaaaattctgagttaacatatatatatatatatcactttattttatgatcaaaatccaagttctagcagttgttgtaactttttttttaattgcctcagagaatgccacctaagaacaatatactcaaagggatcgagagctaaggatatcattgataaatgcatggcatcactcaaaataaggttcttgatacaaagaggatattcaggccaccaaactgtagtattagtagttgaaatgacatatttagcaagagtatcaactattacattaacattgaaataattacaagagactcttaatatcatcaagaattaaactcaaagaagaatctaaaattattgagttatcatcttaagaataaaacttactcgaattaaaattttgagataccaaagagcactacaaaaaaagtaacatttagtgacaactttttagtcacaatactattacgaaaactgctttcgaaaacccttgttgagggactctaaaactatttagtgatcctttattgcgcgtcactaatttcggtgaatagaaaattagtatttagtgactcttcaagttggtcactaaacccttttatattcccccgcgcttcattgtaggctttaaaaactactttaaaaaatgtcactataactatgctttttatatgtaaaaaacgtaatattatttttttaattcatattatatattatatttataaaatgaatttaattaataatataatttaattaactatatatttatcagttataaattaaaatattttaattttggctataaatttattaataaacaaacaaatcaaaaatctatatatcaacaaataaaattagtaaaaattaatcaaaaatatatacatcatttgtactaaaatataaacttcagaacaataaaaaaaaatagacacaaacatacaatttaattcaaaagtaaaatctctaaatctatctataaaaaagaaaattacaaactaattgcaaatatcaaaccctagaaaaaatttaaaccgggggtgacctctgttggtttagccgtcaaccctagaaaacattacaaaataactacccaatatcatggacgatgttggttcagtcgtcaactccaattaacttgtccatcattcgtcgagggctaaaaatgcccaccagtgactgctatagctgtcgatacctctgctctactaatcgtttggaaatctaggtgttgcgagcaccgtgatgtggtctatttggataaccctcgttgatagttcggccatcgtggcctagcaacactgccccacaatggaagatggaaagggagataggagagaggttgagggattcaaagtttactgggggtagaggaagccaaactcgactattgatggtcggagaatggttgtccagctatggctcactctggcgccgcaccaaacaaaggagagagatagagatcggaagacagaaatagattatgggaatttagggtttcaacatatcccttttatattcctttttgttttttaatatattttaagaaatgaatttagagagagatatactagccaagttctttttattttttattgactttttagtgacccgtactatgtgactctgaacactttcagagttgcacaatgggtgtcactgtatatttatatttttcaacaaataaatagataaataattaaatttttagtaacccttcaaaattttagtgacccgcatttcaaaatacaaatttaaaatttttactcactatcaatacgcgtcactaaaaattaattaaaacatttagtgacccatgtcactaaactgtttcactaaatgttaaaatagtagtagtacaacataaattttttgtgactaaatgtgactttttatcataaaaaaaaaaattcttctaactaaaacatagtatctatagatacaagttgtcacttattaattttagtcacaacaagtattgtgactaaaaacttatttagtcacaacaaattgtagtttttgtaactaatacctttatctacggaccttttagtcacaacataagaatgatgatttataattagtcataactttttcacttttaatcacaagtttagttgtgactaaaaaaatattctttttgtagtgactccaaatgaatctcaatattagaatacagaagtgtatggttgaggaagtatggataggtgagtgtatagtataaggtacatggagttccatctaaaaaccaattggcaaagaaaggagtagcccattcatcttattctattatctttctacatattagcaatgtgggactctctataacatccctcctcaagacgatagctattttattttgggcttttttagttttaaccaaaaaaagtaacaatattataaaaatactttcaactggctaaataaacaaatacaacctaaataaaaaaattaca

SEQ ID NO: 69485 - DNA, 3658 bp, Cannabis sativa
taaattacgcgcatgtatttttgcatctaaagcatgtgtcagcttatccatagaatcataacaattaaatacagctaactaacctgtaattgggatcccagtcacctggatcaggcaatgtcaggctattatcgtgcttatcatgattaactcctgctgctgtttgtgaatattgcaaattggaaccgtggccaatgtagcttggcacgctctgagcagagtaaccggtagagataccactgcttcctccatgttgcttccaccttacagcattagaatttgaatgtagatgagatggtgaaccgccaggtaattgagaggtgccctcggattggctatagttggtgccatcattagattgcccttgccaatttgaagatgaactctcttgagagctcgcgggatatccccaactttttcttctgttatactggttgacagcagtcatctttcctaaaggcgatccatgacaacttccccttgctggagaagtcggaccataatgtccaggagagccagttggcacttgagcgtaagaggttggtggagtgaattgcgagggactggtgccgaggggaagtggagcaaagctcccagtcgatggacttacaccaagtgcattcccatgtgaatattgaacaattctccgtcttgcatcgggactacttccaagtactgacatatttcctggtgcatgcatgttcatgccagatggaccaacaggtgaacaatatgcaaacatattacttgaatctccataactcccgtagctgcttcctaaccccgtactatcgttgtagctaccgtagcttcccatactgccataactattagctgtgtacggtggtaccatttggaaatgtgggctaccgtgcacaggaactctgttcccacttgaaatctaaaaaaaaaaagcagcagtatctcaaatggaggagactcaaatgataagaaagagggaaaaaagccaacctaatagaaaaagtggtttatattaaaatatggaacatttcaagaaggaagtttgctcacattaggagagagaccggcagcaaaccaatgccctccaccaggatgatggtcaactcggatattttgagaaacaggctaagagagaagccaaaagcaaagaacatcaagaaaaacaaaaatgtcagtattatttcagcaaaaataaccaagtcctgctttaattctatgtcaattaaaacaaagcatgaatgaacgaagtataacgtattgatgaaaaccgcatggctgcttacacagacagataacagaaaaagaaacctaaaatttgtctaacatattggtacttggtagatagttccccaagaggcctgacaaactcgacctaatcatgggtggaaccgttgaaagtatagttttatagaaggaaagtgctccaacagaaatattcaagagtttaacagcctgaacatatttaacaaaattccaactaaaagataaatattggtcaaataaattcaggcattgaaaaaaggggaatatgaggaaagattataatgaaacattcaacaaaaacactagcatggattaatcatgtcattcaattaaccaagaacagattttattatctaatttagaatgtcggtgtgaagaaccacttaccactcgtgggttctctggtggaggtatgaaccgagatgtgaaaggttctcctgttaaaaaagggtgttttgaagcctgcaggcacatgagttcacctctaacaattcatagcaatgaacttattttgtattctacccgatataaaggggcacatatgattaaagaataaagaaaaaacacgagatgctagttggaaaacctgaaatggtgaccaccgctttgcaggatcaaactccagaagtcccctcaacaaatcaatcaaggcaaaacgtgtttgactttctgcaagacattgtatatacagaactcattgtggacttctttagagaaaaaagcaaccaaagattaagcagactaaaagcagtctattctactttgaaaactgataacacggttttaaaagagaaatcagacctttaatgatctcctcctcattcaagttctttttatatgggtagctagtgataatttcctcaaggttcttaaaattgaaatactctttaccgagggctggcttttttgcttctctctgaaagaaatcatcaacagatgagttaaaaacaacaatgttaccatctcgccctcccatcctcacttgatggggacaaaacaaaacaagaaacgtattaaaaccaaacaaaacaaagaaattatatcaatattataacatactcctaacttttgaaagaaagcatcgttcagatagataacaaaaaacttcaaattgaactattttacttattttttatttaatctgtaataatacttggtccttacagcttcatattcttcttctgttaatgcttgatacacactcccattctctgtactgtggatgctcccaacacacttaaaaaacttgcttgtgtttttcgcctctttaagtatataatcagggggttgtcctctgcaaagcaaaaaagagtaagaaacatggaaaagaaaacttcatgagtatttttgggattattattcaagaaaggaaataatttttttttgggggggtgttaggaaaattaggcaaaaaaaaaacagagtaacacaatctgaggtagaagaaaaaacatatcagatgactgggaatgccactagaaaataggacacagttaaaaacctaaattaaatggtataccatcttctatcattacagcagaagaaatatatcactgtactgaaatacttcaataaatatcagacgattgtaaaaattgttcacttaaaagagagacaaaacagcgtatgaatttgaattagaacacaagacatactcaagcaccattgggccaagtaaccaactttaaagttgcagccaagttcagcaagaaaactcctgaaatgtaatcatatccactttgcatgaccactaatggtcttgtaacctatcagaaacaaaatacttcctaattgtgaagtcaagaaccattgatatgttttagtttcaataacaaattttaaaaattgatgatgcaaaagaagaagaagaaaaaaatcaatcaaatgtcccaacatcttgaattagtgactttcgaacaaatatttgaataagtgtagcttcttgattatttacttaaactttgacatttccttgtctgtgtagatatatgcatattagtgtgtgtgtctgtgtgaatagaatatagtgtactgcatgcatacttatctatttcatacaattgaatgtatgcacaccaaaagcagaatgaattaatgtaaaaccatgaaacagcaataatcagtaccatactgaattaactgataaacacaagacgaggcatacccgagtatcctaaccattcttcgtaaaagatcaaactctgaggcccctgggaataacggcaaacctaaaaacaattcagcaagtatacatccaaaggaccacatatcaatgtaagtggaatatctggagaactgttaaggaccaaatcaagaacacgtgaagtcaggacaaaacaaaaggcataaactcatcctacttagcaaacggtgtactctaccaagtcatccttcatcatcatattactcatta

SEQ ID NO: 69486 - DNA, 5457 bp, Cannabis sativa
  modified_base (27)..(42): a, c, t, g, unknown or other
aggatgttaatgaaacatacatggtannnnnnnnnnnnnnnngtaaaatatttccaacaactttttcttgcaaaacaagacaacccaaggtatttatcatgacaaggaacaagcagaactccaaatactcccaaaaatcaagggaaatgttgaaagagaaacagactgtagactttccgagattcacgatttggctagaagcattctcatattgctgcaaaacttctttgaaccataaacaactagacactgatgcttccaagaagacaaaaaatgtcatgagcaaacaaaagatgagaaattaaaaggccccttcatccacaacgaaggcccaaaattgaaccctgaccaatagcatgttggataaaagaagttaaaccctcagcacaaacaagaaacaaaaaaggggataggggtccccttgcctaagacccctggatggaaaaatacgaccactgatctcaccattaacattaataggatatgaaacagaagtgatacatcgcatgagtaacccaatgaaaccaagatgaaacctaagtttagacaacatgccacaaaggaaggaccaatcagctttgtcataagccttagcatatctgctttatacgcaagaaaacacttcctccctttattatatcttcttatagcattaagacactcaaaactaatcataacaatatcatatatcaagtggtcagaaatgaacgcgctctgctactcaaaaataacatcatccaacacctcacgtagtctatttgtaatcatttttgcaatgatcttatacagaatattacaaagactaatgggtcggaattcactagtgagagtaggggatttaaccttcagaatcaaagtgataataggctcattgatcgacagcatggaacccatcccgtcaataaacctaagataagctttgcacacatccgttccaacaatatcccatatttttgataaaatccaacactcgtatcatccttgtcggggctcttatttggatgcattgaaagcaaggcaattcggacatctaattccatgagcggtcttatcaacacatcaataagctcagtagtcacccatggttggaccgaatccagtaccaaattcatcaccttgtcagatggttcatgagaagcaaacaaagattgggaataatcctcaaaaattgacgcaatacaaataggcgactcacccaaactttatttttgtcaaagtgtgtttaggtataagatataataactattattattaaggtcaatcgtgcaattattaaggtgataattacattatatttttttaaaaaaaatgcgtttagatataaaatactaattacatattaattcctaatatcttgttgggcaaaatagttagtaattatactagaaaataaaatattttttaatagctaatatttaaaaatgaaagattttagtaattacagtgtaattacattcaattctctcatgggggcatgaaaattagagagtgtaattgaaacccctcaattatttctaattacacaattatagtgtaattacacaggtcaaataaacgtatcaaattgtataaacttaatattcatatgtaattactacctgacatacaattacataccttataatttaaaatgaagtaaagtgtataaaatataattacacaattgcttctaaggaagacttaatttcaaaattagttttttcctttcatttttttaataaagaaattgtcaaacacaccttttattttttaattaagtacaactaattagggatatttgcggttaaatcagcttaatatttataattgttacacatataaccctaattaaaaaaagtggcagtaaaagtatcttatcttacgattttgtggcagtcgtacttttttttggccataaagtgttagttcaaaaacatgtggcgatatattattggaacatatattaaataagcttaagaaatatgtcgtcacatgtttctgagttgatacttaataggcttaattggcacttaataaccaaaaattggtacgacagtaataaaattataaaataagatatttttactgcgatttttttattaaggttatatgtatgataattggaaatattaaaaaaaaaaattgctgcaaatatccctaactaattatcctatttggtagaactcaagtgttgtaaaaaaaaagtgttccttattaatattatttgactaataattcataatagggttggaatttcaaattgactatctaaaattcactctcaactaccttaataattattttcattcgtctaagtttgcaattattttctttctttatatctcttctcagtatgactatatcacctaacatatgactattattaggtatcatcatacttgtgctcatcatgggcataataatggtatcaaactcttgaacgaatttatcaaattttgattttgataaataaaataaaataaataaataatagtttgaaattttcccataatcattccataataggagaagattattattattttttttccttcattttaaccgtttttatcttttatatcaaggaagagagatttcaaacttgagacttccttattacaataaaaaaagtgtgaaacaagacgctatggttatggctatggccatctcactttaacatcttttaagttaacaaaaagaatataaaaataaaaataacgcaaaaatcactaaataatattaacgattatactaatattatttcatttataaggtggtccatcactattatttagtgcaacatcttttgttaattttggaaaaaaaaaaacaaaaacaaaaaattaattgcctcaaaagttatttattagtatgaaaaattagacttaagtttcttataattttattaaaaatgctactaagatcatcaagaatacgttcagatttatgcaactcagaaaagaaatcaactctagaatcattggagttatggagactggcaacccaatcttgagctttagagatattcttcttcatattaccatatttcttaacatgccacgcttagaggtgagtagaacattgttgaatattggtcacaacttgtcccaaattttggtgagtagatgaagtccaatgacgaacaacaatatcttcacattcaggatcatttaaccacaagatctcatatttaaaacgagatttttgctttggtgtggagtgaacataattcggctggtgagaaacaacaactttgagagccctatgatcaaatgaataatagtcaaggtgatgtaaagtagtataggggaaaacttgctgccagtgagaattagcaaaacaatagtccaaacattctttcatatgagcatcatcaggggacttattagtccaagtaaaaatatcatcatcatggtcaagccgaaccagatgtccttagttgatggcagagtaaaaattctctataagttcattatctcatctccaattttaagggcatgagagaagatcttattgaaatccccaagtgttaaccaaggatcttggggagcaacatcaactagccttcttaagacttttcaagtttgttttcaaaagtgagaagcaggggcaccataaaaacttaaaaaaaatgccatttaaaaccactatcatactgaacatagcaagaaatatgattcattgaaaagaaaaaacaaggttatattaagatttcctttccatattaacataagaccacccccaagaccttgtctaggaacctcaatctcattagaaaaatttaaagcttcacgaattctattaacagacccagattttaatttagtctccatgaggaaagaaagatgaggagcttgctgagaattaagcaagcgcagttgacggaatgcttgatcattcctcaaactacgagcattccaacctaaaacattcatggtgattggtggggttgctaagcaacaactgccaagtcagcatcatcatcttcagcagtatgtatagattgctcatcatcaacaaggtctgcttcaaaatcagttgcagtaatggtagtaggatcagaactgggctgcccagtagatgactgaagaaaacaacgtttaagcatgttacaaaaagagctgccaacttgaacagttgccttttgaaagtctggttagtggtagtgttaggggtggctataaatggtgaagtaacaggtggcgaagtagtatttataggtgatgaagtagtggttataggtaatgtgttaggggttatatgtgttgttataggtgtttcaattatgggtgtgaatagacgattaataatattttggagagaaggaggtggtgttggggtgttagtgaatttttcccaaggtgcaagagggaagttgcttgcagcaaggagactagtaacaagagcagtaggggagatggtggcttgttcaattgggcgaatattgtgtggacgaggtgggagggttggggtaagagggagggcttgagtgcacgaattacggaccaagcgagtcataagaggccaagcaacatttcgaccactgctattaaatgcaggttgaccattacaccttctaggcaaagggtcctcttcatccaagggccataggacagagaagtatcccctcccacatattcagcttccaaaatttaatacgactcaagtaagtatgtccaaggcgaccacacttatggcatatatcaggaagtttctcatatttcagaaccacccataaatcatcaacaaaaccagtaatcttcaaaagactgccacagatgaggggttgagaaacatcagtagagatacagacacgcatgaagggtccccacccttcctcaagagagtcatcatcaacctccaggaattctccaacaatcgacccaatgatgttagtcgtaaccttggttttgctaagaaaaggcagaccatgaacctatacccaaaagggaatgtgagtgaaatcagaaataacaagagtagacaaagcatgagcagaataaaagacaatcgactgattattgaaatgtcaataactagttgattgttatctcatattgttttgttcatatttttttattttcttttaatttttcctacaaaataattatttcagaaaaaattatatttttgtaattacaaaaaaagataaaaattaaaattctcaatatttggaagactcttcttctctacaaaatattgggcggttacttcttactagggatgcacattttccctataaagatcaccccgcagggacctgctcttaatgaggcggagattttccgtctaaatgaggaacggggtggggacagagaacatttttgtccccaaatattaaatggggcggggatggggataccactccccgccccaacagggacgcgtttaatttattaatattttatattttataatatgtgtttgtattttttagtataattattgtcatttttataattttttaagttgtatttt

SEQ ID NO: 69487 - DNA, 6649 bp, Cannabis sativa
agtagagcaaccacccctattatgtctttcattatatgattctctggctctcggaatggaactcccctagaaatattgacaagaactgcagtagaagagttacttatcttttctatttgctcgatcacttcctctttcgttgacaaatgatttaagaaacccaattgatgtgtttcggtagaatctagaaatttcacagcaaatacaagatattgtaaattatacttcaattgacacaatcttaatataggaaaaacatgacctacaactagtaaaaaaggtccaggccatgcaataaagaaaaagagtgtcttatccatcgccatataggtatagctattagctacatcacactcctttacaatgataatccaacatataaaaaggaaaagctaattagctatagcataccttgcaattcttttatagtttgctcaatttcttccctctttttgtttaacttagcatatttctcttccactgcttggattgtcaaaccaattttacatatcttctcttcaaggacctgcagtgaccaaaagaaacatatgaaacctgaaatccaactggaaatgtgttcaccaaggacagagatggagacagaatatactttggaaataaacctgaaaatctacccttcctaaagccagtgaaaagtaatggtgaatccaagccaagacagagacagcatatactttggaagtaaattaaaagtgacataatattcacacacttgtacctttttctttttctccatggacatgaaatagtttactccaaatcgattcattgaactctggtcctgaagaagcaaagtaagagtagatgaaatcgtattatgctccaacttgggtgtcagtatcgcaggtttgatcatatgaacctgcaaaggatccatattcaccacagtccgagctgcacaagccttttttctcattgaggtgtagtcgtccaagtatatcggtctctttctgtttgcaaaaggctcagcttcttcaacatcacagtcctgaccacccaccggtgtctgagtatcaccaagtgaaacaatctccatcaaagcagaagtacctgggtcatcaactacgtaattttctggaagattgtcttctacgttagaccgatcacatggctgtgttgttggcctctgaagatcttgtatcatgctcattatggtcttcatttgtcccataatagcagcttgagtatccttgatctcagtttgaccgttcaagattctactttgttgcccttccaccctttccaacctatctgccaattgtccgtagtttggttggtcagcctgactggaggatgctgttgtggctggtgcaggtggtggtggtggtgggggatcaacgggaaagatgttagttgactgtgcaaactcagctacttttgcagcctgtctttgaaattcggactggtgggttgtactatcatcaccctgtgtctcatcgacgcccatgtccacatagagtggggcatcaccaactgtaaggccctggacatattccgactctgctggacggggaaacaagcaagccatgacattcaactgcgaaaaaaaaacaattccaaaaaacagatggtaaaatatcctcttaaaaataaaatatttatatatatcgagttctgatcaaactctatcaaattcagatcaaggctcaacctcttggtcaacctatcaagcacgtattgaattctatcgagttcattaagtcaaattgaaaaaaatacaataacaggaacatattgagcacatattgaactaatgcaatcatagatacataatcaacctcttatcaaaccccatcgagctcctatcgaattcatgaaacagattaggaaatctaagtgtatagaaaatatagaatcaaacatgcaatgaatagttatcaaattcctattaatttttcagaaaacagaatgcaaaaaaaaatgtaaaattttctaaaattatgaagataatacaagtaaatcagcaagaaattaggttacctttttggcaaacaagggggcaagatctatctttgcaatgtctgtcttgcttgtccaactaagcatcctagggatctggttgccgtatttgacaccataccttttggccagctccaatatggactcgaacgcccaatattgtaaggccggggcatagccatacacgctatacttcgactctttctgaactcctttcttgtcggcctttttgtcaaagtttttcttcttgtgatgcatatctttctggcaggagcggattagcttctcaaaagacaacttcccccacggatacttgaagaaaaactcaacatcatcaacgagcttaatcatgtccaaccaaaccaatcgatttccctcacgagcgtacaaaacaccttcaacaaataaacacagtcccaacttatagacatcattaggaactgtgcaatctgtgaattcttttagaagggcatctaaagtgacttttgaggaactgttgaaatacaccatcaacaagcggtttgatgtgagatgggcagtaacctctgcttctgatggtccttcggtaaaatttaaaccagttataagagcaaactctgtcaatccgaatctacactttgtcctaccaacgtaaaattgcacttcctgttctctctcggcccttatcttgtgcagcatcagctgatgcaacaacaccccggaaaacttcagctcgccggccatgaaaaactgttttaaaggagattctttcacccttcctatcaaattgtaagcttcaaacttctctttgatcttggccaaaaatccactccccctatatgtgacacgaccagtaaaatgctgctcaacaggaattatcaatttcggagccatctgcaaaaacaaacgaaaaatagaaaatgaataaacaattctgccatatacatcgaatttacatcaaacttcatcgacttcatattggaaaaaaaaaaaaaaaaaaaactgcctatatgcatcgagtttatattgagttccatcgaactcctatcgattaaatatcaaaaaagcaatagagcagtaaaactgtaaaacaattgaaatcctattgtcaccctatcgagctaacattgaattctactatcttaataaacaacacaaacatattgtacccctatcaagttcctatcgaaatcctatcaaactttaaccatgttcatcttcaacctacacatttgaattaaaactgaccactatcgaattcatcaagcaattatcgaataggcatcgagccacttgaatctagtacctactgaattttacttaattaaaaaaaacggcagatttcaatactcaaacccagattcaaatgacagtggaaaactaactcagattaaatataatagcatcaaataatttagggaaaacaaaaaaaaaaaattatttcaataaaatttaggttaaaattgaagaaacaactacaaaaatccctagaatacactcacaatccattctctctctttctctctctctctacaaactaattttcagagaccaaataccaacactgtatcataataaggtaagttaatacaacgtggtagttgaaacagaggtacaaaaatttcatactttcatggaagaaaaaagttttttcaaaggaaaagattattacagcatgcatatcaattaaagctacaaaaaattccatatttgaacaaatcactgttgtcctacatttcaacattgtcctaaacccaagtaataaaaatattaaagatataagtaattcatttggggatgattagaacccaaaacttgtgttattacttttacttattaattagggcttgctaatattaaccattttgtatttagaagttctctaaaacttttgctaaaagttctttatttctttcaaaaatgtaaaaatcccaaaaaactgaaaattaaacaaccttgcaaagatttccaaaaaaaagagtatgtagtaaaagcacattataacatacacattcatatcaagttcattcattacaatgattaacatgtataggtactaaatgcagatatatctatataatgatcaaaagcttcatttcatgctgctgatcaatgagtaacttattatggatttaaactgacaaaccttggagctcaagctttgaattggtgttgtccaaaacagaaaaaaaaaaaaagctttgaaccggtcagacagagagagtgatttaggagagagaaagtgaaaccctggaaatttggatgagagaaagagaagtggagagtgtgagtgagtgattgaagaaagtaacttagctggtaagctaaaaagactcaagtctagtctatagtctagtagtagtaatgtttttttcgatgaactagtctagtactaatgttaatgtaagagaaatgctaaaagacatcctatgattactattttttttttttttatgttacattattattggtgtaattaattattggatcttatataatataagaaaataacttttaaggaatattactggaatgccaattgtaaaaaatattaggcaccactagtgtctaatagcaatacacttaatttaatactaagagcatctctaatgggggttgtccattagagtaattttgccacatatgtaatgtagttcaatttttaagactaattttatgtgaagtattgctacaatggctacatgatatttttttttaattttttattagaaaaaattatttttatttaaaaagacattaatttaacgtgatgtggaactatggtggacaacatttagagttatcaattattaggccaactccaatgcgtcgtggcccatgagaaactgtcagacggtaagctacgggtccttctcaaagttgtagtccaatcaatccctacatatgacatgagttgtttccgtctacctatctatttttgcaatcaaattgagtccatgatggccaatttttggtggggtttgaatgaaaatggatcaaaaatacattggcgctcttggaaccttctttgtaagtccaaatcggatggtggcatgggttttcagtcttttgtctatttcaatcaagccttattggctaaacaagcttggcgaatcctagaataacccgactctttactcggtaaggtacttaaaagtagatattttcctcacaatttttttcttgatgcaaccttgggtcattcaccatcatacacatggcaagaaatacattagggtagagagcttcttttgaagggccttcgctggaaaattggagatggaagaacaataaaatcaggctttgacccatggatactggggcataattctttctttcatatccactactccggaccatctaatggtgttgttgctaacctaattacagatgagaggcaatggaatgtccctgttttacaacagttttttactccattggatgtggagagaattttgactattcctataagcttcttctcaagcaaaaataccttaatttggcacaatcaccactcagggatctacacggtcagcactgactaccacttagcagtagcccttgaagaaatagatcaaagttcgacctcaaaaaatgcttcatcttggtggaattttttctggtccatgcaactacctcctaaagttaaaatttttacttggagagcaatacatgatgcacttccaattgccacatctttggttaaaaagaaaataataacagatgcaacctactctgtttgtaaacaagtgtgggaatcggttagacatacactcttcagttgcaaatatgcccgtgcagtttggaggcactctgaaatggtctttgattggcgtctatcctcctcaatgcatgaaggtgactacttataccatctgtccacaatttattccaaagctgaaatggaacaaatcatgtgcacactttgggcaatatggactgaacagaaccgtgtggttcatgataaacaagcaaaactagcaaaggacacggctaactatgccataacatatttgaaaaacttcagatcagcccaacacaaataccattctgctgcaacttcagaagctccaaaccagcagccgcgacaccagccactgcctcctgctcctactcctcctgctcaactgtggatgcctccatctgctagtgctttcaaattgaatgttgatgttattttcgatgtctcacggaatgttattggtgtaggggctatcctacaagattcttgtggcaaagtgatagctgccctctccaaacaagcaaaactagcaaaggacacggctaactatgccataacatatttgaaaaacttcagatcaacccaacaccaataccattctgctgcaacttcagaagctccaaaccagcagccacgacaccaggcactgcctcctgctcctgctcctcctgctcaaccgtggatgcctccatctgctagtgctttcaaattgaatgttgacgatgttgtcgatgtctcacggaatgttattggtgtaggggctatcctacaagattcttgtggcaaagtgatagttgccctctccaaacaagcaaaactagcaaagacatggctaactatgccataacatatttgaaaaacttcagatcagcccaacacaaataccattctactgcaacttcagaagctccaaaccagcagccacgacaccagccactgcctcctgct

SEQ ID NO: 69488 - DNA, 3950 bp, Cannabis sativa
aagaaaagctcggtcagcttctcctagggtgcgacaattacacaatcaaggtaattcaagtactttatctgaaaatgacattttaaacaacttttcttcaaggccccctccaaatcctgctgataatgggattctcacaactattatggcccatattgggcccacttatgagcaaatgatagagaaatcccatgttgacttatgtacctctaggcagcctcacaaacaccctgagcccactcattttccctgccatttatgctgaagaaattggtttgactgaggaattgatgggccctcctcaagttgataaatttgaactattacctacactttttcatgacccagaggacgtgtctaatttgatgcacccttgtcctcaatagaagaagaggaaagctagtcttacactaattccttatgtccaacacactgctgaaaatactatggaattctcccaagaggtgcctaaactccatgaattctcctcttcgttggatactccctttaatctgggttcgggcatgtcttcttcttccttaaagaatgataaacgaagaaggaaagggtctcgttctagacaaacctcagtaaagaaaagggtaattcaggaggcaacgacaacttcacaagatgaaactagcagaaaccttattgaatatctcaaccttgttgaggtacaagtggaaagctcccaaaaatttttctcaggcgaggaggcggcccttatcaagtcccccagccccatgaagtgcctttcgttgaattgtcagggcctcgcaagagacccgaaaccctaagccttaaaggtttgggttaaaaagtacaatccgtattatatttttttgatggagaaaaaagtagaagaagatagaatggaagttttggctcgtaacctgggattttcaggtacagtttgtattagttcaaaaggccttgcgggaggcttgtgtttattttggaattacaacataaatcttgtagtcaattatgcgacagatggtttctttgaagcaacagtgtgggatttccaaacttagattcattggaaattgtttgcagtttatggtactccttatgcacaagttaaggatgccttctggagtagtttggaaatggagatcaaccaatgtcaaattccttgggtaatgataggtgatcttaattgtattgctaatcaagaggagaaaataggaggcaacaaagttaccatagccgacacaagatggctgaagaatttccaagataatacgggatgcgtggatctccgctttattggcaacaagtatacatggaaaaataaaagattcaatggtggactgattagagagagattagacagagcgctttgctctgttaattgggtgacagaatatgcttgttcgggtgttctcaacttacccatttcaatctcggatcatgctccaataatcttggatactcatctgtttgcagcaagaggctacatcccattttgcttcttcgaagtctggacttgggaaacatcgtgcagggttgaagtagcaaagtcctggagttttacaagcagagatgcaactgattctctgttgcgaaatgttagcaatacaagaaaggctctacaagtatggaaaagaacactgcaaaatgttaatgttacagatatcaagaccctggagcgaagactagaatggatccaacagtaatccatttcggcagcacttaaggaagaagagtctagaatttaagttcagttgttagcttcttggtcgaaacaagaaagcatgtggagacaaaaatccagggaaatttggcttgctttaggcgatcgtaatacaaaatactttcactcagccacggttattaaaagaagaagaaacaatatttgggcaatcaaggacaaatatggaaagatttggaaggataagaataatatagcaaggataattaaatcccatttcttggagcttttttcttcttctcgttcgacaactgaagatgagtttgatgatctttttgttaagtgtatcactccccattcgaatgaggaacttgtgaaaattccatctgatgaggagataaagaaggttgtgttcaacttgcatcccttgaaggccccgggacctgacgggttttcaggttgcttctttagaaagtattgggatatagtgggatcttgcctttgttctactgtcaaggaagttttccagagtggttacattgaccccagactcaatagtactttcatatgccttattcataaagtggagttccccttgaatgtagatcagttccgcctaataagcctttgcaatttctcttacaaggtaattgtgaagatcctctccaacagattgaggccgcttatggaagacttggtatccccttttcaatcagcctttattcctggaagggggattgctgaatcctccatcctcacgcaagaaattattcataaaattcaacataaaaggggcagggggccttatggctattaaactagatatgcataaggcttatgacaagatggagtggagttttctagagaaggttctcagtgtaaatgggttcaatgaaagaagtagacgacttctgatggcttgtgtttcaagcgttttttattcggtacttttaaatggatatcctctaaagaagttgcttccccaaagagggttaaggcaaggggatcccttatccccgtttctgtttctacttttccaagaggtgttatccaagttaataatcaaggctgaagatcgaggatcggtacacggaatcaagtttacacacacctcccatttctcatctcatgtttgcagatgacaccatcctttttgctcgtgccaatgaaattgatgcaaggatgttgataaagtgcctatcagtttacaagaaatggtcgggccaatcgtgtagtaagtccaagtctggggtattattctctaagaatttgaataatggaaggaaaaatcgattgcttagcattctcaagattgatcatattcgaggtgatgagaagcatttgggcaatcctttcatattcaagagaaggaaaaaagaagattatgtgaggttgaaagagagcatgactatgaaactggagggatggaagatgaaattgctatctatgctgggagattaactctcttaaaatcagtggcctcttcgatgccagtctatgctatgcctacaaacaaaatccccttatcttgttttcgccaactggatgccttaatgaggaaatattggtggcttgtcaatgttgaaaaggatagattcttggctcttaaggcatgggatcagatctgtactccgaaagcttcggggggcttaggcctgcgaaggtgcgaggatatgaataagacattgttgacaaagttggcctggtacctggcaacaataaagagaagccttggggttgcttgcttgctgaataaatactacaaatatgaaagcttctgggttgtaagtccaaaaagcagcgactctcgtcaatggaagggtaatctggagtcaagggatattcttttcaaaggatcgatgtctatagctgccttggggatatccatcaatttttggaggtagccgtggataccatggacggaataccaggaattctcagacctaatgcaacagatccagttaagaaggtacacgatttctacgattgctgatgtttctttaggtaatgattggaatgatgatattatattccagatttttggccatgatttggggaatcgtatacttcagattcctagaattccctatcctttttcggaccaggtttattggaaacatagtcataagggtaaattttctgttaaatctgcctacttcattgaccaatcttggaggtttgcaccagaaagactcatttggaagtggatttgggatggggggatccatccaaaaatctctgtgttattatggagaattctcaacgaagctattcccacaaagaatagact

SEQ ID NO: 69489 - DNA, 4884 bp, Cannabis sativa
tagagaccctttgtaatgtggcatgatttttaactaccatttatgtttggtttaaaaacatgccacatcattgtatgcattttgtgtgtatcaaagtgtttctagcattactgttgagttgataccaaatatattattatacattcaatcttagaagagctttctgtgatgtctttttgaaacaaattttctgtaatttcttaagatggttaacaaaattattacatgcaacttgcaggtgcaaagcgccttgtccaagttggtcttggagatgatgaccaatgcattgaggatgacttcactgcctggtatttttcaattgcttctgaatgaattacacattaactactacattttagttcttgaataatgacaagtcttttggcattgaatgatgtttataggagagaattggtatggccagaattggaccagttgcttagagatgaggatgatgcagctgttaccaccccttacaccgctgctgtattagaataccgtgtcgtatttcacgaccctgttgatgcatcacttgagaagaagagctgggctaatgcaaatggacacgctgtttatgatgctcaacatccatgcaggtattttattaatgatgcttttcttgatattctggtgtaatttgtcttgcattagtgcaatttaaatctcacctgtcacttgttttctccatgaagggctaatgtggctgtcagaaaggagcttcatacccctgaatctgatcgttcttgcactcacctggagttcgagatttctggcacagggctttcgtaagttgctttttcctggctactttgtattctttggtgtttcctccaaaatcaatggtttcttagccttattgacttgtgtgtctttcttttccagatatgaaacaggagaccacgttggcgtctactgtgagaatcttccagaagttgtagatgaggctcttaacttattgggcttgtctcctgaaacatacttctccatccacaccgataaagaagatggaacatctcttggaagttctttaccacctcctttccctccctgtaacttaagaactgcactgacacagtatgctgatcttttaacttctcccaaaaaggtttgtctttacaactgatctattagtctgatttaagtgaacattaatcttccaatagctaattgttcctgtgcatttattttccagtctgccttgctagctttagcggcccatgcatctaacccagctgaagctgatagactaagacatcttgcatcccctgctggaaaggtttgtgaataacatcatctactgtggcttttactcggtcctgaacttattaccactttctgttcgatatgtaagtttttattgcattaatacgcaggatgaatatgcacaatgggtagttgctagtcagagaagtctccttgaggtcatggctgaatttccttcagctaagcccccacttggtgtattctttgcagcagtggccccacgtttgctgccccgatactattcaatctcatcatctccaaggtatagatttttgtcacttttctgcattgcttcaagttattaacctgttcaagtaaatacttctttctgtgtacaaaaacaagctacaagccttctctgctacaattttttttttctattaactagttttatatcaagagaaaaatatttacaagtacagcgtagttaattaagtctatttgtaagcgaggcagttcttattatgataggaaaattttagtctttgatctcgttctgtgaatattcgatttcctttctttttgaactcagtgcagtgtacttaccctaaaatattttcaacagaatggctccatctagagttcatgttacttgtgcattagtttacgagaaaacaccagctgggcgtattcacaaaggagtgtgctctacttggatgaaggtatgttctgtaattttcattggtaaaaccttattaatgcaatgtttgtatgcggtagttgctcatcgtcgccccttttcatactaccaaaattgtttaattgtttccatcatcatatactctatatgtcccattgaatttcaaatggactgaagaactgatctggattttattttcagaatgctgtgcctgctgagaaaagtgatgattgcagttgggcacctatttttattagacagtcgaacttcaagcttccttctgatcctaaagtaccaattatcatgattggtcctggcacgggattggctcctttcagaggtttcctacaggttcaatttgcacactagatcttttataaacttattcaacacttattcacaaaatcagggaatataactaatacaaaaatttactttctcaggaaagattggctcttaaagaatctggagcagatctgggaccctcagttttgttctttggatgcagaaaccgtagaatggtaagcgattccccttatatacacgaagaactctcttctgttggcgaggtttaataattagcactgaatttttgttcattcttaatcttccaggacttcatttatgaagacgagctgaacaactttgttgaaaacggcgctctttctgaactagtacttgcattctcacgagagggacctactaaagaatacgtgcagcataaaatggcgcaaaaggtaccccacctaaccttctttaaaatgacaaaaaatgttgttggtggtaggcaatttaaattaatttgaaatataatcatatgtttgttcgctttgaattcaggctgcagacatgtggaaaatgatatccgaaggagcctacatttatgtttgtggtgacgctaagggcatggctcgtgacgttcaccgaatgcttcacactattgctcaagagcaggtatttcaatacgaattgttgtgtactaaagctagaatagaattagtgtcacaaactgatgtactaacaaagtctcgggtcctattcgttgattacagggaccaatggacagctcgaaagctgagagcttggtgaaaaatctgcaaatgaatggaaggtatctccgcgatgtgtggtaaccccataaaccttaaaaagggaatgaagaactattaagagttttaatgaaatacataaaaaaaatattaaatgcataaaacaattggccaaaccaaaaaggccaagttggtgtagtagtaaagtacttaaaggggcttgttataattatgatgatgaagccttcttccattttgtggtctctttgaaaatgggcgaaaatcgctcctgttgcggttggtatagcgctctcgcctctcggtcctctggtgattcttttaactctatgtgaaatttttttgttcttgtaatttatatattatacgaaacacaataattatgggctaggcatagtcttttttcttttattttttctttttacttttattattattattattatggactcttaaattttcccctgtattatgaaccacaaaatatggttctaatggcagaatattaatggtcttgtttttcctatttttgtaatttggttacatggatgtattatattcaagtttgttatctctctattctccttttttatatttgcttaatacaattacaaacactattagaacatatatttttcgtaatgtaggttttccaatatttttattttgacaagtgttactgtcaagtgaaaacatattctgaaatttttatttttattttttttttataaattattcgtaattttgtaaaaatttataaaaataataatataactaactataaaacaaatatttcaacacttgaatggagtacattacttatttaaccaatgaaggaattgatgtcatactttggtaaacttaatttttgcgtattcaattcaaacaatcaattttatatgtatttggcttttttattttcttattaatccaataatcgacaccaaattaaagttttgtgaactataaacttaggtttgattgagttatttttgttaactaattaatcatgaaacaatagacagtctcctccttggtgcatactccatataataattagttaatattgaaaataaaaaaaaatacattacttggtaaccacgaaaattaattttattggtttttttttacaagatttctttcatttttttaaataaaataaaataaaatattggttagagggagtagcttcattgcttctattactaaaataacaaaatattaacaataaataaaaaattagttgtgtgatttagaggataatatacacaactaccacaaaagagacctggctaattttcaatttgacctgattttagtttatttttatttctacttaatttaataataataaagtgagattgatgagatcaattatcaatgaggccaactggcttctctataagtacttgttaagttattcaaaaactagtttaataagaaattaattattaaataatcaatacatcaactagagggttaagacttgtggggttttatttattaattaattatgaaaaattatagcttgattcactatttgcttaaagaaaattagtaagaagacattaagactatttgatttccacgtttataatatttaatgaattttttttttgacaatcaatcatatgatttaaaaaaggtaattgtgacacctttttgtggctaatcattatttaaataattttttatttttaaataataaaaaaataaaagatattttcaaaaaacatatttactaatactaatttcatctctcttccttattagaattaaaattttaaaatttttgaaaataaaaatagttatttttaaaatttatttaaataatttgcggtgtaaaaatttaaatttaattctcggttgcagataaatgcctaagtttaattttgggataattatataagacac

SEQ ID NO: 69490 - DNA, 4761 bp, Cannabis sativa
ttttgaaattgaaatccaaacactaaatgaaaagcttaaacttttacttctcttcttctagtgtctaaaagtaaaagtataagttatgccaaacaagccctttgtgtgtgcagatgtaccactcgaagtctgttcagtacggtcctccagccaaatgtaaggaataatagacacgtgtcactagcacatattgccacgtcatagttcaaaaaatagtataagagttctctattctcttattattttaaatttatttgatttactctattttttatattatttactaataaagaataatgaattaattacaatttaattcctaaaattcaatatttgtgttattggtttttaattaataattatagtaataataattaaattaaacaatgtgagtttatttttttttatagaatattaacatattaatcaactaatatttttttcttttaatacatcaaatataaaatttatttttcataacataaataaaaagtttataaacaacctaagggccgtatcgttgcctagtaccatataatactgttacaattttgagcctttatttaggacaaaattttcacatttgtctaccgtgacttctcttgatcgagcagagccactctcgaatgcacactcagactcagtcaggacccctccttttctctctcggcaacggccaaagctacacccgcccgactccactaagccacctcaccaccaccgactgcccctccccagctccttccatttccacttcacttcaccgggtatactatcctattcctattttcaaaatagcattgttttcggaatgatttcactgaatctcatatgtattgtattgttcaagaattttagttgtgagacaatattttgactattgaacctgatggtgttgttcagatatttggttaaatgttttagtgaaaaataattgtattgtagttaaggtgtttgattaaatgtttgaaagaaaaattgataatatttggatactatgagtactaaactactaatgtattatttatttttgtatgtagtacgaagaataagatgagtgattgaaagttttcttatggaagacttcatgttgtattttagtagattacggtgtggttttgtattttactttatcttagttgggacacaatatttagtattttggattgtaaacgatatgtaatgatttaatctgtttattaatttatgtttacgtgtttctttttcctttctctcagctcagactctttgcaatacatcagttcaggtccatctagacatcatctgccagccatgtcctatattgtgagttcaccactttatcaatacttatccagggagaaaagcaaagacaatgctaagggcaccttatggtgacaagcaccacaaaaagtggcatgttgttattggtgcaaattaatatcggatcccacataatttgatttattaaataatataagaaaccgctaactaatcgcaacccgccacattggtatggtgttggccaccatatgatgcctaatggcaatgctcaaaagcaaagcctcttctataagcattggatcagcagtatgcagatactgaatcgttgttcctttgagttgaatttatattttattgctgctgtacaatttcttatgtgttggaatgactatttgaatgaaaaaatgaccacctgttatggtgacagtatacgaatgtatgttaactagccatgttttgcagattcgcagtttatctcggcttggagtaaatagggtccgaaatttcaattatagctacagtacaatggtgcaagctgaaatgtctacccaaaggacttctcaggcattggtggaggtatctttggaaagatttaaattgattgtgcatcttaatattcttagtttcatgtgattatacagataccattcgttgtttaagtcagctcgtgcatattttgtttgccctgttgaaatagctttaaagtttaagttgctcatctatacttgatttcaagatgttaaaataaagttgttgccttatagttgtttctgtgatacaagtttttcccctcgtctctcctcatactcagtttatactttatttttcctcttatatagaatgacatactcttttacttgatcattgataaatgtcaaatgtcaagaattttccattgacgatttagtttgataaatgtcaagaattttccattgacaatttagtttgatcgagttttgtattctttctaataatgtcaagaatttcccattgacgatttgtttggaactatatattctagaatcaacacaacatccattctcctggtcagtgtctagatgaagacgacagagatgctgaaaagcagcgaatctcaaggaatatttctaaaagggagaagggcgaatttcttgtaaagacagtaagtatatgagcataaaataatttactctgcgtaatacttcgtctcattttgatcttgtttggtaataagaaggtttgccatatttaattcttacttgatcattacattgaatctttacgaatgcaaggaatcactatataatcttgatcatgtatttaattcatcttgttgctgtaataatatctttattttttatttgatcatgtttttcttttccctttcatgatcacttcacaaaaatattaagataacctcaacctttgcagctaattgatctcaaggacagactggacaataaggaatccgtttatggtgctcttgatgcctgggttgcttgggagcaaagctttccgatagcatcactaaaaaatgtgataattgctctggagaaggaagaagaatggcataaagttgtccaggtatgggtgattatctctggtttttattgcttgtgtggatactgatcttttacatattataagaacaatataggagaagaaaatgagcatattaattccgaaatttcttttgacttgaactactgcggacacctgacaatgcattattaccaagcttttgggctttttcaagtgtcaaaattttaaatatttacgtgtatgtaaaatgaaattatgattgaaaattttctgctaggttgactcccttttacaaccatttgtttgaaccatttcctcttttcagattttgtttcctgtttaatgacaccaattgattatccttcatatcttctaggaaaaaaaaatgagaatgcttatattcttttagcatagtaggtacaatattttggcttcgattcttattctgttggtagaccgtagtcacagttctctgtattctcttctaggttattaagtggatgctaagcaaggggcagggaactacaatgggtacatatgcacagttgataaatgctctagatatggataatagagtagatgaagcgcatgcgttttggcagaagaaaattggcatagatttgcattcagtttcttggcagttgtgcagacgtatgatagctatatactatcgaaacaacatgatggaaaacttggtaaaggtaggctttttcatgtcctgaaaagtcgaatggtttaaattcagttacgagtgataacagtttgatttttgttgagcccgtgctttacttggataaaatttggggttccattctatctagcaatgtgctagagtctcttacatcccaaagttttagttcagtgtatgatgtctgtaatgattgtttaacatgatgatggtttcttttgatagcttttcgaggggctggaagcttatgatcgtaaacctccggagaaatcaatagtgctaagagtagcaaatgcatatgagcttttaggcagagttacagaaaaggaaagagttctggagaagtacaagcatcttttcatcgaagatagatcacccaagaaatcacgaaaggcatcttctatgataaaaaagtagccatgtagaactcttcttttgttgcttgatggttctttagtaaacctgtgaaagattaagtattacctattgtaaatttttatgactggtggaatcaaaataaacatattgtatttttttggcattgattattttattggaaggaactagggcctcttacactcatttgtagaaataatcttaccagattcctttctccactcttcaaagactggatttcaactctcaactgcaaaataatagtgcaaaaatatgaggatttgttataagcatatatcaaagaggagaatagtagccttagctgagtcttcctagcaatgagtagacttctttaggcataaggcataatgccaaaaaatttgatagacaccgtgattagtagggaaatgtataattatcattgtattaagatggttattgactggagaaagaatagtataaataactgagttatagaataggatcggtatgcaaagattagagtaaaatctctctggatcatggagagctctggctctccaccattgtaaagagactgtctcataatctgcctatatctgctatattttaacaacagtttactatactttctagtctattctctactttgtctcataatttgcctatatttactatatttcaataacaattcacatagttcaactttcttaactggcctggctcttccacttgatacactttcactgagattctttgcaacaattgccaagaaaaaaaaaaaaacactttgttgtcttggttttttgacatagggcgacaaactcaatttctaatattcaatcttgcatccgaatttgaattgtgcaactatgtgaggagaacttattctagtgttgaacgatgtactgtca

SEQ ID NO: 69491 - DNA, 2118 bp, Cannabis sativa
ataataataataatttaaaaaaatggaataaacggcattaaattttttttatttttatgagtttttttttacaatgtttacaaaaatatgattttttttatttttttgaagaaattattttgtgagaaaaattaaaaaagcttaagtaaccagttaccaaggataagggtaacaagtttgtgcttttgtcatattttttaacttttttttttcaaataatatctttttttaaaaaaaggccatatttttgtataaattagcaaaaatctataaaaatgtgtaatttaattaggctctctcaaacagcctccaggtagaagaaacctaaacttatcagcatttttaatcaaaaacgtaggaagatgaacagcagaactggaccggggaattgatcccattttggttatcaattccttaaagctatactcttctggcaacatgtcaaaaagatcatcaccttcacaaataagtttttgaattctcttttggtccaagaacttcttacgtctcacacggtctgcatggctataaccagtcattttaaacccaaaatctgtaatgaaccgaaagcagaagctgcaatgccaccctgcatccgaaaatatgtaatctgtttggcgagaatggcgatagctgctgatataagggccagcatagatgtgagccgtggctcgccaactactgtagtcaacaggaaactcaaaagaatacatgtaattcttcaattcaagatgcataattggtggcacaccatcacaccattgaagaattttaagagtgttagcacttgggatttcatcagtatccgacattataatgatatcaccataagaaatccctgatttactaactaaagagtccattgctattcgttgctttctctctaaatcaaaggggtccttgtttgaacccggggttgcaatttctccagagaacacatcatggacaatcttctttttcgcaaaggcgaaacgagaccggtttaaagagaagaaaagaggttttgggatgccggtgaatgttgttttggactcgaggattaggaattttgttacgtatggtaagagctcgccgtaccggatttcgagcaagtctagctcgttgctgaagatgatggcgtcgaatatgcggcggggttttggtaggagggaccagccgtggaggtgacagaggtggtccattgaaacattttctgcgtagtaatgtggtatgtgaatgaatggtggtggtggatggtcccacatcggacggaaaaagtatgagattttctggccgtgagtcaatataatagtaaccacaaaaatagagacaagtatcattattagtatgagatggaactttcgtggtagtggtctcaaccttgatgatgacccatggcgaagtggtcttattattgccatgtatatacaaacccacctagtataaaattaaggtctctagataacttattttagttattgactactgggctcaggtttcagctaaataatggtatattagtaggtgttattatacgtacatgtttgtttaaattcaaccaccactatattatgttcatgatcatgatccaatacctacacacaatgaaaaattaatatatacattatatatgtataaagatgttttgtacgtagtcaataattaataattgaaatgagattctgtatacagtaagatttatatgcacaaattttataatttagtattgatctagctgtctatatccaaatcatagaagtgtaattaatgaaggttagcactccactaataaccctatgtaaaccatacataccttacccgaatccgatgaaatctctctctctctctctcttaataatgttcttttgttcttcgtttcagtaactgataatttgcttattttgttataacaatatatcaatgctccactacttaattaaaattacgaactgataataaattttcccagaaattaactttctaaagcatcaacaatcatccaaaaccgaaaatggaattattttatataatctatattaccagttcgaaccgataaatatatatatgaaaaaaaaatacataaatcatcgaaaagctctaaaagtcaacaaacaaaaaagctaaggaaaaatggcgcca

SEQ ID NO: 69492 - DNA, 5088 bp, Cannabis sativa
  modified_base (4681)..(4684): a, c, t, g, unknown or other
aaaatataaataaaataataataacgtgtcgtgtttgccactctacggggaaaacgcagtcgttttaacaaagaagcaaacagctcagtccaagtgcgctcttttgggttataaaatgaacattgtatgcaacaagctttctcaatattatcatgctctcactctaactccgcggctctttcgtctcctctctttcgaggcctttctcttcttctcgggtactataactatattagggtttctgtaaatcttcgatttaggctcttcttccctttctccttctttgtttttggtaatcatcgctactcatttttctccttctcccttcatctttttttctctctctgtcaattaggcattttgggtttcgatcaccaaagtttttccctttctgggtttgatctagggttttgaaattctttttgctgacgatttgatgttgatcaaatgagaatagttatttgaatcgtcatcgttgtttagggtttgttatggctaatggtatagttatatttgatgtgattttgcagggttcagatgtcttttgatctccacaagataaattgctctgcttcaagcaatttttggtggataatgaaccgaagactttggtgctcgtggaagattttgtttcgccattggacttgatttgttagcttattaccgttagttttattttttatttttatttttttaccacctattatttccagattattgggttgggttctgtggcgatagtgacttaataatgaggaaagggtttttggcaccgggattccggttccatcctacggatgtggaactggtgaaatactatttgaagagaaaggtattgggaaaagggtcgacaggaacgattcctgaagttgatatttacaagtacactccatgggaccttccaggtattattattcataaaaatggttttcttatggataattgtaaagttctgttttttcttttacttacacaaattattttgaatcagataaatctccaattaaggatttaaagtggttctttttttgtccacgagtgaaaaaatatgctagtggagaaagaatgaaccgggccgccgaaggtggctattggaaaactactggaaaggatagggatgtcaaacacaataatgaagttgtaggagccattaagactttggttttccacactggtggacctccaaaaggggataggacagattgggtaatgcacgagtacactttgatggagcagggtctgaagaacattggcgtcgttcaggtaaaatcttcttcttcttcttcttttttctggagcatttaaaactctatttattttatttaggatataaattaaggtagctgctttataggatgttaaaatcaagtgattgtgaatggaagatttcagttgacctagatttaaccagcgagttagagtattttgaatatgatgtcgctaaggggttttgcattgtttttaggcttgattttttgggatatggttaatccaaattaagtgaactcaatatctgatggccaaagtgagtctaagttgtatgacatatgtgtacatatatttttttgaagcaaaggaagaatttttagtcaaaggaaccatcaaaacaatacaaccaagctgtgagaaacacagcaacacagaaccaaaccactaaaaagttctgattatatcaagaatattagactcttttactatgtttagaaaaaagacaacccttcaccctagctttaatagccgacctaactttagagcttataacagtagccaaattacaaaaagcctcaaaaacacaagagtttctattacaccaattaaaatacatggtggcagcaatagttggatccttaacagcagccaagaaatctttttgaggatgctcataacctgatttccaatccattatgttcactagccaatcaaattggccaaaccaaccatgtacctccctaataacctgctgcgtgaagatacagtaaaaaaaatatgctgatgcaattcagtatgattttcacaaaccagacaactaagcgatgatccctagttagcaaatggtcatttatcgcttgccacattatgaacaggttctttggaacacaaagcctatgcacacatttctagagtaatgaactctttcagaagaaattagagataagtataacctttttacagaaaacttaccttttctctcagtgcctaccacatcagcaagcaccaaggtattttgaagtttgacaagcttttgaaaataccaactgtaatcatgtttgggaaggaaattcccaaagtcctgctcatttaagtaaatagcattaatccaaccaaaaaatttaggagcttcattccacgttttaccatctctgaaaccaatgctcccaaactctgtgggtaaataaacatgatcccaataagtgagatgcgatctgtatgaacaaatttaaaatgtcatatttcgctttagttgctcacttagtagtgcttcttgaacatacagtttatatgtgaatgttgataaaattttggtgtttgttgttgattcatttgaagctttctgttctgcaggattcatacgtgttgtgtgtggttttcaagaaagagggtcctggaccaaaaaatggtgcccaatacggtgcaccatttgttgaagaagactggactactgatgatgaaaatgatagctgtttggatgcggacccttttgctatcatgtctgtatcagatgttctgccgccgactacagggcatactgctagtagctcccgtgctcctgagagcatttccattgaaggtgccccagagactgttatgtctgagactactaatgatgatgacatggtgtcattattgcattattttgtcgaagaagaccatccccaattaaatgaaattaacaaggtatgcattttgcaactgccctttttatatgcatgtagtatgatattccaaacctcgtgtaaggtaggaatgtagattgtgatttagtttgctgcccttgtagagttccgaactttggaatgatgaaacttatgctttgtagggggggtgtcataatggtcttaatcttgtgaaagaaagtttataaatgtgatcaagtctactgtggcctgtaaataattataaattgtgcagagtgtatacgtgtccaattgttttacactgcatatgaatcctgttggactgtttgtttatctagatgaacatggttctgttggtcgtagttgttatatgtttgaagcatgttattcaaagtttcagcttttctagaatcaagggaatatctcattttctttagcatttacctggtattgtttgaatattttaaatgagtatctcttctattttaatgtttagcatggtttgcaacacatttgattgtggtaagtttattttaacattacaatttattgtttgcaggatgctactaattatctggctcagcagcaggttgcttgtcctgataatgatatcttcggaggtctgggcaacttggacaacctggctggtctaaattgggatccaaactgggaggatggttctatttctgctcacaatggtctctcctttctggaactaaaggatcttgatgcgccattgacacatggcttacaatcatttttgtgggattacgagattgggaatgaccaattcggtgctgatgctgctgccatacagaattggccatcacatgatgatcggtcacccaagtgaactttgctgtattatataacatcattagattgatgatttgataatcttttactgcttatgttatttctggtaatgtaattttgttttaattcaaattctgtttgattgactagtctagctttctatttttataagagaaaacaaggattcgctttcaatattttactcttctcattgcgaaatacatcaattcttaggtttattcttcatcgatatggatgatcggtacaggaaaatcagtgcgctcacgagttaaattttttcacttgttaaaactaccaaacgaaaaccactagttgctcgtaaaaaaccaattgaatctataatcttttacaaagagaaaagaaaaaagatgtacaagtgcagattaaacaagatgtctaaagtgaaacagtggcgccaagttagaaaggtgctgtggctacgtcccttgatagttctgcatgttccaattcctcgtttagatccatatctaaagcgccttttttcagtcccaccacactggccaccggttctaaacccttcaatccaaatgaattcaaattaggaaaagatcaatacaaatattgaaaaatgtaatgaaacaagaacaagagggcttacaaatctgcaattagtaaaatcaagatatccctaatcaacgtctttatattttatagaacttgacagagagcacctaccggtgaaaaaactatacaagttatttgtatatgatgcttattccttgttcacaatattgtctcctttgtcttgaccaaacaaataaatagaggaattggctcttatggatggtactctactactctataaaatatttatatttagaattaattaattcattaagttttaataatcttaaaaaaaaaaaaaaatacacatccattcattttacgattcgaacctttgcttgctctctcacttcaaaaatcaacttacctattatttgttaagcaaaaaaacaaaaaaaaaaaannnnaaaacaaaacaaaacaaaatacctattatttttatgttttgaaaggctaaatctacttattgaatacactattagtttatattttttacagaaactaggtgcgacttatactatgagcttgtttggcataacttatacttttacttttagacagtagaagaagagaaataaaaatttaaccttttcatttagtgtttggatttcaatttcaaaagaacttcttttctatttgaagagcttttataagtatttgataattgaatataaaagttcttacaaataatatattgggaaaattgcattggggaacgttatttgcattttatttataaaaatgttgccactgatttaattgatacacataccgcaactatttacactacaattatattaggtatacctat

SEQ ID NO: 69493 - DNA, 3670 bp, Cannabis sativa
acttttcaaactactaggtgctggttcctgtgtaataatacccatttttttcatttcgaaaatggtcacaagggtatgggatcttggttcactttactcgaagagatagaaattatgaatacagtctcctctcgtggtcttagaaaagtctttttacgccgtaaaatcgatgtacagccctactttagtgctttaagcattactgaccagttattactaaaactcaggttagcctttctgccactagaaacccaaagtgagcaaagcagatttgatcagttgtatttacaataatattagtagagacctcaactttattgctcatagtaatcccatggacttatgaaatgtcagagctataagtgctagagtagatcctgctccgtctaaattaactccagataaattgaataatagcttcacagagtactctattcaatgtgatatatttcttattcaattacgtccaacgttctctgtcttactcttcaggagggaatgggttctaaagctcaaatttttatttttcattctgtttttattgttcagtttggaacaattcgatcttatacatatgtgaatatgcacgcatacataaatttacagagtacaaggagcaaacaaaaagccccattacctcatagcttggaggcacaagaagtaacttttctcaaggcagttgctgcctttgatccagacggatgtcccaagtgactcgaaatgaattccccagccatgatgagcttttcgagatccacgtgagtcttcactccaagtccattaagcatgtacacaacatcctcagttgcgacattgccagtagctcctttcgcatatggacagcccccaagaccggagatagaggaatccacggtggtgatccctatctgcgaataaaactaacaagatttaactaaaatcattgtgtccaactatttccaattgcagaccttatcaataagttcaacgcaaaatggccagaacaaatttttgctatcctcatattggtactaagtaaaccaaaatccataaggatgatgttatatatctacacacaccaactggtttatgtctcttaaacctaagtcatgaagtctgcaaacctggagggagaccagtgtatttgaaagagcctgtccatatgtatcatgaaaatggacagctagcatatcaatagggacgacgtcaataacagctttaagcattggaataacggtacctataaagaaatatacaggcaaaagttaaacatcagactgggagggttgataaaccacagctatacattggagaaattaaaataagtgatcaaccaattaaattagtaagggaatttaataacatttattattcatcgatctaaacaggtgaccctagacaagcctagccagggttttggaatgcttctttgtccttaaagctaaaacatgctgaggggacagacagcggacgagataaaataacatccactaaatgagaaattttacatatgaattttactggacatacaaaaaaaaaagaaagaaaggggcgtaaccctttaagattaccaggagtaccgacaccgatcgtatcaccaagagagatctccgagcaacccatatcatacagttctttggccacatatgctacttgtgatggagaaacctttccttccagtggacaccccacaacacatgaaatgtatctaacaagattaatgtatataggtaaagggatacacttctccttttcatctcataaaaagaatttagcatgtaaattttttagttgattaataaacagaaccaaaaggataaaccatgctccagttgattaataagaatagcatttttctaagatctttggttctaatcttctaccaaaaagaggtacaagaatactaggtgttcaaaaaactaagcaagtagagtatttttaaaaacaatatatagttcatctacatgtaagagcatggaccgttagagaccacatacccacgaacaggaattgaaagctttttagcagcaagggcaacatcgcgataccgaactaaactatcctcaatgctacagttgagatttttttttgaaaaggactcggaggccgcagaaaagatggctactgccttagcaccagcagcaacagctgcctcaaaaccctacagaaagaacaagagcatgtcagtaattctatgctgatatcagtcagttgcctatattttgcataaaaaatattactttaagattaggggttaacacagggaaactagctccttcaacatcttgaattgcttccattacatccttagcatctgatagctgatagataaacaagatagcagtaaaacataagtccatcaaactaaagatgacaaaggtttagagctccaactacaattagcaagaatcataaactaaagaatctatgaccagaaaaatgagaaggtaaaataaatctgagacaagaagattcccaacattcaatgagagggaaagaaacttttgacaaaaaagaccacaacaagaaaaggaggaacaagtatagtaatatttttacagctctagcaagcaacgcagctacaaatgtacaaccaacaaaaagccaaaatgaaagtttgactaacatagtgaaattcatatttcaacataattacagaattttttacctgtggaacccattttggtgagacaaaacttgtagcttctacaacttgcaaccccgaagagactagcattttaatcaattcaacctttacagaggtagggacagttttcttctcattctgcaatccatctctcggtccaacttcaactacctttacagattctggaatatttctaagaacctgcagcatcaatagattaaaaagttgcaaaatccatgaactgtggagtgcaaaaacaaaaattgaaacttctatcaagagataactagtaagaacagaaagaggcaaagaaatgtacctaaacatattaatgagttagaacattgccattatatttttttttccatccctcctgcccaatattatatcattcaaagtgatttttccaatgaagtaaactggaccaacaagcaaagttaatacaaaatcaaaagcaccttatttgttaattcccttgcgcctttgttattgacgtgagagctataatgacgaacagagaaattttcagcatcatgcccataaccaacaatccatctataattccatccgtgatgtgccgattcaccatttttcgtgataccaaattgagacacatttctggactctctacaccacttgaacacatctcttgcataccctttactgaaaaaaaaaaatacaatgaagaagttgggagaaaaatggcatctgctaacattggaaatttcctaattttctcaaaattgacttttgattgctaaatcattttaagatatcttaaaactcctaactgagagaaaggtaaaaaattggttttcgaaaaacataccttaatagtttacgcgaacacttgctggctagcatattgattcagaaacagaagagggaaaccactgcagaagcaaaatcagtataaaagaagttgagccttatttctaaaatctggaattcgagatagccaaaattgagaaaattataatctcgcatccattacttacagcagaaagaaggttaatcaaatcagagaaatttgcagtgataatt

SEQ ID NO: 69494 - DNA, 3659 bp, Cannabis sativa
atagaataatacatatttatatacagagttaggagactaaatatctactaaatatctactaaatatctaactttcttacagctaatatacatctaatatctaacaataactttgcaactgttgaaaggcacatactgtttgatgtctaaagaagcctacttaacaactgtatcctatgcatacctgagctaacgcatttctcaagcatttcatcaaaaactgatttagcttcattgatctgtccagtcttagcaagtgcattcatcaataaacagtatggcatctgaaaaaagattaatgatatgagcatacaatccaataagaaaaagaaaaaaaaaactggagctaataaaatgtgtggcattcccaacatgggatcaaaaggaaacgaaaaaagatttttagtaaaattacctcatctttggcgaaacccttagcttgcagttcagctagcagttctctggacttttcaaacaaacctcctctgacatataccttgagtaaagttgttaatatcacctgaaagaatagagtacagaaatgaagaaacagtgtctttcaactatgaaaaagtaaatatcaatctatgaagcaaatgaaaagcaatttagaaaagattatgaaagcaagctagcccgaaagaacaactaagtacaaatatacttacattaatcaaatatgtaaaaaatatgtttccttcatttccttttgaaattatttcccattcttatttagactgcaatgtgcacttatagtaaataaattccttcgggctcatacttcaaatatgctcgaatatgtatgcaaagttaaataagacacttattgaaagtttacagagaaatagacagaaactaaaagaaatcatggaaataaatatatatatatatttaaattaaaaaaaaaaacattattgcaagcaaaaccttgtttggaggtaaccctgtcgactccatatcttgaatcaaaatgtcagcctttttatagtctccgcacatagagtatgcattgagcaaagagctataatggaaaacgtttggcgagtggccttcttctttcatttggttaaaatacctttctgcttcactcaatttattatgtgaagcacaaatggccagtagagtcccataaataacattgtccatctgcacaccattttgctgcaactcctgaacaagttccattgctatagaatagccttgtttagctttgatacatcctgaaagtaactaaagaagaccaacaattgttagaacgcataattcaagaaaactgcaattactatgccaagtattttacttatcgacatatatctgataagacaatggcattaatatcagatagctaagaaattgttttagaaaataagaaaagcctaataataaattgaattgttaaaacaatgacaataatatttttgagagtgctcaaatcaaatcaaatcagtgggttattatgacaagaacaactcaatatgaagttatcaaaacaaatttctcactccatttaataattcttgattttttttttcctgcctcataaaaccataaaaggatgaaatgtaccagacgacatcagttaattcattaccaatgttgaagataaaattcattcatcttacatggataaacacactgaatagcaaattcctggattctgaacatgaaaacaaaagaaacaaattatagacatgagtaaaaggcataccgtactatatgtaacaacatctggtgttaaaccgtcctgcttcatctgacaaaagaacttaatgctgtgatcaaacttgccattcctgaccagactcccgagaacagaattgcagatgacgatattctttttggttgattcatcttgaatgctattataaacatctaatgcacccacaggattgtgattccctcctgtgaactttatatagttgctatatgatgaaggacaaatcttcttattttgttgcatccaatcgaagcactgcaataacagcaaacgaatcatacaaaaaattatacgaaaataaccgcagttattattcaagaattaatgaaattaaatcaacaatagcaattacaccatcttctattcaaaaaatgagaattatgaggtagctaaaagaaaaaattacaaacacacactatttatatacttatatgcagaaagaaatgtgtataaaaaaagatattatgccaaattaaattattattattattattctgaaaaagatacgaaggtcatatgtctaagactaaccacctcccaaatttattagggagcgtcacttatggcagagtaggagaactaatacacatataggtacataaacactcatataaaattatcatctaaccactttaaaaaaccccattcttaaacacatttcattatcgctaatcatatatttaattaattatcgaaaatctcggtcaacaatgctcaagtaaactagattaggtacataaactctcatataaaattatcatctaacgaatgtacaataaaagagtaacaaacatattttctagttctccactaaaataaggaaaagcagaccatgaaattggcaaactaagaatctcaaaaatctagtttgtgtcacgcttaaatcatttattttatttcatttcatttttttttaaaaaaaaattgcattcatgttcactagcatgtatgaggacaaagacacacacaggaataacatatgacttgaggcaagttttttttttttttttttataatggacttgagggatggtaaatgggaaatatgggcgacaccattaatcttttttcttgaaaaagagaaagaaaccacttgtcttagactgtcctcccccccattatgtatttatatatacatatatatttgatatatatgtgacctttgtctattttcaaacatatataagtgacacacttagtattgcatacaaagccagcttcatatgttacatcagattaagtaaatcagttaacaatggagtataatttgcaagatatggcacctgggaaagtttgctccatctctttcgtattccaaaatgtcgtaatattgcattcaagtcctgcacctttaaaacatctccatatctgcaaaataaggtctcatttaagttgcaacttattggttaggttagaattgttcctttcttgtcactttaacagaatttcactaagaccaagcagtgatgtatataaaataaaggaatcacacagttcttttttttttttttttttttgacacacacacagttcttaaatacctctatcaaaaaaagaagaaaagctatatatatacttgaaggcaaaattcaacactgaaaattcttcacatgtattagctaaatagattactgaacattcacttaatacaagaaagaccatataatcaatgagctaaatttttaagagagacaactctcattcaaattttgatgttttcttgtatcatgttccactaaaaaagtgaccccttctgaactttcttctgatttgatacagaaaaagattaaaaaaatttaatgcccacgtttcaagtttaaattatttcatggtccatacaatataaaagtatagaatcatcattcatggttcaggcagaatttcagaacaaagaagtaacaattcccagatatgaaagaggattaccttgtaagagcagaatcc

SEQ ID NO: 69495 - DNA, 2453 bp, Cannabis sativa
agcaaatgtggaatgtatggccacgacaaaacaacctgcatgaaaaatagagaagagaatataaataattctgatttggacatatccaatggtgaaggtgcatatgaagactgcaatatttggaaaaataatgaacataatggggttttagaggaggaatttgcgtttgatgaaaatataaaatgttgggaagatgctaatcaaagaaaaaaagaaacacctcaaacaactgatgtagaccagcacaaatttgatgcagcatatgtagcgaatgaaagaaaggaaaaagatgatacagagacaatgagaagttggtggggagcaccttatggaactcatgatattcaataaagtggtacatcaaagtggagaagtaaataagaagatggactaatgtttatagatcattcctgttttggtttttgtttagtgctattactatgtttttttaatcaatggttttcttttcacattttcaattatcatgaagcaaataatagttgtggttgggggttgggttagtaacctttctggtttctgccattttttctctgaggagttggcacctcttgatgtcagttaagactttattttgttttgctctgttgtgagccttttggtagttaattaaatgagttttttaataaaagaaagtctcaaaataagatacaaataaaagcctgtgtaaactatcatgtttctgcagcaattatatgacttcattttcttgatattaaatgtggatcttctttacaattcgtgagttcttttatatgtgttggacattcttttgattactgatcttgtttttggtagaactttcctatgattcttgataatttcaattgcatgatgtgtattaaccttgacctatgaatatgtgttatagtgtgattgatacaattctttattttgtcttgtcatttagatttgtggttatgtcattctcaaatattccaatggctaaatgtaacgaaaccgatgacatatggaatggccctattaaaaatgataccagctagtattttaagaaaagattgaatctaaggagaaacacggatgagataagactttgtcaggctgtcaaaggtgggaaattcagagctaaaaggttctataaccagctggtggaggagcaagaggctgtgtattcagggtatgtttgggataagctcattgtcccaaagtatagatttctttattggcaaatagtaaattcccagctgctaactagggactctttaagctgaattttggcgattcaaaatgccaattgcctggtttgtgactttgagtttgaaactcatgaccgtgtgctttttacttgtgtttatgctaaacagggttttgaagacataagtaaatagctaggttgtattcattggcccaattttgttgctgagttgcttttaaggttcaagactacgcctcatgattttccaaatcgagtttagaatgcagttgttacttctgccttgtatatgatttggtagaacagaaaccgatacatcttcgagatggtgtgtactgctgcaagtagactaagcgaagatgtcaagaaagttgtgcaaattagagttaagagcaagggtccttatgaagcttgtaaaaaaaaacatgtatttttaatatagttagcagctggtatttgttagagttggggctgttgctattttttgcagcagcgtttgtgcttgttgtgctaagtttttctcagctgactgtattggttggttttttgattaaaataaagtttctcttgttaaaaaaaaaatgtaaccaaactgataaatacattgagatttggagaatgaagaaatcggtgctttacagagccacagttgagcttcctaagaaacatggcagaggagggcaatcagcgttgcgattcagccgtcatataatggagagccgccacaactatgtgaccaaaactggagagaaagcagctgaattgtttattgatcaaaagaccaacatgcctaatgtggctggacttgttcttgctgctctgcaaatctgaaggtcgacattatgtgctgcgtttgaccctcgtattagagaccgagggggctaagtcccattgcatctgcagattaatttcataaaaagagtagtacattcatggtattaatttaaaaagtttaatacacatattagacacatgaaaatctataacaaatttaaaatggtaaagatgacaagaaacatgaatttttgaaagaggtacatgtgtaatgagcctttaaaattgtttattacttttcatttaaaattgtgtttcatttgaataataatttcaattattaaggttgaaaataatgccaagaaataggaaagaaataggagtgtatatatttatatacaactctttaattgtctaaaatttttgtaacatgaaaaaggagtatatcatagtgactacattttgaactttcctgtacattgcagcg

SEQ ID NO: 69496 - DNA, 5220 bp, Cannabis sativa
  modified_base (4238)..(4239): a, c, t, g, unknown or other
aaaaaaaaaaaaaaaaatctttgacttttttttaattaaaagaaagtctttttttctacaccattacaacaatatacaattactataaaaatattataatttctacctacaaatttaatattgtcatttaattagtattagtgtttaaaagttcttaatatctttcaataacattataccaagtaatttctttttttttatggaattttgtctaagtgcttcgataattgaaatggggtattttattagggtcaattaatgaaatttcccaaagtatttaggaactttagcaacctcaaatgcgcacgagtgcttagtattataataaaatattatattgttattaatgtgattaaagtattaagtctttacttttttttttcgatacaacttggtaccaatccaagttatatttagagaaatctcattggtttgtaagggggtgaggaaggggattggtaatgggtaggaaacctttttgtttcatgattcgtggctttcgaatggttcaattctgagtctaactagtttgaatcttggtctgactaatgaaaaagtaagtagtctttttatggtaggtgagaaagtttgggatgttgatgttgtcaagggtttgttggatgagaacgagaagtattcttagtattcctctatctaatttggtcttagggattattggtattggaattttgattcgtttgggggtatacaattaagagtggttttaaattgttacaagtagactcaaatggtagtgtggattgggatgttgcggtgtttttgtagtctaagacttcctccaaaagcaaaaaaaattgtatggatgacaattaatgggtgtattccaacaagagtacagttgaaaactaaatacgtggatgtttctttgttgtctctggtttgtcataagggaagtgaatcaattttgtattgtttagtttcttgtgatttttgttcaaaattattagtggatagctggtttgtggttttagtttctttcatcattcggcgactagttctttcacttttttcctctactaggtgaggaacaaagtgctcaggcggtgatagtggtgtgggtaactcggttcatgcggaatcaacttttgtggaggggtaggaaaattcgggtggagcttgttgtcaatttggttcatatcattcttaatcaatggagaaaacccaagaaagaagttagtttcctgagaaaaaagcccaaaaaagaagtttgtttccttcaattgatacatggtatctttcggatggggctgagctatggtctaaactaggtttcgaaaaattcaaggtgaatattgacgctgctctcctcttttgacgaggaaggaagacatggttttagtgggattattttggatcaccgtggacgggtggtgactgagatttttaagttgcgatatgggcaagttctgccaaaaattgctgaagtcgtggttgtcaaggaagtgcttttgttattgaagcgtgatttcatgggtgttagtattatcgaatctaactgtctggtgttggtacaagttattcaaatttgaatgtattgcaatccactcttggtggtatcattgaggattgtaaacttctatcttcttttagtgatgtttctttattttttgttaaacaatctgttaattgggtcgcttaccttgtgactagagcgtctcagttacatgttaattgtattttttttgaaatctaatcttttttatgatgttgatgtttttgttgagaccgagttgatctagttgaataaaataagacattgcctcgtgatgatgttggacattagtgtctaatagcaatattcttgatttaaaggctgcttacataatattaaattacaagtttaatgttaattaaagaaattcaatttttagtactctacaaaaacactaataatgatgcacctttaatatttttgacattcggtagatataatatagttggaatatgaaccaacctgaattatacaaatataaatacatctagataactcgtctcgggaagtacagttggtagaaatatatgaactcaccctcttaaagacaatggcgagccacgaataataactactgactgatgagactagcgagacgaacaaagaaggtccatctcagaatacacataatacacaacaaaattgtttggaaaaggtagataatgaattttccaaaaagcttgcagctcattgacccacatactcgtatgttgaaagagtaaagataacaccttcaacatggttcacttcttaattcttagatggtgataaacgtctcacttatgccttactcgatattaatggaagaacgcaaggaatactactatactcagacattgatctgtgatcaaacatctaagggagaattgttacattgtaagaatgatgaatcatagtcagtataactacttacagattacgttcaaaaaagcagttatgagaagttacttgtaattaccccatgcgatgaaaatgtgaaacgtggagattgtccacatttcacgaacggttacaaatgataagatcccaaggaaataactatcatcctagactcctataaatagggacagaactcagggaacaagagacaaccaatgtaagaaagagagagaattataccaatttttcattctgtaaacaatttattgtattctgtatacaaatttatcaatctctgaataagatggactcgtggactatgaagagttaacttaaaaaccacgttaaaaactctcttgtcattatttatttattattattattattcacttaattcctgggtatattaattacaaaaaggcttatttattagttttagaaaatctaccttaataatttagtactttcattgagagccttgtaataaaaactcaaaaattatcctccttgagaacatattcaaaatttccatccatggcagacgatactccttaaaacgaagagaatcaaccaggggaaacaacagcatccaaggaaagaatatgagaattcttgaaggacaaatgaaactgagactccccgctcaagagataagaaatggtggagaatttgagcaacctgaggatgaaatcccagagagacaaagtgaggatgcctataaagtagtgcatttaatgtgatagttaaagtagtgcattttcataaatgtaaatggggtaaatattatttgtattttttaccaaaatacgtgagaagtagagaatatttcacgtgtccacaagatatacgagagcacgtggatgatcaatattaacataataaatgctcagtattatctttaaggcatgaggaatgttcgagagtgcgcgattggccttaaaggaactctgaagtcaaagtcaagtgtttccctctgagaagatgcaagcctctcagataacatagcatccgggaattggccatgtgttccacacgattctcaaggtaaacactgtaagtgactacttcaacgcaggtaataaagtaaacctaccctccaaatggagatatcattcgaactcagtccatactgttctgacgttatgttttcccataaatactaattgacggttaaattcttgtgatgtcccatcaatcgcatacaagacaaaccttatctcaccaaactccagctttagagcttaccattggtacacacggcaaatatcatttcctacacctagtaaaaaggccatgtagagcctagacgtaaagagaatatgtacccatcgtccaaagaatatcctattttttaaactataaatgcaaagagaatgtaatgggaaaggggattcaaaaaatagagagaaaagagaactttgaaactgtaatagagaatatatcctcaagcaaaagagatatttctcattaataaaagtgactcgtggactacggttaatcaacacatgaaccacgtaaaaatactattctctactcataattaatttcttaatcaaagatttaggagttgccaaaaatcttggtcaacaatattataaaaaactctttttttatttttaaaataattctgccacatcgataattatttaggcttaaaagttatattatcgcaacctactcttcaatgtgaatattttaatatgtgtgaagcatatattttttttccttcaccgaaaaaatgattggaaatatatgtaactttttaattacttttctattaaattactcattgataagttgatattttgtcttataaatatgaccaatttatgtattaatattcttnnattgattctttaaattatttattagtgtgattataatttattagactattttaaagactaatcatgaatttagagtcatttagagagaggttagcatatttggattgaaaatagtggaacccaacgagctcggtttgataagacagaatttaattatacatttctacaactttaatggtagagttggacttggagttcaatatgaaagttgtagatctcgttctcagttttccgaatcatcttgaatcgtccaaaatactaatttgaacgattgtattgaggaagttatggccagaatactaatttgaacactcgacataattttttaaccaacaagttgttgtcgcgatgatggaactcgtggctgcaacgaggatgcaatttctgcctgtttttaaattcttatttttttcttaaaatgagatatttttaggggtatttataggacttttaaggtttgcttttagcaacttttgaactacgaaattgaaagagaaacccagagagagagcaagaagaatacagagattgtggcatcgattgttctacatcatagttctttttcttctccttaaactcttactatttattatgattttgattataatgtctagttccgaacaatttcttttttgttaagggttatttcaaaacccgaggcatgagtttttaattttattgatgaatgttaatttttagtttccattatatcaaattgcttctatttttttatagtcaatgtcatgattaatgttttaatcttgtttagatgatcactaaattaggttttactttaatctattgtcatcttaggattattattcacctaatagtctaggattctaagtgtatatgataaattacaatttctaatattatcaaaggtattttagttgtaatgaagaataaaacctaggttaaatgaattatatattttattaatttattgcctagattagtctatctccataaattttaaag

SEQ ID NO: 69497 - DNA, 2065 bp, Cannabis sativa
taagggtagatgtgcagcccatcatttcagatgttatggcttcaatcattgagccataaagttagcccataagaaaccggttcactgatgatccaagcctcataatctagatttggaccttgtttagaagaggttgtaccatcactagttgattggtcacgggaataaacttaggaggacacaatgttgttccatttaggaaaccaccaagatgatggccaccattgcgcgccgaagggtgaagttattacagtccaactccacaacgaagcattggctaagagtgctgccgaaaggagatattggtgctagttgactgctaggggcagaggaggagctctgtttggttgctgaagattgtatagtaaggtgcatgtagttccatctcaaaactaattgacaatgagaggagtagcccatgcatcttatatatggtgttatctttccacactttagtaatgtggatctctctaacctcaacccttaagatggtgactattttttactcaccaatcttggacgactcgatcacaagtgacacatttggcccaccgaatcacaagtagattttttggttcgtctttttggaccgacgaaacttggcttacaacgacactttttggctcactatccccaaatcataaactgctttttttggctcgtctttttggaccggttcttagatttggattagatactcgttagatttttatttagctttaatactatgttagaatttcgggattgtatgaaaggtgcatgaggttctatctcaaaattaattaaaaggagaaacacatgtatgcatcttatatataatgttatcttttcacactttaaaaatttaaaactctctaacacttgttgaatgtgcaagttcatgatgaaggcgaagtgagtacactacatcaaatagttggaaataaaagtgtaacactcaaccaaaagcttgtaacgagttaggcccataattacttaaccgccatgatctggtggaagattgtatgtaaattctttttgtcatcctaaaaggaagataattatgttaaaatgaaggaccttcttcctatattaaaacaaattgagtaaaaaaactcaagccaactatcataattatatttttatccaagatgttacatggcgcttattatcatcatcattatctagaaagaaactaagacttggataaagtatattgagacatagtagacataatattcatatcaatatatattaatatcaggtataatattggacccaacagaactgaaaggcatggctataatagtgctagcaataacagtagtactagcaagtagtgtagtggtgtcttatcataactaatcacacttattacctagctagttattgccaatagtttgttggctgtttggttgacaaagatcttccaacatcatttagttgtagttgttatgttcatgtttattgactttccaccactcattttattacaacttttctggtcatgtctctttgcctttctcttgtctaataacagtgttattgatcagtaagattcccttaaatattgcattactaacaataataatataacaagaccatttgtcttttatcctagctagttaatttatgtaccttatctatataattatgatcacatcacaggatcccattgtataaaattcaagtaatttattcccttctgtaaaaataatttataagtaataatgagacatactacatcaataatttatagatggcattttgttatgtggttcagctaatttgttcttcaaatctcatgtttatattcgcattcaaattaatggtaaagcctcacctcactttccctagcagctcgttcataattttgttaattgatttttatgtatgtatatactatataactagactaataaagttttgtagcataagcttttttattgtttctttctctttatgtctatatatgccatttttacgtgtgcacctaattaattactatttttttttctttgttactttttgatggaaatcttcagaaggattttgcatgttatatcatttcaagaaataaccaagc

SEQ ID NO: 69498 - DNA, 2305 bp, Cannabis sativa
gagagagagagagagagaagggtgatttcatcacatgccatgattggggtcatgaagagcaaaaaccagatgatgagaaggaaaagagagtgggcttgcttattagtattactatctctccttcttcttgttttactacagttggagagcagtgcatgttttgcagaggggcataatgggaaatctgtaagattcagaagtacagtgtccagttctcatcataatcacaggtctcgaaatgcaagagaagattataacaaagatgaagtttttggtgttgagaagagaaaagtgtacactggtccaaatcctctccataatagatgagttagttactattaatcagatcaaaaattacttctgtgtttctcttccctttttatctgtcaagatatgatttttttttttctctttcttataaattctatcataaaagaaatattttatgaggcatttttttttattctggttgaggctatggtggctgtataaatagtactgttcacaggaatggttcaagtaatcttacagatgtatatgattttttttccctgtgagatttccggtgagcaaaatatatacttgtttagttctttatttttcttaacaataaaaaattatatatataaactaaaaaacaagtcctacttagataatgtgagaaaaatatatatttaaatatatattccagcagatatttaggtaatgtcatttatgatgtagttgttggtgttataaatatttgtctggttttgctttaattggtaggtaggtttcttctatgcacttaattcatcttcctagttatgtaatatgtatatgtaaatagatacaggattacacttactttgacctcaattattagattatctttaattgcatttagtaacaacaaaaagtgtcatgtatgagtgcatggatatgtcttaagaagatacaaaataaattaacatttgtaataatatacaaatatatatatatatatatatataaggttatatcataaaactgtcatcaagtagctaggaggtaataaatttatgaaattttttattattaaaataattttgtgtatattgtggtatgagaagattttgtaaatgttaatattttatattgttagttacgtaaatttataacctatattcattaatgacaatcatagtagtattttgtaaatcaataaaataaaaggaaaaaaggttataatatttcttttagactgtcctcaatcaagattctagggtgatagttaggataagtacatgtagatgagcagtatgaagttttgcgataaattttatttagtttaacaaaattaaattaacaattcgtaataagaagttacaatgatgaagcaagtagacattgattgaatttgtctaaggccattcagtcatcttaatttctatgtctagaatgattatgagtgtaggccccactctattgtttgatttattctgctctttgccagccaaatgtccactataggatccttatatttacatgcattttatattctctagcttcataatagtgtgtcaatatatttaaactttggtaaaatatatatatatcttattttatacgtgaacatacattatatgcacatatatatatggttatgatatataagaattgcaagttgagaaataaaaaagaaaaaatacatggtatataacaggacagtttaataaatgatattgtgtattagacaagagaagattgttttctttgcagccaaatcttctgtcccaatttttctctgtctctctatcccaatctaattaaaatgttccacctcaatcaaatgtatatcactatttaatagaattaattaatttaaagactattttagttaaaataaaatgaataaagacgctattttagttaaaattggcacctcaataataaagacccttgaataaaataaaatgaatttcatttaaaaaaaaaaaagaataaaataagattttagttaaaaaaaaataggggtttgtttatttttacacttcaaaatatatatatattttgtatttttacagaattctatataaaaactcatattgcaactagtgctacaacctaacaaaaaatcgcatagaatttcctattgcaattggcgctgcaaccactttaaaactcaaaccgtaaaattgaaaaaaaaaaaaataacagtatatagagtaatatccataaatattgcggatgaaagaaaaacaaactaaaagtcttattgattgaatcaatggtctgtacaaagggacatgtatatatacagtggtaatatgctgtaacagacagc

SEQ ID NO: 69499 - DNA, 2977 bp, Cannabis sativa
aataatttaatataaaaaatatatatcttcttgctttaaattttaattttttttattatttattttaatttattgttaatcatgtgaaaaaaaatatattaaaatattaaatagtttaatattaaaaagtaactaatctaaaataatcgatccaacttgcatttttgtgagttaaattggatcggagttaatatacggattagattggatcttaattatgaaatccgcatttagtgcaattaatactagctacgaatgtgaaaggacttgcttgcttgtgaggccagggcaagtgcctttgttcttgcatccatcattgcccactccctctctgcccgccgctgatgttgcctgatattttttgctctttttggagccaatctgttgtccctttccacaaacgcaagtctaaatttttcagccatggacaattcaactgggcttgagagaagaggaggcatagcctttggaactgatccgtacaatacccatgttttaggatcgatatcctcaacagctggatcatcgagtgcaacatctggtaatgcttcccttggaactttggtccctctgaaaccaaaaggcgatggtttaggattcacaacaatccgtgggcactcggttgcatacatctccaaagtagccttatcaatttttggctgcaaaaaaattaggcagcgtgagaaaagttaaataaaactaaccaacaatatttatatctcaacatcagaagaaatatctttccagattcattaagtaaatacccaaacaagccaccgtaatgattttgcaccattaacaaattctgcagtaacaagttcttcccaagaatctccctccatgttatgtagttttggtttaaatatgtccaagcaccagcgtgcagtgtagtcactcctcgggcaccctctgcaacattaactttggttcatatcctgttattagatttgtaatactagtcaaaacaccatagaccccaactcattaaattccatagacaattattgaaacaaagagcagtttgtgatgttatttaaatatttaatcaatacgaatacaacacaatggtgggaaagggtaagtcaagtaggttctaaaaatggttaaagtaaaaaaaaaacttagttaatttcaagatgctagtttgttaattatatacctaaagacatgaaacaaaaagaaaaatttgaactatgtaataaaaagttctcattgtgtcagccaaagatagccaatatgtcacaaaaaaaaaaacgattcatacaacaaatactgaaaatcaaacaaaagatattctgatttaaaaagagtacccgcatcttaacgtctccaacgaatgacaatgctgcactagatcagaaaccccacctgaagtaattctggtgcggctgcagaaaacctgttttagtattactgaactccaatgccaataaatttcttatatcaaatattctaatcatataaatccgcaaagtcagggaatcaaacataacccatatttaattgattacgcagttttaacaaagcagtaggaaagattaacagatttcacaccttatatctacagctcgtagaaacttgcagatttcagccacttttaccaacccaatatctgaaacatctgaaccagatatgtcaagaaactcccaggaactatcagctagagatacaataacctcatcgtttagcaacttccttcgtctggcaatggcagccattgcaatctgtcattcagaaaataatcttaagaatcaacccaactttgtttaacaacacatcaacacagagaattatcaaatgcaagctagtgtactaatcataccaacaacaaaaaacgaatgttcttttgaaccagtcacattaataaattttacttaagaagtatctgtttaagtacgaatgaactcaactgagacgcaaattctttcattaccaaccaaagtgctctcttgtatcttcaattaacaattttatcttaaatatccgaaagaaagggggtaaaaagtcttacatttaaagtagaaaagatataatgacaatataaaaatcatttaacataaattataataactataaaaccttaatatcagcaggaaaatttccggcaatttcatctaaatctagaattatatcctccaaatgctttccaataagtccaaggcacaagctcactaaactcgggggccttctcttctcccacgtttttcctgttatcaccgtaaatatacataacaacagttaagcacatatatatatatatgtatgtatataaatatatatatatattcatatagagagaaagagagagagatgtactggagacatgagaggtcgtgatggggtattgagaattggatccgacattaaaattgagtttcgttagagaatctgtaatagccgatagagctttccccttttccatcaaaagttaaaacttctcccaatttgcagacggaaggagctccttcttgccgactttgaataatagggtatgttatagagtcgagatccaagaaagtcatgtgtattttcggagcactgctgcaccaatgtgcctcttggtgatactttataattagagcggctaatttaattttttttttaagtattataacaaatagttatttaaaaatataattttaacatataataaaaaaattatattatcttattttatattattataaataatttatttattaaaaactaaatgcataattttattaaatattatttagaattatttattacgaaatttaaaatttattatagataattttttaaattgttttgttaaaagaaattatttttataaaaataaataaataagatgatatagaaaaaaattacggtgtttttcataatacattattttcatatctcgatcattcaaaactattattattattgtatctcacttgttgtctcattgtatctcacttatttttaacaccgtatctgttgggttttatgccct

SEQ ID NO: 69500 - DNA, 1765 bp, Cannabis sativa
tctcatttcccttttcaaaatataaatattatctcttagctcaagtttgcattttgtgtgtaaaagtgtaactaaaaaaaaaaccaagtaatcaatgagtatagatttcaagaatgtaagtaaaactattgtctctggcattaattaatttaatctttccaaccttaattaagtttattatatgtttgttttaagattaaattggttttatgtgttgttgttgttgttgttgggattggttagaacaccatgaatctatatttataagaaaatttcaattctttttatgagtagttacttcactacaatgattttgatagatttttaggatgaatacttattggtttgtaagagttttaattactgtttgaataaatagattcagcttgttaaaatttttatgaggagagcttgttcctcatctttatgaaagtttcgatttttcgatttttatgaaagtttcatcatctttgttccatgttaatcaattatatttatgagtaattacttcattgcaatgatgaacactacctttgttttccttcaaatttactttaccatatgtttggaagtcggattttagtgggaaaaaagaaaatgtaagaaaaaatgaaagtgaaaaataaatagagaaaaacttgattcaacaaaaaatttcataccaaatatgaaaatttgagtttttattgttctacattttccttaaagtgtttgctatgtttaatgagaagtagctctattgtttgaataaagagattcagcttgttcaaatttttatcaggagattttcgatttttcgatctgtttccatttgtggatgcttggagtacagacactttatcaaaatgcagaagaatcatgatatatctatgccttggaacaagtcttcatcaatttcccatattgattccttacctaaacttaactcattaggagcattgcacattaatggcactgatttcggtaagtggcctcatcagtcattggttggcataaactcttctgcaaaccaaagtttgcttgaagaagttctagcaattaattggaatgattctttcaaaagtcttagtagtaaagagattaaggaaaggaaaaggcgagaaaagatcggattagcaaacaaagggaaagtgccttggaacaaagggaggaaacatagtgaaggtagtttggatggattcatagtgttgatatttgttttaagtttcgaaaccccatttgaatggtttaactgatttgtggtttggacttgtgtagagactcgtgctcgaatcaagcaaagaactatagaagccttgaataatccaaaggtgaagtcatgtaagatttatttaagtttgatatgttttctgttgtgatgttagttgttaaacaaaacataaaaaagggaaaagatttgatgttttttcggttttgttaaggttttgttaaagttttatacaggtatttgaggagtatttgtttcattgttgatgaataattatgttcttttcaacattttcaggtccggaaaaagatggccgaacatccccgtgctcataggtaacttcgaaatccttgcttgtgctctttagagatgaaaactaagggtacgtttggtacgcttgcattagagtgaccattctttccattttcggaagaatagccattccaccaaaatagcagaaaagtgcataaaatcattgctttactatttcattttattatctcgaaccaaacgcaccccaaaatgcaaacttgatagaagacgaataacagaattgta

SEQ ID NO: 69501 - DNA, 3156 bp, Cannabis sativa
aattagataaaagtccttaaatttaacaatcttaatagttcatagagtatttttaacggccaaaaaaattcataaacataatttagtacgtgtcaaagttggagagttaattagcaaaaaaaaaaaaatatatatataataataattaaaggttgacgtagaattaaaaaaaaaaagtcaaattagaaaaccgcgtgttgcgtgggggtttcaatataagacaactcagctagtgtccgatgctgacgtcatcactttacaaacacaatattctctctctttctctcttctcatagtctttttttcaacccaatttaacccaaaaaccatcatcaattcaattcactcttgttttcttttctttctcaaatctgattgccatgtcagattccgggaaaatcctccaaatcccggaaaacccaccctctttcttcaatcgttctctaaccatgtcatcatcatcttcaacaaccgttcagcagaataataataataagcctaataataacaacagcttcaaccgcacaagctccttcaagaaactcatcacctcggtagtcgaaccaaaagtgaagaagctgaaaaacatattcttagaagccatcaaaactacgtcgtcttcgtattccaacgaagaagcagagaaatcaataggacctcgtttggccggaacagaggatcgaatagtggtgtacttgactagcttaagaggagttagaaggacttacgaggactgttacgcggtgaggatgatcttcggtgggtttcgggtttgggtggacgagcgtgacgtgtccatggactctgcgtatagaaaagagttgcagacccttttgaagaggaaacccagtttgcctcaggttttcataagaggcaactacgttggtggtgctgacgtcatcaaacaactctttgaaactggccaattggcccaaactcttaaggtatatcttatcttatgttatctttttatttatcacgataatgtggagaagtttatgatgaaaaatgtgtattgttacacttttcttatttagaaaatttagtatgaactataaaagcttagaaaattagaattaccaacaaattatatttgtaaactaagaaacttagaaaattttagattctttaaattgtaattaatctagaaacttgtagtattaaccttagcttactattttttcatactatcatcttcaaaccattgtcatttactaaatcattaactactcattaactactcatcaacgtcactacttcactattttaccacaacaaaccatcaaacacataatccatactaaaaaaatcatgtataaatgtatgaaaaatgtcttcgttcttgatggaattgagctcactaaagtgagtgttaccagtcaagtactcgcgtggtgtcatttggttcggatttatattttttgctgggctagtatacatttttgcacctttaaggaaatacatttcctttatctctattatcattggattatgattgcattaatctaatgattgttaattaccataagcaaatttacatcaaaacgaactttaggtggaatgactattaagaaaaattgaataaataaaggaagaaagttcactaatgaaagatgaaaacaaaattaacaaattttcaatgcatattaatctttgctcggccattgttattcctgttcttattacctattcttttgtttttattactcccaaccaaacgtatatttaaggattttcgggttcgagaagcagtagggtttgtgtgtgagagttgtgcggatatgaggtttgtgccgtgctggaattgcagtggaagtaggaaagtgttcgatgaagatcaaggatcgctcagtcgttgcttagagtgtaatgaaaatggcttgattcgatgccctcgttgctcttcttcttcagttaatgtataatgctcaatcaaactgagcatcatcaaattatctcttttcttcccatttttggtaataatgtaaatatttttagtattgtaatgattattttgtatggtgaatagtgagtttatttattaatttcattgcccttaactgatgttcttcactagtattgtgttcaaatcttatacacttccatatatttcaaaaggaaaagacagtacagagtaaagacttctcatgtttatcttttccttttgaactaactgtttagttagggaacaaggatttaaaacttgggtcacttctcttatccatgtttttatgtgctatttattattattcattggattccagtcaatgtggttttttttttatatctatttatttggtcctgttttgggtagctggtgagattaatctacttttcagttttatcagccttttgttgaatgacattactaactatcattgagaacaatttttgaattgatgatatttaatttcagtcggtggttaggtcattgcataactaagttttaatgtatttatttgtcaataaatttggtttagtgtagtgttagcaagcaataatcatacaacaaagttctggtgcagaattaacatgtcatacattaacaattcatctttaactattcttgagtttaatttatgcaattatatgaagactctgctcaaaatgacccatgactcatcatatgtcaccaggtcccatggtaataagattttttatgcaaaaccaatttttctggttataaatattccaactccagaatagacttctttgttttctactattattatctgtggttagaaaaattctttagatattattacattcatccaaaacaaaatcccaaataaaaaatcacaaagactaagacatacacaaatatctaaatcggtaactttattacattaacttgtttttcttaaattaaaaaaaaaaaaaaaaaactaataaagatttttacctcctaaattttgacatgtattaaattatgttctgtgaattattgagattgttggatttaaggacttttatctcattttagtaaaggaagtctaacataaatgaaagttcaaggaatatgatttggtacgttaaagtttgaagaagataatttaataaattttaaagtctaaggagtataatttagtacatggacaatcattgaattagtaaaattaaatgaaattagacaaaaaaattgggtaaataccattt

SEQ ID NO: 69502 - DNA, 3663 bp, Cannabis sativa
agttcttcaattgctgatggatgacatagcatcaggatgtacaatactcctcatttaacctcattactacttcttgataaaaacaattttaattgagcagaatgtaccaaataattacgagatgatgagtaaagttcacactgaagcttctcctggcccagttcgcatccaagatgacaaagaaccaccaaatgtccaagtgccacatacgtacaatcagaggcatgatgcatatgtaaacttcaatgagcagagtgtgagaccgacatctggttatcaaagaagttcttctacagatgttgcacccagcaaggcaacgacatctaatactttccatgcagaagtgagatcatcaggtatgaaaactatttatttgtggattatgacttttgcttactcatgttagggcttacctggtgatgcttctcaaatttaaaaaatttcttagcttgtttcttacataattgattggatatttgggctgctttatcttgcaggccatgcgacggaacagatggaatataaacaatctgtgtctggaaatgagaatgctcattccatgggtagacagaactggaatatgcaatttaaggatgccacttctgcagcacaggctgctgctgagtcggcagaactagcaagcatggctgccagagcagctgcagaactttctaggcagtattcctcagaattacataagtcatctcagggttccattcaacaagatgaagaaccccaagtctatgcggacccaaagttgcaaagtcaccatattgccaaacaagcagaaaacaatgcttttcacagaaggaattctggacaccacgagaagcatatcattgacaaagaacgagagcagctttatgggacagctgaaaggtttcatagagacagttataagaacagtgatagatgtaacaatgcagcttcctttaagtccagtactgcttcaagtgatgattctacagtagtgaatagtctccgaactggggacagatattcccaaagaaagtcacctgaatctgataagagcgatttattagatgaagtgagtaagaggaaacataaagatcattgtgaaattgagccatcttctgaggaaattgctttatttgatcaaaatgcaactagaaagtattctaagggtgctccgtctcattcttattcgagctcttcaggtgatgataaagaggatgttctaagaaagaatgagaatgttgcttattttgaggatgtggaggctgaaaaaaaatctagtcgggcttcgtccagatctcattcaagcacctttggtgatattcatgaagacatattcaaaagaaatagtcccagtgaaaatccttctcttcacaatgacggaagtatatatagaaacacttcagaaataaatattaatgacaatactttaatgtttgatgactatagttctgatgaggataacaataaagttgatctgggtgattataagggacaagaaacaagctcatatttttcatccccgattagaaaaccatctgcaaatctttttgctgattcaactgtttggtcccctagacatgcagatgaggaacttagaaagtctgctgtacagtcacatcccgcggagttttctgaaagtttgaaagattctagtgttgcaccacaacaagatgtattgccacctgcagcttttgatgattatgatagccaaggatctgactgtgaagaagatttgggaaagtctaagttgcttggaggtgcagattttgataactttccttctgaaatgaatttgaactctaaaagttctgagccattccaaagtgaagatcatagtttaggatcatcttcttctgaggctggaggatctagaagaaattcatggctgccatccacgtcagttgatcaacgtcccaaggaagttcaatctgatagaagccaaggacatgaatctagttctgtatctgaaattaaatttaattatgcagagctctctcctaggcttatgaattctcgattggattcaacggctaaggacacactagaatcgtttgatactacaaaagacactgagcatacagaagaatatacttttgaaagtagtactcaggagttgagttttggggcactgaaaggtggtttgcggaataagagtaataggcgtccactgcatatgaggaaatcatcagaaaactccttgtctgttgaacaagctagcaagggtagtttttccaggattgaggaatcttcctcttctccaacagttaggacttcagttggttttggtgctgacaagcaagacccacatcgtgaggaaagagacacaaacctaagcaaaaaaggggatgtgaggaactttacaaaacacacagactccattgataatcacttggacgaggaatttcaaccagtgactagtagcagtaaacagccgtacactcagaaattgggtattgaactaaacaaaaaattaaatttaaggggttcacacaattattttgattcagataatagtgattccgaggaggatcttcctaaattgactcccaccagaaatgcatacccaggctttggagtttctcgaaggacaaaggcttctcctgattctggtagaacattctcaaagagtaacgttttatctggggaatctactactcccaattatagagctgaagcaaagactaatgtattccctggagaatctacaactcccaagtatagagctgaagcaaagaccaatttattctctcgggaatctacaacttccaagtttggagctgaagcaaaaactaatgtatactctggggaatctataactcccaagtatagagctgaggcaaagactgatgtgttctctggggaatctataactccaatgtacagagctgagacagtgactgatatattctctggggaatctataattcccaagtacagttctgaaagcaaatcatcctcaagtagtttccaggccagtgaagtattgcctaagcctttgcccgagaccaaaatgtcagattactcagtggagcagcatacgcctaaagctgtactagaatccaggagctcatcacgcaccgaaagtccaaagtcaaccccgagaaaacaggcatccaatcctctcaatgcatcagtggagcaggatagtcctaaaccaataccagagtccagaaggtcttcacgcctgtcatctacaagtgaacaaacatcaaattctcatcggttatcattgcagcgggatagtcctaggccaatatctgaatcaagatctccatctacagacagttcaaagccatccaggagggaaagaccatctaaatcacttgataagaataagaaatctggggctactgaagcttcgaagccctctgtaacgagggagacttcatcgaatgacaatacaggtcatgtgcatcctaagcttcctgactctgatgcttttactgctttcttccagtctctcaaacagactcgggattaaaacagttacattgttacatactatactctatagattgcgtttgtacaagtatgatactttttggtgctttgatattgtatatgacttttactacaacaatttttgatctttagattggagagcaccctgatgttcatataggatgtgtattattttactcccttacaaattgatcgatacatagcttcattattttgttctat

SEQ ID NO: 69503 - DNA, 7477 bp, Cannabis sativa
ctttattagaaaaaatatgtttagttaattgatttgaagtgctgttaattaatatgtttcttgctaccttgtttgcaaatgtagaaattacatttcggttttgattctctttggtcttgaatgtagttctttttatggttagtctagtgcattaattgagaaaatctagggagttagacacgttcggtgtgacattttccgattttgccattggcatttaaaatatatctagatcaaggccctggcggcaaactatatagggtattatttatgtttttgccagatagaattgtttcatattggtgttatcacattattttcacgtagtattccagatatttgttgttgattatttgagcatagtaacaaatataacttgagtaggttataatcctataaagcctagttttaagggttgttggcttcctattattaagttcgattatgcatagggaccgttacttcatttagtttgatgaattggattcaggacataattattgtttaacttgtatggtaacttcataaatgttcgaatgtgttattagtcattcgtttgtcttggaagttggcaactgtgaagtgtgataagttttatataccattgctactaaaagatatcacaatacacacacaaatacatttatatttgtattatttttctacacagcagaatattttgattttgtttttcttaaactagtatcacctatagcagcatattctgatggaatatttaaggttttcattgtcatgggtgtatacatagactagtcaagtcattattttattaaaggtttcaggctataaatctttataggtaaatttatgaagttttgttactagtgtaaaatatcaaggagctcaaagtttattcatttaataaataaggtgtttaagcatcagcacagaaggaagtacactctactaaactcttttgcttgggaaaatagtttactttgggacattataaataaagggcttttggttatcagggttattacttctgaaatttatagttaaggtttttgcgtagtttaggagttcaggaccgttattcataatttattggctgtttttgcattttattaagatgttggatcaattatataaaggtcactaaattgtggagtttcagggatctactaaaatgtggttgttatatatgtggatttcacctttcataaaattttctctgttctaatattaaagtcccaagactcacaactaaaccctgagctcgtgatatatattaaatgtatagaacttgtacttgtgcctcaatagttatatttgtatttggatggtaatatatttattatgtagcactataaatggcaattgatgtgaatctttagttgtagccaaatttattctcttttctagtgaaagcccagttttaaaaggtttatgaatttaaattagggaccaaaagataaaatcatagaataaagaagttcttatctttttttggcctaacagttttatcattgttcccatatgataatacatttatatatttttgcgaagaaaacttgaacaggctgtcagattatggctcctttattttagtcagtaataattggtagacagagataatggtgcatttagtagtaaatctgttaagctctgtgatcttaagtataatattttctaattacttttctgtctctctatgaaatgctatattatgtatgatgattactaaagtctttttataaatcttgattgattgttatgagcagccaatgaaaactcagttgcatcatcatctctggataagcacttaccagtggaacgcttgaatatgaagcctatggaacaacccaagtctttcctaatgcgggaccagaatgtgaacggtagcttaaatagacttgctgttggagtggagagagcagctagtcattccttgccttcgttgaaacccacagaccatccagttgtgcaatctagtacaaaggcagaagcagcgccatattttgtggagggtggaaaattcaacgcaatgggttctcagtatgagagtagccttttctcaagttcaatgactgagttgtttagtcgtaagtgtaagttttctccacaatgcttatttaacacacacagatcataaatatatttatatatctatatttatttagtgtgtgtgtgtgtagctagttgcaagcttgacctcttaatagtactataatactatctttgatgatgtttcagattatgatactgcttgctgacttgctaaacaatgctgttttatttacaagatttgtttttgggtgcagtgagattgtcatcaaacaatggtctatatggtcattcagttgacactgttgcttcacattacgaggaagaggaaataattgaatcccttgaagaaatagaggctcaaaccattgggaacctacttcctgatgatgatgacttgctctctggagttactgatgggcttaattataatatccaatcaaatggtggggatgatatggaggagttggacctttttagcagtgttggaggaatggatttggaagatgatggttcatctcctggactaaaatgtagtgatttccctggagtagtttctaatggtcagttagggttaagtaatggttcgattgttggagaacatccttatggagaacacccttctaggaccttgtttgtgagaaacataaatagcaatgttgaagattctgagttgaaaaccctatttgaggtgtgccattttgcccgtagtctttgaaatctagttaacatgttatctatatattgacttttattaaaaatgattgaacttgcagcaatatggagacatccggactctttatacagcttgcaagcaccgtggttttgttatgatctcctattacgatctaaggtcagctcgaaatgcaatgaaagcactccagaataggccattgaggcgtcggaagctcgacatacattactcaattccaaaggtgagcatccatttatgtcttcctgatacaggttgtttgactatcattatactgttataaactggtgatcttttattattccatgtcatacttgaactttgctgttgtattttaacattggtatattttattttatcaggagaatccctccgaaaaggacgttaatcagggtactcttgtagtatttaacctcgaatcttctgtttcaaatgatgaacttcgtcaaatatttggtgtttatggagaaatcaaggaggtgcgccttgtatttgttattggtgcacattgtaaatactttgcttgcttctaatgcactgtaatttttgtaacttttgtttctggatggcagatacgtgatgccccacacagaagtcatcacaaatttattgaattttatgatattagagctgcagagactgctcttcgtgcattgaacagaagtgatattgctggaaagcagattaaactagagccaggtcgtcttgggggaacaaaatggtagtattttcaaagtccaatttctctgtcttgtgattgtcttctttcatttttcattgtttaatttatcttactcaattaaatgctaattccaactaatatgatgtaaatgtacgtaaagtgcatctgtacatttttctttctctacaaaatctatatggtttttggatattgatggttgataagaccacagacaaattccacgtctacattttaattgctactttgatctatttactaaaattctttttgttttgtttttaaatttcagttcggggcagcagttaccttcggagttggaccaagatgaatgtagtgtttatttgcagcagagtagccctcctattaactcaatcactggcttttctggtatggtttttctatcactaggaatcatgcttgacccaatttatgggcagacaagttatatttatcttgtctaacataaaatattctaactggctcagtttcactcggagcaattacatctgctgccgtagataatgggagtactatagctgctcagagtgcaacacaaaatccatccctggaagctgcatttcatcacgggatatcttctagtgttcctaacagcttatcctctctagttagaattgaatctctaggcaatcatgctggcctttcagaatccaatcattcatcggggccactaaaatttgacatccatggaacatcaccttttcatcctcattcactgccagagtattatgatggtttagccaatggcatccattgtaattctccaggagctttgtcttctggcatcaatcctagaccactagaaagaattgaaaacagacaattttcccgggttaactcaaactcaatggaactcaatgaaagtggtaagttcaatcactgttgtttttcaagatttttcattgatttatacatttcaggttttagagtttagatggttccctgagtgtgtgctacatatgacattgctatccatgaaccagcaatttgtatgtgccttggaagaaaacagagagatatgcatttaaataaagttttctttatgtattagtatgggcaggggtgcagtcttgtgagcaaatccctagaatgtaaaaggccaatatgagagacctccctctcccaatttaaatctttactctttaaatctgcccatattctttccttccttcaatattttctgtataaaactttttcagtgctagctcagcaccaacctcccttgacactcacaacaactacctacctccaaggcttcttacaaacatcacgagtgtattcacacactaagcataacatgacacacttctcctattggtttttcctatgtctcatatatgtaaaacgaaagagatatcacaattcttgttcataaatgctcaaagtcaaatcttctaaacctttgtttccaagttgagtcagttctgtatcatacacattggttggactgatttttcagtagtagaaaaagtttttttttcagtttgatttggtttttcatttcattttttttttatcttgatatccttatattctcttccccagtttttgggtcttctggtagcggtagctgttcacttcctggacatcattttacttggagcaacaactcatatcaccctcaacctccaggtatgatgtggccaaactcaccctcatttgtcaatggagtttctgcaccacatccccaatcaagggttcatggactgcctagggcaccatctcacatgttgaacccgggtttacctataagtaaccacccagtggggtcggcaccagtgactaatccttctatctgggataggcgacactcctttgcaggggaatcccctgaggcttctggatttcatcctggttcccttgggaatatgagaatgtcaaactcttcccattctttagaatttgtttcgaataacctcttttcacatggtggaaactgcatggacttgccaattgcttcaaaaagtgtaggacttcagtcccatcatcagaggtgcatgttgtttccaggtcgaggccaaatgatgccaattatgaattcatttgatcctcctggtgaccgtggtagaagtcgtagaactgaaagcaactctaatcagctagacaacaagaaacaatatgagttggatgttgaccgtataatgagaggagatgataagcgaacgacactaatgataaagaacattcctaacaagtaagtattttatcaccttaatcctggaagaatgttgaaattgaaaatgtcacatttctaagcaaaatgtctatattgtttcttatcaaattggagttggtccatatgatactgttatgcaattgtgctttgaacattttaattaatattattaggatttcttcgcaatggtgtcaccaagtccttgaaatatttataataaaccatttcactttgagtcttgttctgagaaggattttgttgtttaattttaggtatacttccaagatgcttttggctgcaattgatgagcgccatcgaggaacttatgatttcatttatctacctattgattttaaggcaagttctgattcttgtttggatcacttcttgtaattaatgtgtagttgatatgttggtggatcttgaaaacttgacttgctaccttttaatttgacgttgctatgaccggtcctagtattaatagactatattgtacaattgtggcagaataaatgcaatgtggggtatgcattcatcaacatgacggatccaactatgattattcctttctaccaggtttgtttactatcagctcaaataaatgcaaaaagacttgtaaaaagaaacttagtttaaaagaataaatatactgtataatatttttcgtatttggcagtcatttaatggaaagaaatgggagaaattcaatagtgagaaggttgcttcattagcatatggtcgcatccaaggtaaagctgctctgattgcacatttccaaaattcaagcttgatgaatgaggataagcgatgccgacccattcttttcaacacagacgggccaaatgctggtgatcaggtatgatgagaatgatacacaccttcgatgcagtaagtgattgaatatgattgattgattaatcttgtgttgtataatataggtgccattcccaatgggggtgaacgttcgtataagacctggaaaagctcgaacaaatgcatttgaagagatcaatcaaggaagtccaccaaatatgggacatgggggcgatgattcttcacaaggagaaacatctacttgttctgcaaaggagttggattgagcaaagccactttttttcgtgggtgctaaccttcttattggactgagtacaacctactactactactaatctgcgtccttgcctactactacctggtgactgaaataggtggttgattcaatagaggaacacttagccaactgtgctaagtagtttttcagttttgtcgagatatttcttactgaaaatcttaactgcttatagcctatcatatcctatcctaattcttgatatttctcttattggaaaaaaaaaaccgaaggagagaatcatatcgtatcatagcttcggaaattttggatgagtaagtactactactaaacatacatcaaggaaaaagaaattcaaacttgtataggaggagttcgttccattgtttgtgttgcagtttgaggatgctcaactgcttttatgtttccttttttttttttactttattatataaattattttttattgtgggggcttggagcattggtgcccatatgtaatggctctggcctcagatgtttctgagtggtggtgatgagctcgtcttgaaaattttgatttgaaatgacgtactgttgctgctgttaagacaatgggtttgtaagttgtaacctgcttacagatttttctttttaacatgatctataagagtgaagaattgtttgccaaaatggtctcactcagattgatttttcatctataagcctatttggctcaaagctaaaagtaacctgctatagtacattctg

SEQ ID NO: 69504 - DNA, 3955 bp, Cannabis sativa
tgaaaataaaatattatcttttaactctaaaatagaaagtttggctagatattcttcattttacaatctaacctgtttggtcaattatattcaatcccttttccttaccatgatcgaaatttattgcctatatcttacgtagttgtaattgctcactattaaaatctacaatagtcaaccactttatccatatttgaccacagaatgtcccaatttaaatgacatcaagatacaaagtctgatgttagtaaagggcccaactgaccctccaaataaaaggcagtaaaatttctaacagaaaactgggaaaaattaaaaattaagctagaatagaaagcacagtaaaaagcaaaagtagttgtttggatgttcaataaggatccaacaagtgtcgtaggttctctagatctttatttcgttgacgaattattcgacaatagaattactaattgtttcacctttatttcttttcctagttacttcccagtcactgctctgtactaaattattctctgtttggttacctgaagccttaacacaaatctaatgaggcaagttctagttctgttcacgagtgtatttaattcttttatactttgagtactccaagtccctagtagagatgcctttgcccttccttgttcttttctctgtggtatttttttcactcctttgccctttaagcttcaaatttacgatccccaacttaggtggcctaattgtattatttaatgtctagtttattatctggtttcaaatttaattcagaaattaaaataataataataataatatcctctctttcaatgtcttttttattttaatgtactttataactatatcccaagttctcattattccacaaactatcttctgaatgcctcatgcaaattctatctgcctactcctagttttaataaccaaaacctgttgaataatcaaattcaaaagaaaaaccaatttaatttcattgttttattaatgctttatacatgtaatcattttcgagttctatacaataatattatctataatacagtcggaaaggtacacacatacacatacatgttacatatgcatagcacgctgtaatttacatgtgaaactgatcgggtaggacaattctattagtacaactgcatcatagtccatgcatgcatgtatcctcttgaacttttcatctgtattttttctcattaactgggcctcgtggaatcttgttgaggaagttagagtccaattttctgtatgttctctttatctcccgaattaatctaacagcaaaacgatcaacttcatcttcatatcgatcataaagaaatggtagtgttcccatacagacaaagccttgagtgtgaaatcaataaccaaactaattaggccaatagtcataatgaaaaccataaaaaatactggtaaaggttcctaatatattatcaaaaacagttagttggagggaaacatttcttaccaaaatacaggaaatttaagaagctgaaatagtttccaatcaccgacacaacatagagagatataattgcctgaaaaaaaaaaaaaagaagaaaaagaaaaaagaagacagagagagaccttttagagactcgatctgcaattgaatttattgaattgtttatatatgtttcaatgttagaaaagtattttaacttcttatatgtaccaagaagaaaagtgggagatcatttccacatgcaatttcaaggaactttggcagcgactcgttaaatcttttgtggaaggttgaagccgcttttccaaatgcagagtcatctaatacaacctttggaatttgcggtcgagtcctgttttttatttaaaataattgattaaaatagtttcatcaaaatgaaatcaagaaaaccccgtattattgtactatatatatatatatttttttttttttgtttgaaagattctattatataatttttctcaaagcataacaaggattttaaattagtagtgttataactcaaatgatgtgaacagagagatgagaatgaaaataaggtgtagtaccagtgaaagtgtgctgcacaagtagaccatatgtagaacacaagcatagtggtgatgaagatgtgacaaaggagtgtcacaaagttatactcaacaacttcaaacagaaaccaaattactgtcattcccaccaaaagtgcagctgagatatttctctccttccacaatagcacatctgccactgtaatttcacatctttatttatcaaatatcacgctttgatttgttggctaactcaaaactatccaaattatccacctaaacaataattaataactttaaaataatatgcccttaaacaagagtcggcatacagaacagagtatgcatctatcaaaatatggtgtacaaaatagatatgcaccacaatttcaaacacttcgaaatcaaactttttcctttatagtctccttaatttaaactctaaatcttaagtttattgttcagcctattttgatctgaattctatgtgtaaagattacaatcaaacaaaaatcaattgaaaagtaattattgtcggtcaccatgtttatatatgctacatattttaatgaattttgttacagtactctcgtggtgttgggcaatggggtttaacttcttcaacttttttgcaaaattgtcctatttttataaaggcattttgcaaaataatatgtgtaatagttcagaaaatatttggtacctcttaaattatttggataaatttgtttcaaagtagaaattctaatacatactcgtgtaaaataatatggacaggatatgtaagacagtaatacaagatcataattagaaaaataacctgaaaagtaatatgacattttatttgaagtggaaaaagaaatatgtaaaaatataagagagtagtagtaccttttcctcctccaagaacttgatgtatgggtctttcacgtccaaaaagccttccccaatttgatatttcgttatctgaatctgacattttggtggtggagaggaagttttatttagatgatgggataatgaggaaaagagaagaggcaaatatatactaggacatcgagttctacgcttggtaatcaagtaagcttgcaccaagtaaggaatggcttgggtcttgtctttaaacattactttgcatggaggctacataagaaatctttttacaaaatgaatgtaattagtgtaaaaagaatagaattccatatcagacatataatatttgagaaaatcaacttaaaaaattacaaaatgctgcaaaaaaaaaaaaaaaaaacaaacaaacaaaaagcaaaaactacaaaatgctgataaaatatttcactatcgcaaaactatatttacatggaaaatttgtaccaattttctaatttagttcttttatgatgtacattgggtcattaaataattactataccgaacaagtttactccaattgaaaaatcaaaaagaaaaaattggattaatccactgaactatcatcgaagagtttttgctgtttaaactttactctattgtaaaaatttcctgtgaactataaaaatcactgcaaatattctcttacagatgtattatgcttatttatttaaacaatttgttgatataggaatgtgattttattgtagcccaattgaagggtcccaagaaaaataattccataaatagaattctaataaagaaatatgagaatatgtatgagagtattcttagaactaatatttttatttgggtaaattgtggcataaatacctaatgttttggattttatacattttgttgaccgaggttttcgacaaccaataaaataataatagtttagagagctataagaaactaagaaggagattttttaccatgttcgggcgttaatgagccttagtccacgagtttgtgtatttatgatagtatttaatatagagaatgttcttggtgagttttt

SEQ ID NO: 69505 - DNA, 2299 bp, Cannabis sativa
  modified_base (1017)..(1025): a, c, t, g, unknown or other
caggaagaatgaagtaaattttgtaacaaaccaattaatctgtaaatcaagaggcgcataccgtacaaaccaagcacaaatttagatgtactgacttttcttactcttttaagtttaagttcagggaaacaattagaaacacaatatagaagattccactaagttgatgcaactatagaagaagcagtaagttccactgtagagacaattctgttcttttcaaagcttcataatttacaaaacttttggaaaaccagaagttatgacaaaaaaaacagagttggggtttaacaacctcatcagtatgaccaaatgaatttttgaataaccgagagcaccaaacataacaatgtcaagaaaagaaagccaacgaccaaaacgaaaattacagcataacaacacagatgaggtcataactggcataacccagctcagaattgctgcacaaagtccaaaaagcaacaacgaagcttaagctaaaacaccccaagtccatgaattaagaaaatattatactcaagtagctgaaagattagcttttcataccaaataacttgaggattaaataaattatagacaataaaattaacattaggacaatacaagacactatatacatgtaaatttaaaccagacatgattgagtacctgagagtaagaagctttaaaacagcaaaacaagtccataatcttcaactctttaaaacctcttcagctaaactttcaagttctcaacacccacatcttgtaatcaactcctttctgttgataagtgtaaaccaaaacccacctccaaccttgataacccttcccaaaacttctaatcaataaacatgaccaaaaaaagcccctcacccaaacaaccctaaaaccccaaattagcaccaaaaaaaaaaaagtcaaaaccgagtgagaacaggaagtgggtatccaagaagttcctcttaccagtccaattgaggctataaaatggggcttttgtctttcccctcttcttttaataataataataataannnnnnnnntaataataataataacaataattcggtcgtgatgttcacgctcttctcttttatcccttttagtcttccttgctcttttggtaatcctgacaagtaattgaacaacgaaaaagaaccaacgacagtgacgataaacgaacgaacaattcaaactttttctacagtaaaaacaaaaaatcacaagactagttcatggatttcattttggtgggaaagttttttacttgcatataaaaaagaaaataaaaagagaaatgatatgagattagtatcagtctcagatatatgtataaaggaaaaaggaaaaaagggagtggcaaaaagctgacttttgtgtggtgttgactttggtgattgaagacgaagatgtgtagtactactgaagatatacagatagatagatatagtggtacttatgtactgttctttcctttcatttggctgttcttaaagctattatcacgggtttgccactgtcacaactgtgcacgacatcgagttggttcaatcaaacctctcaaattctctgttttcttgtttgtcgggtttcataataattttcatccccgataaaataaaataatatttcattaccaatttggttttaaaagaaaaaaaaaattgtggtcaaaccttatgtttatatttgtagataattaaagggttgagacgtaaatagccttaaattttgaaattcaaaattgagtgtaaaaaaaaattagtaaaataattaaatataaataaattagctagtaaaaattataaaaataaatttattatagattgattattttaaaaaaatatatataataattaaattatgttatataattttttttagtattgcataacaatttattgcaataaaaataaataaatatattaaattattaaatattaataacaatatttgatatattgtatcactaaaaattaatatatcgtagttataaaattatatactataaaaaaaaaactataacaatactaaattaaatataatcatgaagcttaatttataaaaaaatcgtacctatatttataattaaaaatataaaaatatcatgaagctaattattatatttataattaaaaatataaaaatatagcttcatcattatcgtagcttaattatattttcatagttataaattagttaattagctaataattatatacataccaaaaattttatatataatcattatatataataaaatagaaattaaatatcatcttaaataaataatatactatacacaacaaaaattata

SEQ ID NO: 69506 - DNA, 1749 bp, Cannabis sativa
  modified_base (1690)..(1711): a, c, t, g, unknown or other
aataataatattaataataataaccgatttatcaaaattaataaagaaaatttatagttaactaattcaagaaaaaaaaaattgaataaaaatatcttcattaaatcatattatccaaaactataatacatgtactttattagcatatcgttgaggataattttctagcattgttcaaatcttgaaaaaaaattaattaatttttaaagatagtgtagtagtagtagtaggtcatgagaaaaatgcctacataaatattaaatttgaaaatattagcaagtgccaaaatatttcctttatttatattttttggtgtattaaaaaaattagttcacggtttcacaaaactagtaaaatggctctctctagacttttccagaagtatgtccctctgtctcctttggtacccgaaatgggtttttggtctacccacatgagttgtgtggtggcggttgacatcgattcctcccttatcttcttcaatcttctttctctcactgcattaattgcagcctttattggtcagacgaggattatctcccaaatctcctctcatacaaaatttcaacccaattaaatgcccattaccctttccatatcctttaaagtcgtgttttttacttcttaatttaattttttcatcaaccaaatccaactatcaaatcaccagccagtccaaagatcctccactctctctaagcatggcggtaagacgaagggtttgtgatgatggagcttggaagatcaaaatcatcatgatgcctaaagtgtctcaaataggggctatgatcagaaaccacccaagggtcatcctacaaagcatggtattttttctttataaagtaagattaaggttctatttttgcacatctgatttttctatactttcttatctgtaccaactagcttatagtgtgagtcctaaaatagaagacttaggttttaactctcattaaccgatggttttaacctctgatgaaaacatggtccatacccttgacgaaattctgattgaaaccccaaatgatataactctccttctcaagctctgtactgtcaaacactttagtcatttgtctttgatcaaaaccctctcccaaatttggacctctcaatgtaggttccctgttattgtgtctgaccattttgaaggtcttttccttgtcacctttggctatgagggtgataagcataaaattccaaatggccaacggtggcactttgctcaaagcctaacaatattttctacccctgagtcctcttttcctatcacccctgaacaactacactatgttcctttctgggtccaaatctatggtatccccttttggtgtaagtcatacaatttggctaaactcattgccacggtgtgggtgatctgattcaagtagatatcaccactgtaagggatggaactggaccttatttgagggttcagtttctcatagatgtcaacaagccaatcatacgtggcattcatgtttgttttcttaatatgggtagggaattcactaagtggttagacttcaagtacgaaagattgtctaatttctgtttctattgtagcaaacttgatcataataaaaaatattgtcatgctaatttacaaaagtgtgatgagtctcttgtcccaccaccttgtccttatgatctcctccttcgtggtaaggagtgttggaaattattttannnnnnnnnnnnnnnnnnnnnnaagtatgttgattaacacactaaatatgaactttctaa

SEQ ID NO: 69507 - DNA, 6464 bp, Cannabis sativa
cataaaaagaccatattttttgtatataaaatcataaaaatcgtaaaaatatttaaaatttcgtacaacagtatttttataatttttttgttattttttatatatttgtgaaacaattcattttttttgttgttgggaagaagttgaagaatactcatttttttatatatattaactaaatttacctccaaataaattttaattcaaatatacttcttttcataaatattgtacctaaattatcttcacacaatcacataactaagatataatttcaaacataatagatttgtattttttgtagatggatgtgtaagtttctaaaaaagttgaggcaaaatcttgattagagaataataaaaattatcgtgaagtgaagtgataggaataaaattggtagaataattaaaaaataaataaatataatagactttaaaagagggtaaaaattaaaaacatcaaattaaataaggtatgtataatatagtgtaattttttttttttttttgtatgtacaattcatttgcaattgcaaagctttgataccaaacgacaacttttgagaaggagataacagtaaaacgacaataaagtctgggaagcgacatatggcccttttcttttgatcggtctcggattctctctaggctctcttcttagctataaatgaacccctttcgaacaatttgtttactctggtgcctcgcaggtgtatattgctcatcttcaaattagggttcggaggttctcatcttcttcgttccgtcttcaagccatgggaggaggcaatggacagaaggccaaaatggctcgtgagaagaacatagagaaggcaaaagctggctccaagggtaacttcttttttcttgctttatttttcaaaatccaaatcaaaatcaaacttgtagagggatcttgaaatattatcgttcccgatcataagagattcgatttttttttcccctttctttctcaatatccaaaagccgtggcttttgtttatttatttagttattgtatgaaaagtaattgaaaatagtaatcatgggtcatttgaggtagatctagttgtgtctcttgaaccatttactttttcttataaattcgtttgatttattatgcaggaagccaactcgaagcaaacaagaaagcaatgtcaatccaggtatatatctatattttgcaaggacacactgtataactaataatttggttgaactgtttatacatggattattatccatgtaatttcaattcatctacttaagccaatattctgtagttttcttttgtttccatttgagaatgggaggaaaagatgaatttagtgtcgtttggagtttgtgtaaccaccctttaagcatgtatctaaggattgtctgttcatctatgcatgcacacactcatatatgtgagaattagattgtttgataaattgtctcgctcaaaatcaaaaactgtaaattgcagtactttataaattgtttgtattctcgtatgtgtatttaattggttgaagcatattgcttatatagcatgtaacatctttttgtggtattttcatacctttgggttttacttgctaacatgtctaatttcattaattgacattgagagaagatcttcacactgtattttagcttattaaacgaaaactagaagtattaccaagcatgtcttcgtaaatcatcattaattttaaaggcattggcattagtaattcgataacatgtagatacaattcaattcaaaacaactcattgagcaataatgttttctttgactgataatactttgatatattggacacagtgcaaagtgtgtatgcaaacatttatgtgtaccacgtcagaggtgaagtgccgggaacatgcagaggcaaagcatcccaagtctgatgttggtacttgttttcctcatctgaagaaatgaacaattatgttactttcagaactttgctgggaggattgtgaaggtgctgtgcttctttatattgagggttctataattttagaatgattctaccaagaattgtcttgtgtttagtaggcttaaatcaagcttcaaaactgcgtgtaaaatatagtcgttgctgaagtaaaacttggtggtaatgccattaatatcactgttactattctatattaagttgtggcgttctgattctgttactagtttctataattgggtcatttctattttctttacctttgaattttttttttgcgaaattgtgttctcatacaattgtgcttggtaaccttctgttctaattgtgcttggtaaccttctgttctttacaagatattgtgcttggtaaccttctgttctttacaagatattgaaggtttaggggtatctatcataagtgacaggaatcccggttaacataatcaaagacaataatccaaccgaatgcttcaattatcatctggccatattttgaataaattgcttatggagttacgttcgttacttcactggttttttaaacaatattgtattctgatttctggcatagttaagagcaaatagtaaaaccagtattaaagtgaagcatgatggtaataataaggtaagaatacataatgcttaatcaataatatccaagtgtttttttgctaaaataccatacatttttaataataatcaaagctcgaaatacccctgatcttcactcaaacccatcaataagcaataaaatgttcaaaacccattttgtccatctcaatgggcagtagttggacaagggatgcaaaaaacccatttggcttaaatgtctatagttcaataacggaaacaatacgttgaaagagatgtatagtacattctcaaatgggttcatacataaacaagtcttgatcaggcttattattgcgttcgcatccggctgctttctgctgccctcacttgagaaaagtatggatgagcctgcacaaataagaatatcagcaaattgaaaaggatggtaaaatgccccaaagcagaaaagaattcaatgaagaacgatactaatgaagtttgaaagagtgaagattaaattggtgataccaacataaaaggtatgcaactgatcaagaaggctgtccttcagtttaatgatacgagtagatgctataagtaaaaccattgaagtatgagtaaaattaccattgcttctcttgcagtaagcctgtcctgatgatcataccggagaagcttatcaagaaaatcaattgcctgcagattgaataccttaacaatcagtacaaataaaataagagttcttactcatctgccagagcctaaatcaagcagtaaaacatgtacaagggaagagacaaatgacctctggggaaactaggtgctgattatctgcattaatgaatttagaccagggtttcctgctgtgcctgtagggaaaacacaagaagttcatcaacacaagttttaagctaataaagcattcaccaccagaaatcaaatcatagtaagctctgcactaaattggggaataagatgaatttccagcattgaaccactaagatataagcaagaaatttcagattaccaatctaataactgaacacaagaattgttacacatcttacctcccaacaagtgcatcaagttgtgagtcaagctccaattgatatttgtttaaatatgcatttagctcatcagtcccaagtacctgaaaatggaagcaaatcataattttatgaatataactttgcagacaattaaccgtgtatcttgcatacatttacataactgtttcacaccaatactgattataatgaaagaaaaattataataggtaagggtaacataaatggcagaagggtcataacatagctgtttttttatttattttttcattttgaacttaacacactataggattgtttatttcattctttttggaggttaagtcctccctctaaacctacaatttttgaaaggcaagaatcctaaaaacttacaaggttggtaattatgacaattcgaacccattataagatcccatttagcggaatcaatagttcttactgcttggaagttgcacaggttgtcttagtatgcatacaatatagattgaattcatttaagctataaaagcaagtaaaattaccttggcaattttaacaagctgatcatggttgtcatgaccatagaagaatggttccttgcgaaatatctgcatacattacaagtacattgagcaaagcaagcataaacaatctcacttaagctaaaagaatatgtagtaactataatctcaccattccagcaaacatgcaaccaaggctccacatgtctaaagagtagtcgtaatcttgaaggtcaactaagagttcaggacccttaaagtatctgaaacatgaaagtgaaagatgattataccatgataatcaaccatgtgtggtaatttcattaaacaaaaaaaatttaagatttcaaaaatttaccttgaagccacgcgaacattatactccttccctggatggtaaaattctgcaagaccccagtctatcaagcggagttttcgcaactcgtggtctatcataacattgtgaggctttacatcgcgatgcattattccttgtgaatggcagtagtctagtgcctgtaggcaaggaaagttgggtcatttagctaaacatcaagtgtaaaaaactaccattttcatttccttgtttgatttattattttctttctatttctagttctaaatgaagcaagacattcatgcagtaaataaatggtactgaatgaattaccttgagaagctcataaatgtagtagcgaatgtcataatcagtgagggtagggtacaaaactttaaaatcggtactgttcacatactcaaatatcaaactaggagtttttgagtgctgatctctaacaatatcgagaagcttgacaatattagggcctccacaaaggttctggagaatttttatttctctcttgatctgcagatacattattcacaaacaaaattaacttcaaacactaacaaggttctcttgggtttttggttctcaaccacaaagattattgcaacttcaacaaaacaatgtaatcaaaccatatatattaacaaaaatttcatcagcaacctgcccaaagtttaatacttcaccttctttttcttaacaggtttaaggatcttgataatgcaccgctcattgctattgacatttatgccttcgaaaacctcactgtatttcccccttcctactttgcgaacaacctcataatcatcttgatcactgaaagtagcacacagaaaagcaagttttaatcgaattgcagaattaaaaaagaggcaatcaaacaataaaaaatatatgaaaaaggatactcaaaactcaaagtagtataaaaaattatgggattggggagcagaactggccacctcccctttaaactataccatatcaatgaaataatatttcaagaacatgaatcacaataaactagatactttctcaaatccctcaaatggaatcgacgatcagattataatacagaggaagagatccgaaacggaataacacagaagagttttctttcgatatatatatatataaaaatctcttgtagtcacatccatacacgatcttgattcaaatcattcgtaatgaattaatctaacgagctaaaagattaacggattctattttctcggcaaccaaacacatcagaaatgaaaaagaaaggctgtaacgttagggttcaaaacctttacccccattgaacagcgagggactcgtaatcccagtactctttagggcgaaggacattgacatctgtgtagacacgagctttggacatagcttggaggcttggacccaagatctcgttgggctctgtgtgatgatgagccttattattagagtggctaacgaaggtggtgatggttttgttattaggcggatttggaagagacgaggtgcgcacgataggagagtgtacaatcggcgcacgccagacaacagcagtgcacactagcagaaagcgtaggagtagtgatgagttgtgcgtatccctcataagacgcaccaccactcccgttaacgtgcgcctatttggctaactaaagctgcgcctggttttggttggctattgtcttgtgctactaacagggttttctttttttttctatattttctttcttttcgtggaaatatcggaatgaggggtattaattgcgtacggtcgtaagaagtatatttttggtacgagctttaaataaataagacgtgtcaaagtctaattgggtatgttgagcgacattagattcaccaatcgtgtaattttagatgttctgatagggtggttgatcttaacataatttaaggtagggccgtaggcactaagtgcagatggtataattttggattcaatttaattcatctaataatttaaatttagtataatcaaatctaattattttagaggctttttcattttta

SEQ ID NO: 69508 - DNA, 1953 bp, Cannabis sativa
tatgaagggaattttaatattttttatggtaatttaattaagtttttgtttttttatgaatttttaatttgattggttagataatgtcatatttagtgatatttactttttatgtatgtcatatttatcgtaatcttaataattttttctgtatttttaaaaatagcccatataattatctattatgtttgcagtaaaaggtactacattcttattaattagtcatgcgacgatcaaacagtttcatgccatctgggcttattaagttcggccacaacgaggactttagagtaggatctagaatatcactccaacttttgaaacttattaattcattggctaaattatattttgctaaatcctatagcatatataatgccaatttatccaagtccacatatatacaatattgtgctaacttataaccaatatatatatatatatatatacatacatacatatgtagggtatgtaatgtgcatgtataatatattatgatacaataatatatctatatagacttttggcatattcatacaagaccattgcaccacaatgacttttatttcatctttacataattacctttctccccactaaacgacatagttaattacaactacatatataaccaatgagagaggaaactatatataatcccactaaaaccctacatagaatatattgtctgctctaaaccacaatatccaatattgtcacatctttttctagcacttacacatggatatgctatatacctaaaaggcaatataacaagagcattgatcatatatattttcaataaagcaaagagagacataaatatttagaagtggaaagagagatttttattcagtttgcatggatatctcttccaatcatatgacttatagaacaagttgttaggtcatatatatgtactactatataaactatatacgtactaaacaagttataattattaattatcaaggattagtatttaaattttcaactgctttttatgaaagtaggctgcctagctagctagctatagcttgccaaacacgtaggaagtaaagaataaagatcctttttgaaatgatatgaaaatttcagattggaaaagaaaacttgcatgtggtacgtaaaataatattttagtacaagactattacttattaggtctattttttggtttaaaaaactaacggtatataggattaattaataaacagtgtgaaagctagggttgaaaattaaaatatatcaatgtctactttttctcttcttcattttctttggaaagtaagtaaaaaaaaaaaaaaagctttatatataaatcatacaatataccatggagcacggcaagaaactttcttgaaaatttcattttaattattccatttgtataaattatatagttagatcgatcgtgacaagacatctgagtaggctagctattggccgtttttaactgtatacgcctgcccttaaagtgttggctcaaacaatacatattatgacctttcaattaatatatgatatcgagctttatattataaataaatatatatattatgggatgcctatatattgtatagtttttgagaaatttgtaagtattacgctacaaaaaaattgttaaattttgataataattttttagtcacaacataaatgtttttgattaaatgtgacttttagttacaaagaaatgtcacttttgccagcacaagcaaaagtttgatattgcgctcgtaaaatagaatttattacttctgatgtgttatcaaatcaacgtttgtattaaaacttttgttagcacaaaatgaaaaaacgctgacaaaaatgacttttctcagtgcataaatgcgctggtaaaagttagattttagccactataaatgtgctgtggtaaaactttgatatttttgctaatgcagtttacgaaatacgttggtaaaagttact

SEQ ID NO: 69509 - DNA, 3551 bp, Cannabis sativa
  modified_base (41)..(42): a, c, t, g, unknown or other
acgtaaaaatgtaaatattttatagaacatgtttttgaaanntattttcactttttcaattttaaaaacagaaaactgattagaaaagtgttactaaacgccaccaagctaattaagaatttgaaaaatgtataaaatagcatgtatatcagctgagccaaaatagctctaaactattgcttatgaaccctacttcaactgatgtataatataatttaaaaatgtacaggtaaaacaaaaaaattaaagttttaataaaattttgacatattctttattgtagttgattacttggcataagaactcatcgattgagaaggacacactttcaatgtatatactttttggagaaacacaatttttttttttttttcgatgtcataagttatacggaacatatacaaatagctttgggttttcctaaatgtaaatacttaattaaaacacattttgttttctctttccttaatgttttgcttgagaaaaccccaacattcaagtaaaaagaagacaagaataacatggaacataagactgtagatgttgcaaattagtttagatatatataatactataaaacagtagtgtcgtacgtagttattactaaatttcatcatcccaaagatcttgaattgacttgtatgggcttgtggtgtcattgcaaagaaaatctcccctcatgatcttccattgctccaatttgtcaatttggaggaaatcatgatcgtccaatttcaaatcaagggctacaaagttctctcttaatctaatctcattgaagctttttacaatcacacttgatcctttcgatagcccccatcttaaagcaaccttcaaatgaaccatataaactcaagttttagtgtttgactttatttggtcaacatcaaatgtgtaattaatgttatagatgttacctgaggtggagtggctttgcgttctttggcaatggattgaatagtgggatggtcaatcacagccgttgacccccatgaattcccagggccaccaagtggtgagtaagcacttacatggattttgtggtccccacaaacctctctcagttttgcttgcctccacatcggatgcatttccaccttaacataaataaataaattgatcattgtgaaaaacataaatgttatttcagaaaaaaaaaaaagaaagaaaaatataaatgttactctcattacaatcaactacatgatgttttcaatgcttggtgggcttttttctttttttctttactttttttttttaaaaaaaagaaatactataaaaaggtaatgtcacatatcatagattagttgtatgtatatcctacctaaatagaaaatggaaaatcaaatagtgtgaatatataaaatccgaataaattaaacacttaaaacaaaagaaaataataaagtttaatagccggaacaaggctatacaatatttgtattttaggaaaaactttatgaaaatcttgaataaatatcctatatatatataatcatatatgatttgtcttttagtagagtaaccaaacatgtcacactcacgcgtgagaaaatactactttaaaaattgatgtattattatgaagaacatctcatatgcattacggatgaggaaagtatcgaacctaacctcgtgaatttgacacatttatatatttttatgtttttcagttcaaaaaacaacaaataaatctttctctatatatgtcacatgcttttgtctttttttttttttttaaagaaccacatccattctctttctgattcaaaattatataataattggataatgtataagatgagaaggatttacaataaaaatgaattaaaaaaatttgatgatgtcaacgagtagttgacttgatgatgccgactgtatcatttaaaaatctcacaaaagataataataatatatccatcaagcaaattgcaaatactcatttaatattatcttaattataatttagttcaataagttgaagttagttaatatatagagctagagagaagagattttctgccgaaaaacattgtatcaaactttagctgtcacgtcccagattatatataatatacataaatatattagatatattatatatatatcatcaaccagcttttcccttataatattattcttaaatatattattcaaaaccctatcatatcaacatgaaaaatcttattgattctgtctagttaatatttgtaaaacttgatttgtacaaattaacatatacattaatccaacttgttataggttcttaataataattacctgattgacagctggggtaacagaggcaaaatccaagagtgtgtgaatctttttggatgaaaaattgctgacaccaatagatctacacaaacccaattcaaggcatctttgcatgccagcccaagtggactccaagtctaatttttcaaactcatcttcgttgggaacggcaaaacgagcccaaggttttagagtcactggccagtgcaccaagtacaagtccaaatattccatgctcaagttcctatgacattccattaattccaaataaataaataaataagaggagatagacagtttgttatgtagtaacacagcaacaaacaagtatgtctggctatttattatatatatatatatatacctttttctttttgtgtgtttttgtgtgagattctcaaaatcttagaaaaacaaggttatgacaataatattatttatatatatggatgttacaatattaattaattaattctttcccgtgcgtttccagtactgtacttttgttctcaccattattctcttaaaaagaacctaaaaacaacttcatcaacaatgtgaatctcaagagagatcctgttcaagattttcccatgcataaaactcgagacgattcacccacatgctcttttcctatataagatttatatggtacgatctatttttgtagattttcccaatataacaataatatttatatatatatatatatataaacttgaataagatgatggttcaaactcatgatgatatatgtggatgcatggtttgatattataccttagagtttgtttgagtccagaaactgggtcatggtgatcacttccccaaagtttggaagtgacaaaaaggtcctccctttctactcttctatccgaaattgcttccattaaagcatttcccacagctggttcagacccatatatctttgcagtgtcaaaatgcctgtaacccatctgcaattaaattatatgcaatatatgcaattattagcatcaagaacaaaaaaacaaagctaataatataatgctcttattagtacttaagtactactggtttgattgattgatattagtagtagtactcatataaatatatattatattagatatacttctgctagtatatatgtatatatacatacgtaccttgagggccatatgaatggctgattctgttgttttcctatcgttttggtaggaataagtacctaagccaatgagaggcattgttactccacaatttaatcgcacctgatcgttcttcatgat

SEQ ID NO: 69510 - DNA, 3325 bp, Cannabis sativa
actaggtagggtacaacaacattatattattattcaatacctatattttatttttcctttttccattttcaaccacatatatctatatatatatataacattgttaatattcatccttttcacgattagttaaagatattttttaaaaattattttttctaaattacacgagacctcataattactactcatcaataatattttttaacaattttggtatttatgagaattaagacatgcacacgacaaaaccctacatatacatataatattattcaagtaaaacggccgatcaataaggaatcaatatataaactaaaatattaattaattttataacactaatgatataataatatttaaactatatacgtactacttgttattaattaaggatagatgtaattaaaagaagggataaaatgatcaatatatgtttatgtatatacatgcatgatcccaagaaagatccagcatgcattagttttgagatgaaagataaagattgatccatgaagattatatataatatatatagcaagttaagcttctaatttttgttataatatgtatatatatagcagtagtatttctactactctaccatggatcatatatatatatatatcatgtatatatatatcagctgacttaatttcacattaattaattaatttccataatttccattttccatgcacacaaacacaacacaacactactctatatatcaattactagctatatgtatattttcgtaattattatagatagattaagagagtatatactatagtaccatatatatgttatggatatattgcacaagatcaatgatccatattcaaaactagttaactaactaactctaattaattgatgaatatgatgatacattcataattgatattattatttataattaatgagggcaaaaagactaactaattataacagatataaattgttatcaaacatatataacatgcaatcattataattaactgctgaatcatgatcatcaatcgatcatcatcatcatctatatatatatatatatatataaaataatgtgatgatgaaagtggttgatcatctatgatgatcagagaattaataattataattatgtatttatatatatatatataattaattattagctatatagctagtgccatgaagataccgaaaagagaggtcgattctgccaagagagaaataatgaattgttaaggatatgaagatggtacccttccgatgggtaatgaagcctcaatagcaacttagcttgtgaaactgcaaaagggctcaatgcaacattctcaaacccacacctaccaataaccacatcgtaattattattattaactacatgatcatgatcttcatcttcaatattaatctcattctcattattactactaccattcctcatcatcttcatcacctccatgatctctcttcccagccacacttgctccacctccactctctctctactgttcggcggcagagtcgcctccagggactcgaatatagcactgtaatgctccaaagccccatccaagtaatacctactaatacatctctctgctatggtaaccaccgtcggattaagtacccctttgatgctgttcaaaaacatctccacttcctctttcgccaccactctctgcaagtacagtacgcagttcactgccagagcttcatcatcatctttagctctactactactcgtaccaccactacttatcagtgcgttgatgatgagatgaggaggatgattccgcgggagtaagaagggttggaactgaaaatggagtcccaaagactgagcgaatctcaacagcctgtcccccgtgcgtcggaggagacttaagtctgttccggtggcggtgattcggagacgtagcatggggtgtctttcagagagtgcttgcataaaaggcggccattggagtccgtgcatgatgtcgaagtcgatgatgtgtaaggagtggtgttgagtgtggtctatgacttctaagattgcttgattggctgtgagatgacaaaaccttatgaatggggtaatctgatttagggttaaataggaagaatgaagagcttcgaggtcgtaataatgatcaattgggttttgattttgaataatttggatttggtgtaagagggcttttgataactgatggaggagtctttccatggaatctccataaggagaggaattggctgagagaatagagatgagtctgtgagcagcggttaaatcggaatgagagattaggtcggcgcatctcgtaaccaactggcgcatctgaattgggttgttaataattgggtattgtggttgttgttgttgttgttgtggtggttgtggttgtagtgggttattaatccctaaaccaagctcatcaatatcatcatcgtgtactactactagatctgatgaagctgtagtagtagtagtaatagtattagtattagtagtagaagtattatcttcatttggttgaggttgaggatattgatgatgagagctggaattaaaagaacccatcagcattatcagattataattaatacatacaaaccacacattgatgattatatatatacactatatatatactatatagctaggtaggtaggtagttgatctatatatatataattgtgtgtttctgtgtacaaattaatggaggaagagagagatctagagagagggagaaactacacatggatctgtttatatataagatgatgatgataatgatgaagaaacagcaccagctttttatgtatatatatatatctggcacacacacacatgcactactgggcaggccaaaaattcaagctttgcagtggtacttacttaacgtactcttctctgtttccacttatattttatcagatcacccttttctatctaatttctaattatatatatatatataatattctcactatatactatctcatcaaatcatcgaatcaattcaatatatattcttttgtttatatactaatgcttctctaaaacaatataataaattgtaaatgtgatatgtgtgtgttcatatggtggacattataattaattaattaattaacttcatgaaaatggggcacatggaatggcatgatggatattatgaatcataaattaaaggagactaaataatatatatattaacgcaacatatatatatatttatattattgaaaaatcctacgtacatatatatttatagggatatgattttgtcctgttattgtatttttacggattgtaattcgtgatgtacggcagccgtcagat

SEQ ID NO: 69511 - DNA, 6992 bp, Cannabis sativa
ccatgtgctgatatgtggctcccacgatttttatctcgaaaggtatgactaagtggtatgactaagtaacaatacacctctttgtccatgcaaaagctagtacactcttagtccgtgtatctttttattttttatttttaaaaatatttttactttttaaattaaaagctaaaaaattaattaaaaaagtattatcaagcacaattttttttaaaaaaaaaaattattaattttgcttcaccaactcactcttctttgccattggatttgggggtgtgagagacaaacagaggcggcaacaacaacactcaacagaccaccaaaaatgggaggcttcaacaacttgtttcacacattctcattgcttacgaggacacaaagaaattctcttcgctccatatcattatcatcatcgtctagatcattttgtactgacaatggtgctgatggccttcagaactctagggttaaaatcttcgaccgggacctcaaacgcaaacaagtaatacatatcttatgtcaatttttctcattgtgttcttaatagttatcaaaaaagttgtgactttacagcgtgatcgagctacatggttgatgggtcagactcaaaatgactcctttgtagatgctgttgttgagaatgtattggatcgtttggaggtactgttaaaagcttcctttattgaatttgagactgatatctttcttgttttggattgacattgttgagttgtcattcatttgggttcacaggactgcaaaaaattatttcctactacattatgcttagggggttcaatactgcctatcaggcgtttgttacgtggccgaggtgagaagttagctttgtattcttaaaatgtgaacaaaagtactataggtctctattaattgtcttaatgtttcaattcaagtgaccttcaaggttgagaatgaaaaaatatatgtagtattttgtattagcagatggaagaatgtcagattagtcaaaattattatatggaacctttcgaaattagctctcgccagtatggattcataatatttttgttttttttaggtggaattgagaagcttattatgatggatacatcgtatgacatggtgaaattgtgtaaagatgctgagcttgatgatgcacataatgaaaagattgagacctccttcattgttggtgatgaggaatttttacctgttaaagaaaagtaggcttaaaagttttagaatatttttttgaggaattttttattgtcaattgtaaagtcaactttctaattgtattttgtaaagctctctagatcttgtaataagttgcttgggccttcattggactaatgatcttccaggagctatgatacaggtatttacttctttataataagcagttagaaattatggtgttaatttcatttttatttttcatttttgaatcccgttacggagaacagatattttgtggatgcattttaaattttggtagaaacaaaagtcagaggttctgcttatctttatgcttgcaaataactaaaacataaaggagaattttgaatattgttagtgtacttggattacttgtaattttccctttataagaaatttctataattggttgaacttaattaacatgcagtgcaaattattatggaagcatccatgacacatgattatattttacagagtagattggcattgaagcctgatggcctgtttttgggagctattcttggaggagaaaccttaaagtcaggcattcttgaatcattggaggatcatttatctatttctgttatggaaagattatcaagaaatataattaagtatccattttaatattttaattgctgtttctttatggccagggagctgagaattgcttgcacagtggcacaaatggagcgtgaagggggcatcagtccaagaatttcacctttggcacaagtataaagtttgtcgcataacttgtctcaattttttcacagaatatgatggcaacaaaacccttttatctaagccctttcaaattggctctttcttggttttcaaagtataaactatagtttattattttagatgttttcttatatctctactttattatttttttctattaatgatattttcagttgcagtccaatagttttactgaaaaaaatgaatgttttgatgatgaaagtaggattttaagagtatcctttctccttcatcttatggtcactagtttgatcttacactacaacttgctgtcaatgatggattcatttgatgatacattgtatttaaatatctatgccatgactgaatacgaatcaacttaaagtttcttaagccaatctgtggatgtttttttttttttttgtggttgcattccaagattttatttatttgttgttcttgacatgcttgtataataaggctgttaaaatgtcagttttttttccttcttttgaaaagtaaatgaacttgtttctgtcctttttggttgagtgatgcattgatgtactggatgcaaaatagtttttgaacgttcggtgattggttattgagtcccctaaatggtttttttgtttaggtgcgagatgctggaaatcttttgactagagcaggttttactcttccaggtgttgatgtcgatgaatacgtagttaaatatgaaagtggtgagcatttctaattctgacctttccacataattatgcagtatgtgcttgctagatgagttatgtcatctaatattagtaaaattgtaaagtagaaattgttttacaatgttgatgcatcaatcatctatgttgtatgtattcagatttagttagaaattcagagataggtaagaagttgatgattttaaaagttaagtaattggtgaaaatagaccaccttctctttaaggaaaaaaaaaaaaaaaaacaaaaaacaagacgggtatcttaaatggtgtggttttctcccacaaggttcgagattcgagtttctctatggcatctacatagcaatcaatagctatagttttctggtcctcaaatattctagaattatgctggaggagcctagtttcaaaaaaaggaaaatataactgttttttattttgcaagctaaggctccggatatgttgtcgagaattttgtgacgtagtgtcaagtgtgtctcgaaaatcattctacaaagaattatttttgttttgagcaaattttactaagaattgttaaaaagaaaagaatattgtgtaaaatgattaaataaaaatgctattttgaaaacacttcttataactactaattttttaaagctcatgctgaataatatactatactatactatactcttacttgaaattacctgattagatacttaccttttctgccattgtcacagctcttgagctaatagaacatttgcgtacaatgggagaaactaatgctcttgtacaaagaaacaaggttaaactcagcatatatttcttttgaataagctaatattgtagaaacatgatttaaataagttaatgggattcttattaagcagcttctgaagagagaaacagcccttgcaactgcagctatttacgagtcgatgtttggtgcagaagatggctcggtcccggctacttatcaggtagagcaagacaaattttctctcaagatgattcttctcttttttcagagaaaaactccaatttatgctctctttcttgtggttttgcaggtgatttacatgacagggtggaaggagcatgaatctcaaccaagggccaaaaggaggggttctgccactgtatctttccatgacattaagaagcagtttggaaatacttgaagttgatttgtatgtgcaaatttgaaatgtgttcatttcttttctttcttaaataacatgaactaaaataaaataaagtagaatagagcattgatgctgaatttaattattctgtgcaattttgttattgcttgtaatctttacaaaacaatgctacgtgtatcatattcaaattgatgtagtgacaataaagatccatgtttaatattttttgggttattagtaaagaattacaacaatttttacaactttgttctgttgattgaaattactgattctgctcttaatcatcacaaaaacactatagtacatgtatatggaaaattgtctaaccagaatatgagattggattaggaggagcaggaatgtctataatgccttccaacataagacaaactttcttcatggtaggtctcaaagttgaattctcttgaatgcaccaaagtcccaacttaaccattttctccacttcactcatctctacacgatcatcttcatcatcatcttcttttaccagtctttctagttgaccatacatgaaacactcataaacccaattggcaagaacaactttttcttcaggaacatccatttgcatactccttctacagcaaacaatctccaaaaccatgattccaaagctataaacatctgctttcactgttatcgccatatttcgatgccattcaggtgccagataccctcttgttcctctcaaaccagtataagttctggtttgatcaggcataagtagtttagccagcccgaaatctgctatctttgccgagttttgatcgtccattagtatgttttcgggtttgatatcacagtggattatctgagtttcacattcttcatgtaagtaaactatacctttagctatatctaatgctattccaattctttcttcccaattaggctttcttgtcttggaattaaagagaaagtcagctaaagaaccatttttcatgtactcataaaccagcagcctgtttgatccttcatgacagtaaccatggagtttgaccaagtttctgtgatgggtttttcctattactgtcatttcatttctgaactctcgttctccatccgcgattactctctctagtctcttaatagccacaactttactagtcctccaactgtttgatgtaatcactcctttgaaaactgtcccgaatgcgcctcttcccacttgatctttgaaaccatttgtggccttttctagctcaccaaacgtgtatggtctaagagagacatcatcaaaaaacttatcatgatctagattcccaatcctttggtaatacaaagtacggaatctgtagataagaacacccgaaatcactaagccaatgattcccaaactcgaaactaccatgccagtaataaagattccacttttaactgcttgttgatgatgatcattggctctatccttgccactaaaacttgttgtacggactttgataatggttgtaaggaggtcttctctcctgattcttgaatatctcaatggtgttgttagtttaacacacctattgttgttttttcggaacagaacagcttggcaattacagtcctttaagcattcatctttgcaagctgacttgttgatcgctgtattagcagaatacgagtcatcattgctccacacaatcccatcaagctcaacaaaagaaaaatgggaatcttcatcatgattatgatgatcattttggctctgagcaatgcaatctatgcttgtatttctctggcagcctaagtttctactttgcttatcgacaaaatcaaagcccggtgggcatgcacaatcttgttctccatcttgatctgtaagaacacaataggaattcaagccacatagtccaattggggcacacttgtttccaaccgaagcccacttgacaccccaaccactgtttgtatcaactgaactatgagaatacaatcttagtattccatctacatctagcttcaatcgatacaaaacttgctcattgaaagttttcccaccaccaaaaatcgtttgtgtattttgatcagtggcattgagaaggtaaagatgaccatcaagatcaagattaagactcacattgttacctgttttattgttgatgttactttcccaataactaaaaaagggtctgcttggacttgttgcagggtattggaccaatttcccatctccttgcatagcaagccggaaccttttgtcagctgaaacgagttgatttcctggaagcagaggctgtcctggcaaaagggtatctgcttgatgatcgaaactctgccatgcgatcgtcgaatccaagttgtagagaacgaaattgcccgaatcgagcatggaagctgttgctgcaggctgagaggaattggcaatgatggcttttactacacctttcttatcttgcaagacaatcgaaccattatcgctgaaaagcagtgtaacatcatgggacaatgggggatcatccgggttcgctgtccatacaactgtcttctgattcagtttttcataccagattccaactgcaaaaccattgctttgtgttttgtagaagccaaatgcaaagaggccagaacttgataaccaatgtgaattattggtattgggagagagagaagagcctaggctgatcttttcttgagctgttgatatagagaacttagcagtaatcagaagcagcatcaaaaaatagattgaagccattaattttctgagttcttctacagctttaaaaaccaacgtgttataaactatgaagatcttgttcaaggttttgaacttttggtgaaagaaaatttctgttccataaacaatacttatacataatcattacaattctttggtttgattagacttggtcaagataagaactctaatctacacaaagctcataatgtataggtctagttttatagttttgactttgaggctgagttacaaggagtcaacgttccttttagttttaaataataataataatgacaatgacaagatagtttcattttaaaaaaaagagttgaccaaaataaatcagaaaattaagtttgtgttgcagtttgtaagagaaacgattaacaagtgatcaaatcttattgtttagtttgaaaataatagtattattttatgcaattacgactgacaagatacaaaatttaagagaaatgctaaaggg

SEQ ID NO: 69512 - DNA, 6516 bp, Cannabis sativa
  modified_base (67)..(81): a, c, t, g, unknown or other
  modified_base (6138)..(6142): a, c, t, g, unknown or other
tagtataaattaaagtttaacaaagtattatataaaaatatggtatataatccaattcaatataatnnnnnnnnnnnnnnnacgacctaatacggcgttccaaaccagtcaaaagtgagtaggttattaccaacatttaggctgaacctctttaaattttagcgttctttattagcatttattacgattttagtttaatttctcatatattacaactctgagtctgtttaaaaaaaatctagtcaacactaactatatattctcacagcataataaaacacagttataagttttcaaataatcatatttctcggcttatatatttaatattttagtagtgaatgccttatcaattaaacttcatcgaaaagttgaccagattggtcatagtaattttagttttgaatgcaactaacatacccctcgaaagagctatattccaatatgtagaattagcaaaaattcttacacattttttttgaacaacaaataacttcatacattttcttttgaacaccaactagtaggttcgtacatatattatactatgtgtaatagtagtacttgcatagcgatttacattacataaccattcgatcgaggagtactatatgtgactcaatcgcttttacatgtttgaagatcactaactaataaatataactctttgattttaacaattaagaattaactatatataattataatttactaaaactgtaaaatggattatgtgatcatactactcattataattaaccagggatctataagtggcaccaggcttccagccatctggtatgacatttttggcgacaagagtctgaccagaatattttgaagtcaacctcaaggagagaggagggtgtagctgtgagccagcgtccaatttccaaacggcaccccatgattgctgcatggctcgccatgttttggacgaagcttcccttaactccacagctgcaaggtcaccatctccctcttcgaactccaccacgcttgcgaagtagttcgaatttgaaccctggtcaacgtgaaatgctattctttttccggaatagtcacatgccaccctaacaaaaaaaaacatatatagtaattaattaaattttgtgcgttgtgttacataatgaatataattaataattgactcatcatattagttgttattgtttatagaattgtgtctcccaaatattagttacaagtgcgtaccaaaaatatatttttgaattttggaaagaaatgttaaattcagtataatgataatagtttggaaaattaaacttgtaattaaaacactaaaaatttgggttggtataataatttaaggtggcgaaaactctatttatttgttaattttggagttatatacatgtgtattataattggttgttaatgttattagtaccgtgaatatcgaatttgtaaaactcctgtgtttctaagcttttcttgttggccaggaagagccatggcaccaaaagaagttccactgagatcaaaatgagcagaaccggcaacacatccagggcatgaatctgttatcactactctcactgctttccccgagcaatatttgtttttagtacacttaacctgtgtgtgtacgtgtacacaattaatattgttgtgtatataaataaatacatcaagtcatgacaattttattgtttcatatattaattagtatatatatgtacagtgtactgctaattatatgtgttttctatataagcgagttcacatcacacaagactctatctcaattattgttatgttttatcaacgaaaagtacatatgaagacaaaaactaataaacattatatttatttgaaataataaacaattgaaaattatatgtgatatagaaacaaaattaaaagttcattattaattattaatgaatatatatatagtggactagctctgcttaattaattgaggaattatgaaaaagaaataccagatagcaggctccacattctttgcctgatttatagagagatgggcttgttgcagtaatcatggacgagaatggactttgtgataccaacttcccgtacccacaagaccctcctgcacaattcataatatatatattatattaccattttattaagctctctatatatattactcaattatatttgtataacactaacagccaactataaaatatagccttatcaagcaaaaaaaaaaaagaaactataaatatagcctttatgctaaagggtacctatcgggtttcatataatttaataaaataattttgagacaacatcgctagctagccaatcacaaggccgactcgtgctaggcaacattggtgtctaataaacttaattagtcaagaaacaactcaaccaatcccgtgtagacacataagattttaaatgttgggttgaatctgaacatacaataatactaatcttttctatagagagagacttaattaccatcactaccggcaccatcagggctgccgtaccaagttgcgccggcagtggaccaatgagcagtgcggccatttaaggcagacatgttcaattgcttagggttaaaccctaaacaaacctcaaatttgtagcaagacattacaaccatcaatgccagaactaacgagtacttgataagagcggccatgatgaccagatcaggtagctatagcttgtagtgtatatgtatgaatatatataatatgtatgtgtatcatgtgctagttccaattacaaactttgcagctacctacgaatatttatagtggaaatatcatacaagggcgctacaagtatgcttggccacaagtacatggatatattttattaatgatgcgttgtcgttattgaccaaggattttttaatgtaattgtaactataaacatttgccttcccgtaattagattttttaacacatactataaaaaataatatttaaggaactttgtttggtaggactacatgtatagttaaattagttaataattattagacaatatatatagttcaattattatgaaataatgccctgagaacaacattgtccaatagtttcataatttataaacaacataactgtttttaaccaccaaattactgacaacacaataagacatatagctacggtacattattggcaagcaacatattaaataaatgagtcactgtattcaacttttatatatatacatattgtcacatgcatacaaatatgcatgtatttgttcccctgtttattactgagtacatgcataaatatgctaaggtttaaacttgttaatcatgacgaatatatactcttttaaaatggaccagagacatataatgttttttaaaaagagcattaatagtttatctcctatatccaattaaataagtcttgtagaattttattttctgttttttcctctcaaattatggactttttcaatcttaccattatgtttctactacgtttaaacggtttgctaacatatactcatacatgtgcgcgcacaatattagtgccacaaaagcaaatcctttaaaaaaatatagatagaataccacaaaactacaagagtctagggcaaagttcaaaaaaggatttttgccacaataaaattcggaacaatactaaaatggtcaatagatttatatataagcctatttatctctcctaaagtaatctatctagaaatatatatcgatacaattcttatttattttgatatttagaaaaacaaaattattctattttttttcataatcgtgtacattataattatttaagtcattcaataaaattttaagaaattcaaaataatttataatatataaaacatcatttaaacagtctattcatttaaaataaaagagtcacacatactgtttgattcttattttttggcgtgttaaattttttataattactaaaaattttgtaaaatatcttaaataattacaacgtattagactataaaaaaattgaactaaaaaattattttaaaatagataagattgtatccatgtaccatatttagagatgcattattatagaattttccaaatacattcatattctttatttaagagaaccacacatgtagcctccatgcaaacaataacactactattacaatcgtaagacgcccaatataacctacactaacgataagggcgtcctaccgaacacatgctaaaaaattattaatttcctatatttttgacctcattagacaacactcttgatttaatttttattctcaaaattggtctttctttataaatgttatcatgattatttataaccgacgaaaacaattcttaaatttaaatttgaccaagtagctactatttaattagtaaagaaaaagaaaaatagcattttatataatgtacttatagatacatacaaaaagagatcgatccacatatagcaaagcttaagaaaaatatttccaattattcatctacatatataaaagaaaaatattgtatatatcttttaaattgtgcaataattctcatactcataatttgaaatattaattactaatacatagtggatgcattaattaaaatactaattgatggtgtaactttgtctgtcaagtagggccacagtgatattttgttcgtgcaaaaaaaaaagttccttggattgagccgttgatgttggttatttggtcgttaaataatccctcgagagattctcacaatattttcaggtcattttttccacattattctagtgatcgatcatcgatgcttatcgctgattagcttaactatttcaaatgaggttgatataaatgacatggatttgattttttcagaccttctttattgtaatttctagattatgttttataaagtcgatcgaaattatatgtgtttggctcgacgtgattttttttttttttttttggagtctttaatgacggaaagtatttgaaattagcaatttaaatgaacttgcacatgcattaacataaaataaatcattatgaaatggaaatctcaactgccgaatctataacgtgatagatatgtacaatataataatataaattattaagtatatatacatataataatttacactaatgcggggattgctcttccactcccatacatgctttctaaattcaccccatgtctgcctcaatattcgtttaaattaaagcgaggtgaagctgggatcacgcgacgggagaaggattcccatgaatacccattacatatatatttttgaaaaaaaaaaacaatcgtaaaaactcagtaaaataataaatatagtaattgcaaaattggtaatcgaaaataaatagttaattgcacgtaatttttttaaagcagttaagtgtgattattaatatgcatcaccgcagacattttcatgaaaactaaaatgtctcattactataatcaataaaaagcctaaaacatgaagttattttaattgtagtagttatgaacatatatatataatatcggggcgggtatctattcccccgctcccgccccattttcgactcgagtatgaacatttaaactcatatccgccccgtccctaggggaggtacccgcaggtataattgccttatccttatagctagctgaagcaaaaatattacttcataaagtattaattgcataagcgataaaactctcaaaacagttcattattgtaacttcctatgcaaaatatttagagcaaaaccttcctacttttaagaatttgtaataatacacaattagttaaatcaaatattaattatcacaacttgaggttgtcacaaaagggtgtacgtcggtcggtttatgcaatattttattcaacccattgtaaagatcgagttacaaaaattttagtgcaacccgcccaattaagaaaaaagaaaatagtaacccgtccaatgaaattggtcggtttgatcaggttaacccgtctaaaccaaccactaatattttttttttatttttacatttaatcattatattttagttaattgtaataatgagacaaatatatatagattgaattcaaaatttaaatcaaccaccataaaaaaatcatattagtttcaactttatattttgtcaatagttatataggtaaatagtcatataaattatataatatatatatnnnnntatatataataaaaatatataaatccttttaatcgggttggtcggattagttcgggttgattgggcgggttggtcttattttcaacctgcccaatataaagattgggcagattatatttttgtcgggttgtttggtttgtattttttgtcgagttatcttggtttagtttgggcagattattcgggttgggcggtttacaaaaatttatgtacatccctagtcacagatatgtaatatttataactttatcaaaagtaacactttgacctttgttgtaaaataatatacttttacaaattatcctttaatttatatattattttataatataataagtataaattaaaatgtgataaatatattattatgtgaa

SEQ ID NO: 69513 - DNA, 6706 bp, Cannabis sativa
  modified_base (43)..(48): a, c, t, g, unknown or other
agttgcaataggaatttctatataaaattccgtaaaaatgtannnnnnaaaaaaaaaaagtttagaagtgtaaaaatgaaaaagacccattttttttatcattaaagctgaatttcactcacccctctagaatctataaatgataaaataacattataaaaaataggagcagcagcagctacagcaaccaaccacagttttgtttgtccatttgttcttgtcctaatttactctccctcttcatcatggctcgatagcgaaggaagtagccaagtgaagaagccatcataagtttctcccttcaacacttgcatacaatattccaccaccatattccacagatccccaacactccatttatgcaccaaaatccattcactcacctgcttcacccataattttaacaatatacatatattatattctaaaccttttctagttctaagacctttctttctttttttagaatataatgtgaattatttttaactaacccgacgaatatttcaacaaataacaacctatactaaacaaaaaaaatgtataaaaaatgtggagtacctgatctaggttctgcaatgcacgcaagccaaatgtgtagtaggtgataaaaggtcttcggccctacaacaaattgtaccattaagatcagatgaaaaatctagatgaggtggaatataagagctcttccaaattcatataattgtgataattccacacaataaaatgctccaaccaagaagtttgatctcttgagaaaatcaaagacttctctcgtatataacagaacaggtggtcaaaggtgcggaattgaagaaaaaataataataaacctacaactagaatgtgatggccctaacttcggtattcaagttttcccgtttcaaattagtataagtaagaagtgcttttttaatctaattctacctgagaagctgcaagccattgaattatggtcttcagttcagggtctcctccaaaagcaccacatccccaatttcctgttgcaatccctatatcgtcttgatttttcagaggcagatgagcattctcctgacatgtttctgtcattgggtctacaaactcttccaatgtttcaatggaagttgaggcagcttctgcctggtatgaagaaaatggccaaaaatttagaaagcaaacaatgagtacacaggttctctcacacagggatgcaaagctggccagtataatctcgggatcaagtagagaaaaatatattaatgtttctttgaaacatgaagaaagataaatgaaagtcagcctttttttttttgaacaatcttaatcagtgtgtctaaattaaaataaaacaaatattactgccaagttcaaacataaccctctcgacctcaagataagcttgaaacccacccccaccctacactgctcagtcaacaacaatcgttgctcatcttaaacatagcataatttgcaggttgtagacatgcattaagttctgattctgaccatgctaaatgccttaaccagcacgaattcctttaacatgtgaaatgacaaaatgtgaaaaatactaatgccagagaaaagcaaagagaactcatacttcaagattacttgtgccctcgtagttggggtctttcatgtccgtgtcttgctcatctctggaacaatcattctttactaatcctctctcatattggtcatatttagattgatccataaagccacagaatgccttgttaatctccctgttgaaataaacaagctgaacatattgaatttgtcattgtcaaataaaaatgacatactgtatgtacagaaggatagttatcccgataaaaaaatttggcaaactattaacaaaatgtacatctgaattcacaggagctacagacacagctttaaggatgacaagaattggcctgttttattctagttgaataattcaaattttatagtgttaatattttttgtttagagaggcactgaatatttgacatgagacatacttgaatttatatatatatatattactaatttcgtatatcattctacaaaattattttcttttggtgcttttggagaactagaccttttacaaagtcaacaagtagtttctgtaaaataaataaactgtgctgatatgcgtgtctgtacatattgaaaaattaacttaccggagaaggtattttattttgtattgtctcatccccgggtggcataaggcatcaattgcaacaattctcgttttgcgtcttccaagagagttcatttcctttttgtccacatagtcaccagaaaaacggaaagaagaagcatacctaaatgtcaggcattatatcagattcggagaaagaagagaatagtaataaattcgaaaactaaaagtacgggatatttaaatcaatactgggaagtcttttagaaatacaaatcaaaatctatagtaaatagacaagttgttaagttttactacatttatacaacatattataagggcacagcagcaatctgataaatgaaaaccatatatatttgaactatggacctgtaacagggtacactttacaaatccatttttttctaggaatttcaaattaaattaaaagaagattatgcttttgtcacttgttaggtgtcagtagaactcaccctgtatagtttgagaacctttctgcaccaacaacttctattgattcattatcttccaatgcaggcaagaaaagcattccagcaattaattctggattgatcataaaacggatctcctcctacattgtaaacaaaatgcatcacattgcaacgagaatatgatcttcgtgattcacaaaacataatacaagcaagactgccattacatattaagcatgtgaccatatcagtaagtaaggtttgaattattattattttatctaattatttctttttcaaaagtctatcaagcacacctgtacacagcccctgtgaagagcaccacctccaaaatatttgtttgcaaaatctacttcaagagcaccacttgactgatcttctatcaaaccgaaactgcagacctgcagaaatataaaaggctcaccaggtctaagcctatacaatactcataatactattttatattaatttcctaggtttgcaacgtaatacaccaaatctttctcatgtttttctttttgttctttctcacctcaaatttacacaaaggaattgaggaaccattccagaaattagcatctgggtaggaaacacataaaggacgttgctctaaagggagaacattgcgctcaaatgacactgaacctctagggatttgtgcacatatccgttcaaaatagtgtataatgcattttatcttgctctgctgcttttgatcacagctgtcatgtagagacctgcatgtatcacactttcagctctaaaagtattcagtagaaatattaaaacttccagtaatgaaagaaaaatcagatggataaacaacagaataaaatgagaaacttgcaaggtacaacatcaataaagaataataaaaccttaattgctactaattttcagttattataattacaattttctaagttgagtattttgacttgaaaattagcaaactttcaagaaaatctaagaatatcctggtcaaagaaaaacatctttagcccattgtgataaaattcttccagccttctgaaggggtaattttatgagaatattttgccaaaaaaatattattttgagaaaaatggtattagtttacttcaagccaaataaaagtaatattcttgattttttttattgtaaatagattttaatatcttctattatagtcaatatgatacagcagaaacttagattttcaggtaattcaccccacctctattactcaaccttcagttctatgaaaaataccaggacactaataatgccacagctattgcaagtaaaagtcacatacgcgaataaatgatcaaagttgattgttggaagatgtttgtcacctctgatagctactggaaacaagcaaaagagagagcatccaagaagagcagcaatcaattcctgataatcagtacaaacactgaccagcgaaattgagacagtgaaatcatatgaacaaacagacaagaatgctatttagcaaaactattaagtagtacagaggagaacaaactcaatatgtcactcactttacatcataaaaaggagactacaatagacctatttagaaaagatacagaatatgaatggaatatatatgcacactcaccccaaacttagaattatctttgcaagagcttggcagtataacaaaccttattgttcacagaagttctaatttcttttgatctaaagtttggtaaaaggacttcagtgcttaatcataatttttgaaaaaataataataataaaccatttctgctacccacatatgttatcctagcaacattttttatgcattaagaattaactacaaagcagaaacaacatactactgacagaaaagagttttaccttcaataataaccactaaaaattactaattggaacctttttctggatccgtgatattttttataggagcatcaatgatgtaatctacaatcatcaatcacagctatcatataatcagactttttcctcctaaattatcatccttgacagtcatatgaatattggatacttgatatagattttaggcttattcataagtccattgatttctactaaagttacagtaaagggttaaatccataatatctttcaaattatacaagtcatttctagcttgatttatatcaattaggctagtacgtagaaaaatacacctcaatgttttccaaaatacatactaataaattaacatgtaaagaaaaaacctaaattgtgttctttcctctaagcagttcacaaaaagatgaacagttacctgactgaggaccactaaaccagcttcttgtgaattaagaatacgaagaccagttttaactccattgatcagattatctgcattctgatagtgcgattcgagcaaagaaggaaaccgcaatagtaaattcgccaatgccggaagaatctcttcaaaccatttcttcgattcctccgtagatattaactacccaaagagaaagaaaaaaaaaaacaaataataaataaatcatcataatatgtttcaagttcagttcaagaaatttaacatgcacaaaaaagaaaaattgatcataaaagaaaagacacatgaatttgagctttgaaattgaattgattacctggtcgaagaagataacgtaaccttgatgagcagaaaaggccaatgggtcggaagagagagaaagagagcgtctgaggtcagtaatggtgcggaagaaaaggtctccggagttaagacggctacggtcaggtccagcagcaagtagcttgagtatttcaatggcttgagaaggccagaatagggttgaggagcgtaaaagcaatggcaagtagggtaagatggagttcagatcttctctgtcctccattttcatttccatttccatttcgctttctctgtttcagttacagtcggagtctctctctggaattagaattgttttggtgaggaattacttttaaaattgtataataaaaaaatcaattaattagtaaatagattaaaaagatttgttgaaagtgggatttgaacccacgccctttcggaccagaaccttaatctggcgccttagaccaactcggccatttcaactcatggtgattcagttatatgtatttactatttctactgttattaattataattactgataaatattaatggtcttcaagaaaaaaaaaatctcatttctatattaagtacgtaataataaagattaaattgaggcattactttcaatatttttattttgcttgtaattaatttttaaaacttaaattttaacgataaaacttctaaaattactgaaaattatatgatgtgatgtatgagcaattaaaaacttttaaaaaaattattcttatgacaaaattaattaaattaaaagtataaactaaaaaaaataaatgaaaaggaaagaaaaattaatatttgaaaataaatataaactttcacatgtttttcaacttaaacaatatcaaaataaaaatatcgagagaaaaagtgagaagggggaaagacacgaaccaaacccagcaaaactattatcattgtcatgtgaaattgaagaaacccaaaaaatttgtggaaggcgaggtcagctttctctcgagcaagagatcaagcgtcttgatagctctgctagttgtaacgtgcgtgccaaggtggcacgttacaagctaggtgatacccataagttggccaagtgttagtcaagtggcggcgcatgttgaggtgcatgttggtggcatgctgatgcttagtttgtacggcaggagtattttcgtaaatatcttcaatattgttcgaattaggatgggacttggtattcgccatttatttgggtctacgtataccatggtgcaatcggattgaagaaactctatgatttggtatatggtttggccatatgtctacatagccaaaatcatgtatgtttctggtagaaggttaaaagctttgaatgctctttaaggggggaccgtggtgtcagctctccacaccccctagcaccttggtgttaagtgagctactactagtcagtgggactaatagggctgggcatatgaggaccatgagggg

SEQ ID NO: 69514 - DNA, 1617 bp, Cannabis sativa
attaatttaatataatataatacgatttaatacaaaatatcttaattaataaatagaatggtacgtatgaaagaaatactagtctttatatatacatatcttccttaatttcaagggaactaataattgattgcacggagactttcgttgatggagatcgaacattattataaaattctgcagcaaaaaaaaaaataaaaaataaaaaataattactattattatattattcacatgcatggtatgtaagccgttgcattatcacatggtcgtattaatgattaaattaagtaagtttaccatgtgattaattatataaatatcaaccctttccttaattatttattaaattaaatctcctggaatattgaaccggcctatagtacattttaccaccataaagaaaattacgaaaaatacaatgtgatacacacctcacctacctacccaatcaatataatgttaatgtttgaacataaatagatatataataattttttttttaaggaaatagatatatggcaatttgcataaaatattttaaatggcacttcttttaatatttttacattttttttttttaaattattactgtaatattatattatattttcgtaatttgatttaaagtattatttttaaaaaataatataaaggccagctttttttttttatatataaaaagcaataatcttctcaaaaagaattaaaaaattgtaaattcttaattttttttttatatttataaaataatttattatatttgttttgatgtaataattcataatattttattaccgagtaataaaaaaaactataaattaatttttaaagacaagtaggcaatatttgtctatgacaactatcattgattaggtgtcaaataaaggacacatggcagcacataaattggatacaaccacttgtcgcaataagagcgagcgagtgtaccttggcttaactccgttttttggctttaaacaagcgagggtgagaaagcggtaggtaacaggcggtgtgagattatcacagaaaaacacagttaaagagttaaaactaaaaaaacggagaaaggggaggactttctttgtttatggagagcggtgaggtgagtagtagtagtgtgttcaagtgtcgtgcatgcattttatgcatctgttgctttgcatgcactctctctcctcctctttctctctcttctttctctctctacacacacaaataataatacgctctccatctcatacgcttccacgcgttcttcttctattatttactcatacaaatcagccattttctctttctctctctatttgtttttatttttcactggtaactgcccagttgactcgtttcttcaccccattatatatagtggattttgggtttgggttaaataatcagagcagaggtggagttctttttgggggtgttttgatgtgtgaaacttgttcttcttgtttttgtgtttcgagatttggggtcgtgaatttggaagacacccaggttggttggttggttggtttttactgtttatttatttgtttttactagtatttatttttcaatctgaaatgctggtaactggcgttgtatatatctgggcgatgaacttat

SEQ ID NO: 69515 - DNA, 6039 bp, Cannabis sativa
caacacagacccccagtttcttcctcatccaaggtcactgaatcataatggttttccataatcgaattcgtagcaaattaacgaacagcagacaaactcaacaacacttagagaaacaaaacaaccatgtcaatagacaagactcttataataaacctcacttttttcctatccaacaattcgacttaatacctccttttaaatagaagtttacttttattcatacaatatgatcttaattattttgtattttcttacaaaatcatactgttctctgtcactttatacaattctctttcaacttttacaatctctctcattcgtttgtttcctgagctcaaaataatctcaaaaaagtatttcgacataatttggattagcttgacgtgagcaagaattcgccccccttctctaatgacagagttttttatttataggcaaaaaagatcgttagacctttgcttttttctttttctgatttgttgacgtggattaacttttctttccttttctgcacacttttctcattttcgctctcagagctcttcaagtcttgttctttattttctccaatcaacttcgcgttcttggttgagctttattttccttgagctattttcttattttagtgaaacggtaagtttctaagaacctgcaatattattatattaacactttgtttatcattaataatggagagttgtttttatagcttagggttatttttatcacttacatgatatatatatatatatgtatatataagtatatatacaaagatagatgagaattttagttttggttaagttattttatcttcttatgatttttttttttttgtttacttaattatctcttcaaaaatatgtacaaatttaaaaataataatatcattaatcaaaaatattaatattcaaaataatttaatatttacttttaatcttttggattattaattatttttcccataaaaatttatactcttcaatctttcaaaaaaattattttatcttcaaaaatatgtacaaatttaaaataatgacattaatcaaaacattaatattcagtttaatattcacttttaatcttgtggattattaagtagttttcccttaaaaatttatactcttctatcttttatctatcacatatatataaagatgagtgaggattatggttttggttaaattattttatctttttgtagttttttttactcatctctttaaaaatatgtacaaatttaaaaacaataatgtctttaatcaaaaattaatattcaaaataatttaataatacttttaatcttatggatcattaattatttttcccttaaaattttatactcttctattttttaaaaaaattattttttaaatttaaatatttttaaattaaaagattaaaaacaagaattatttttttggtatggtttagtatatgtaccatttcattattttttatataacttattttcatccaaatgcaatctcttcatcacaatgtaatctcttttctatacatctgatttagttaagttatattatctttgtgggtaagagaaaattagtaactaataattatagtaattaataatttatatagtatgtatataaatttatataatataagatttgaattaatattatttttctttactagtctattgtaattactattttatagtagtagattatttataaatttaaaaatcgtaagagaaaaataattataaaatattctcatcaaatatataaaaaaaacaataccactaatatatttattacaaaaattattcaatccatatataaatttattttttattaaatcatattttatcatttttagtttatgtaatatatgatttggattagtgttatatataatctattataattattattttagtagtagattatttacaaattaaaaaattgtaaaaaaaataattatatataaagcattcacataatatacatatataaaataatatcactaatgtatttattataaaaatgatatataatttttttcaaaaaaaaaagcatattcgaacatttttaactatattaaaaaaattattttagactaaaaattgttgtctaaaaataaaatattgtaagattattgtatattttctttttttttttacaaatttataaaatagatttgtcacaatttatttttaaataaagttttttgttatacaatttgaaatttgaaaattttaataaataagatgtatgtacaattttattttactttagaaaattaatctgtagctataattaaataataggctaaaaattttaatattaacatttagcaaattaataaataacctaaaaattatatttaggtcactaaataatttctttgtggtaaaattttattttgcagcaatgtgattattactcattccactaaaattatagaaaaaacatatgacagattacaagtaattcattttagttttgatttttgaatatatttgaaaatttcttaataaaatcttaaaaatattattaaaattaaaattattttaaattttaattataaatatctaaaattagtttaaatataattattaaagtcatatattttatttaattaattttaacttaatgcatataaatttttaatacttcattttaatatgacaatcaatataagtggggtcataattaacagttaactattgtttttataaagagaaaaaagttctctctatgtacatagactcaggtatgacaatttatagttcataaataaaatgaatcgaattgatatgctagactgaatttttgtgaaataattttttaatattactaaatctgagatcgtcatcggtttagatttaaagcttgatatcatgatgaatttgttgaattcttttttttttttgaccaaattaaccttaggatattaatttaatgatctatttttaaaatacaagttccaaattattattaaacaaagtataagggctaattgtatattaacgctaacataattttcaaattggtatttttttttgaattattattaggttatttttataaaataagaaaataattaaataattaaataattaaataattaaataagaaatgcatgctaaattttactttttgttttaatttattcaatgatcatctttgatttggttttttaatttcattaaaataattaaataagaaatgcatgctaaattttactttttgtttttcaaaatgaatttttaattctcctttaattttaatttattttagggtttctttaattttaactatacatttgaaaaattaataaaattataaaaggcttgacatacgtgcaaagcaaattgaatcgcgtcaattgaatcaatattgaatgagttataactattttactgaaggcagttcatgacccaacgcttaggttaacatctagcgcccatgttgacatatgacgtcaacttggacactaggtaagtgtaaaaatatccaaatgatgtaccttaagatgcctaagtgatattttgacattacttagtctgattttgtgttttggagaaactggtcaccagttctcggagatgttgctgttctgcaaaaatgagagactcaaaactcttcatttctaagtgagtttcccatgttagaaatgagaaatgcaaagttgtgattttgacttctctgacttcatggtttagttattgtgaaatcctagacaggcagtcaaaatagaatcagaattggataagcagaacccagcgcaccaggccatttgtaaactgggcgatgggtaccctattcccaagctcctgagatctcgttttgatatttcaaagattcttgaacttgaggacgaggtctcctaccctatttttgaccattcaagattcattactcaaattaaattttgcatttgagtaattgaaggtagagtcccaggttgattgtcaacttgggcgctggaccaaacactaggtcaacctgggcactaggccctatatccaggggctaagttttgtgattttctccatgagtttgcttgaatcttccgatgaccaaaaaaatacctagaatactttttggtgaacttgattagaaacatcccaggttgatgtcaacctgagcactaggcccagcaccaagtataaatttgggggctcggtcccatttatggcccctcaaaaattttatttgatccctaaaaatagttaaatctcaatttttttataacggagaagatgcttagaacagttcttggaaagcatcatctaaatcgccccaggttaacgaaatatcaacttgggcccttggccagccccgggtgtcaatctaggcattgggtcttgtttctagcacctaggaagtgtcgtttcttccccaacggacctatttctccgtttttgatgaagacaaagaagatgcaaaagttaaatcgtcgatctaatacttggaaggtgcccaaattgacaaattgtcaaccagagtgctggggtgctcagggccccaggtgctcaaaatgaacttgctctgattcttattccgatgcctcaaatatgtttgtggtatgtctagttgaattctcaatataagttttgaccaattttcactaagacggtctctgaaactaaaaccctagttgagaatgtcaacttgggtgccgagtgaaaccctaggtgccaggttgacctctaatttacaggtttgtgtaatttcagctcttggggcttgtattagattgctccatgtcttcatggtacagaatactgaaagatagtgagttgggttcaagttatttaagttcgaacttccatcacggagctcccgaagtcaacttaggcacggagctagggtctcctcccaagtcgactgctatgactcgggtctactcaactccgtgacatcatccatcttgccacgtgtcaaacattaatgtttaagtcaccagaaaaagtttatgagttaacaatctttccttaatcttcttcttcacactcatcctctcttagaaggattgaactactaaagcgtcacataaattgtaagggtgtggattaaaagaggagttttacctttgtttctactatattattactattactattagtgcagaggaaaaacaattctttttgtagtaataatgaaaaatatatttttattggaaatgtacaaattttgtgatgttaaaaataagaagtagatggcaataaaagcgaaaaacataaattttgtagtatatataaaaatatgtgggataaaaataaaatatataaattttatagtaacaaatataaaaatatgtaaaaaaaagatagataaaaataatattattttatgaagtcaaaatataaaatattcaaaaaaaaaatatttatgcaaaatttatattataaagaaattaaaaggagggaaatgaccgtacatgatccctcctttccccacttattattattattatttattattattaatgtccatcatttatgtaatagtacaagttactaaaaaaaaaaacatagctatacttaatgataattttttagtcgtaacataaattttttgtgattaaatgtgacttttagtcacaatcaaaagttatttatgactaaaatatagtatttagatacaaaatgtcactaatttagttttagtcacaacaagtattgtgactagtcacgataaattgtaatttttgtgactaatacttttagtcacggaccttttagtcacaaaataaaaataataacttattgtaattaaaagtaaaattttttgtagtaaaattttctatgagtctttttgtttctggaattttttttttttttttttgtgtgatagataccaaacaaagtaagtaacattaaaaaaaaacaaacaaagaaaaaaaataattaggactcaaatcaactaaatagaaaatattatataacgtccccgcttcaagttttcattgggcccttacacccacggaatgaatgactcttatacacgagtacatcactctggttgcttcatggactaccaacacaagtgtttccagcgt

SEQ ID NO: 69516 - DNA, 4458 bp, Cannabis sativa
ggagggataaatagggggatgggggcggggattgcattccccatacattaaccgaccaatttccatctctaggtttgattgtggaaaaaaggaagtgtcgtgacgcagagtagagttttgatttggttttgttgcggaatattaacgtagggaggcacgcatttccataagtctcccattcttggggcgtcctcacctcaccaaagcaagccgcccaataacaaaagcaacccaagggaccccattttccatttcattcagctctgacctctctctcaaccctctccttcattggacgactttttcttcttctccgctctgaccgccattcctcattagccatggcgatgttcaccatctcacgccgattatcaactggatcaacgacggcggttggagttttacgttttgctacctcttccagattctactctaccgcgtttagagaagaaagagacacttttgggcccatccttgttccctcagacaagtttcggcttctgctctaatgaaaatcaatatatcaatcattcaatcaatctcaggtttcgccgaacgagaaatgttaattgttatctttgtgtctatttttcaggttgtggggtgctcaaactcaaagatcgttgcagaattttgatattggtggagagcgtgagcgtatgcccgaacccattgttcgtgctttcggaacccttaagaaatgtgctgccaaggtttttttttttattcttttactggttactacccatttggagttttggtgtaaatttaacaaacttcaatcttgattgtgattttgttgaagctttgcctttttgcctactacgtgtttgttatatctactaaatggaatttttaaagtaatgggctataaaattattgtgttgcaggttaacatggaatatggtcttgatccatctattgggaaagccattatgcaggctgcccaagaagtagccgaaggaaagctaaatgatcattttccacttgttgtgtggcagactggcagtggcactcaaagtaacatgaatgccaatgaggtcaatgctaattcatgttttcctatcttatttgttctaatggtctcttcttcatttatttatttatgttgtttatggcagcctttttttaaaattcattttgattggtgctatgccaggtgattgcaaacagagcagctgaaatacttggccataagcgtggtggcaagtttgtccacccaaatgaccatgttaatagatctcaatcttctaatgacacattccctactgtaagctttttctttttttctacagtgaccttgccctttgttctatctgttatgtgatgacttggacattgaagcgatagtatcccattttctaggtaattgattggtcagtttcttgatgcctttttaataaatgagtgattactttcccaggtcatgcacattgcagctgcaatggagattcattcaagagtattacccaatttgaaaaccttgcattcttctttacattcaaaggtttggcatatgttgttttcatttaaagcaaactgacatatttttgtgcatttgaatactcctaatttccactaatgatttcaccagtctgttgagttcaaagatatatgtaaaattgggcgtactcatacccaagatgcaactcctttaactcttgggcaagagttcagtggctatactacacaagtaagatatcttttttccttttgatttgtttttatactcataatcttgtcctcggagtgtctactgatatctctagttttttaatgtaggtgaaatacgggattgatagagtcttgtgcactcttcctcgcatgtatcaggttagccttctgtagttagttgttcatttttttcattttagtttcagttataagtaattgcttgttctttgagcagcttgcacaaggtggtactgctgtaggaacagggttgaacacaaaaaaggggtaagtgaaacatttggattctaacatagtgattttacttgagcttaaaattagattagaaagtgagttttattttcataaactttggaaatgaaaatatatgtcagcatttctcttgagttttgactaatttataagtttgtctgtatgttactttgcctagtttgatgatgttcacatttctggatgttgtgcaggtttgatgtgaaaatagcagctgctgttgctgcggaaacaggcttgccatttgtcactgcagagaacaagtttgaagctttggtcagtatccattaataatgtattttgtttatttatttacatgtagaagtaagaaatacttcacatggttgaagttttcctttgatcaaatttgttgtattctaaactattttgtttttaactaggctgctcatgatgcttttgttgaggctagtggcgccctcaacacaattgcaacgtctctaatgaaaattgctaatgacatacgcctgttaggaaggttgttttttgatacctgcacttgcttgtatttgtttttccccttcttcctgttcacatttaaagatttttaagctgctttgctgtgcagtggtccgagatgcggtctgggtgagctcattcttcctgaaaatgagcctggcagcagtatcatgcctgtaatcttctttctttccctttgatgctgtagctagatagtctaaactgattagattattttaagaatctattataccattaaatttgtcaatttgactgggcatgcttttgttcaggggaaggtcaatcctactcagtgcgaagctatcacgatggtctgtgctcaggtaattaaattgtgtttgagtctggtccattaaaatgattaaacaataaaagagccatcagtgagcagttactaactatgattcaaacaattgctaaatgttattgtaaactagcaagaagtatcaagcttcatttgatattatagaccataccagtttaacactatcagtatcattttgtactctatcctttgtgttacagattatgggtaaccatgtggccataacagtaggtggatcaaatggtcactttgaacttaatgtgtacaagcccatgattgctactggtctcctacatgtaagttctgctttagattccaaatttttactttatcaagtgaaccttatcaccttatcttttttttcacattcttttagaattcaggatattgaattagttgattataatttcccatgcctgtctttaaaagttgtttcacagcttcccgtctcttgcattcttgcctgaactggctttttcctcttattgcttttcccttagtcattgagattgcttggggatgcatctgcttcttttgaaaagaactgtattagaggaattcaagctaataaggagagaattgcgaaattacttcatgaggtcagttgattggattctgttaatgatacactacactgcttgtgttatgcttatgctatattttaactcccaaatagctaatgaattatgctgtttgctatattctcagtcattgatgctcgttacatcattgaaccctgtaagttctctgaccactattccctttacaataacatttacatttgatttgttataccttgtttatttcctaacacatttttttctgccttccctacagaaaatcggttatgacaatgctgctgctgttgccaaaacggcccacaaagagggaactactttaaaggtgatgatttgtgaaacttattaaattttaagggctttgcatgtgcaactttgaatggataactaaaacttactactacacaattttgtaggaagctgcactaaaacttggcgtactatccattgaggaatttgataatcttgtggtgccagagaagatgattggcccctcggattgacaaggcttatagctgaggctaataattatcaaattttctaatttctgatagatttttctccatgtgttagacaaggagattagaacccaaaaagtagtgttattcttgttgttcttgaaggttttcaccataatgttaataaaggaaaagcctcctacaattttttgctgaacaatgtattggggatatagttaatttacaataaattcatttttgggaaatttatacaaattatcatttttggtaaaaatttgttcaattttttttttttatatatatttttatagtattctatataaataacatgaaaataaaaaaaaaaaatcatatatataaaagtgataagaaaatatctacaattttaaaataataaaaaaccaacaactaattaacaaagtataacatatgaaaacattaaaaggatgtattttctgtaaataaaatataaaaatatttgcacaaaattgtatttttgtaatatttttttttgttgttgtttttgtatatttctaaaataatcacttcattttaatggtttcattatatttatataaatgtattatttttcaggggaattactccatatactatt

SEQ ID NO: 69517 - DNA, 1919 bp, Cannabis sativa
tcatacaattgctaattaatctcaattttcaacactaaaatatatagcatgggacctacatattattaaatttttttggttaatagataatgatacctacctattatgggttgagttcatcttccaatcaattagggttggagttcatcttttgggttggttgtcatgatataagagaatcttaataaatttgtgttttgcatccatccacaagatatttaaaacaaaatatatattaattgtacgagaataaaaatgatatatatttttaaaatatgatttgatttagtgttcaataagggccttagggtattttagtgtctcgatgatcaagaccagccaaattcatagtgattatattcaaattgaataagtaaagaatggatggaatgaggtttaattagaggtgattttcagagataaaagttattggcataattatagtgtgtgaactgtgaacccaacccacctaataataatatctctcgtttctttgggaacaaaaagctccgtgacaagcaatcataataataccaacaataattatcaaactctttaaccaatatatttcattgccatcccattgggtcacaaaagcatcacgattacgattagtgaatcattctttgatatggataatttggtcaaattatctaaaaggatatcgaacatgtacacgtgtacggtcatcctttcaacaagactcataggctggcttgaccttcattcccacgtaaacgtgggtaaaccattaattccacgtggcatcttctgcatcaggagaattacatccatttcggatttatatggtaagtccaaagttgacaatttttcattcaattaatcggaaaattttcactactacctttttaaaaaaaaaaataaaaatcatttagtaccttgacattttaatatttcagcaaaatctaataaaaatgtatggtatttgttgttaataggaaaaaataatatatttttaggcgattttgtttagaatgttatttctctgtgatgtataatacatttttctctaattaaagacttctgtatatataggtgagatatattttagtttgcttcttcagttttattttattttatttttgtttaaatatataacagtatccaaattcgaataaccactaagatgccgtggtcccagagccaaaccaaaatttaataacatatccaaaatataccctctttttttatattatacatattttgggataaactttcacacgtacgagggattttaagaaaaaaaaaatgttatcaagatcttagtgtgttatccaaaactcaaatgacatttttgtccattatgtttagtttttagttattgaacaattttacatgttactatcagataattaaattcaagtaaagagtatgttatgttgaaacctaatttcacacgtgtgtgcatagaaaaattgtgctgccgaccaacttataaaaaaggagaccaaaatacactacaacaacaaataacactacaaaggagacatatatacataatatttacgacaaataatatagagccaagaattgcattcttaccaagccaagagagctacatcaaaagtgtgctggtattattatgaatacgaatctatttctaataaaaaaaaaatgtaacaagatacctattttttttttaaaaaaaaaatcaacaggatacctattacaacttcattctaaatctccacaatattttttgctatagttacaatattacttttgtatattttttcaaaaatttcaaacaaaaaattgaaatatttgttaattattctgaattttataaaaactttctgaaatagtattataactataacaaattcaaaaaaaaaaaaaaataataagaatttaattttaaaaaattatttttgccactttataaaaaaaaattacac

SEQ ID NO: 69518 - DNA, 5112 bp, Cannabis sativa
aatcttattttcggtatcttaaaattatttagaatttctaaaaagtagccggatgcctaatataaatataatttacattatcatataaatgaatttgcattttttataccaaaaataggaaatcctttttacattttttttaattacatgtaaaaaattattaaaaataaaaatatataatttttcattttttttctaatgtattgtcattaattgatataaactaaataaataaataaagactgaaagaagttaaaaatataaacatttggatttatttatttagtttgaaagccttcattaatttaaatttagtccctttttgatttcttattttgttcctttaccaactattaggtacctacaaggttctgcagcattgggcttctttggcaatgaaactatatcagtagacctcaccaatggcaagaagaaaacattgaacaatgtcctaattggttgtactcaaacgattaaggatgagcaaggcattttcaaaggagctcatggtgtacttggcttaggcaatgggaagcacacattcacatcaaaagcagctcaagatttcggttccaagttctcgtattgcttggtcgatcacttgagctcccaaaacttgacaaactacatagtgttcggtcccaccaggcctaaaaccgcgctctcgagccgtgtgcagcgtacccctcttgttttgggaggcgctctgggtccactctatggcgtgaatattgtgggaatctcagttgggggtcaagtggtaaacataccaccggctgtttgggatgtcaaccgtggaggtggaacggttcttgattcgggaacaagcttaacgtttctagcagaaccagcttacaaacccgtgacagctgcattcagcaagtacatgtcgaaattgcaaagattgcctgacgatggaggaccattcgagttctgttacaactcaactaggtttcaagactctttggtgccgtcgctaaaaatcaagcttgcaaatggtgctgtgtttgaacccccgatgaagagctatatcctcgatgttgcaccggagactaggtgtcttggatttgtttcggctagttggccaggcacatctatcatcggcaacatcatgcagcaaaaccacttgtgggaattcgatctagggaaaagtctcttaagctttgcaccctctacttgtacttgattaattcttacacatacacatactattgtgtgttacaaaaccccaagatactttcatgatcgtatattccactgtgggattgctaagatttcaatactattaactaaaattattgttactaaaacacatcaattaacaaagttagcaaaattggacatggtagcaaactaacaaacctagtatgacattaatcaacgacgataagcatctcgggacaaagacaagacactagagcactcgatcacaagcacttagtttaacaaagaagatagtattttacccttttctacaaataggaagaagagagagccttctaagagaattttctaagctatatttggaccgaggcacgttaaaaagacatgcacgattgtcctaaccgctaccatttctttgttcaaatgcttcgattgtctacaaatgacagtactaattcattataagcattccagctacccaactgtgtaaacactaaaacagtttgatataccacatgaaaataaaatagccatttagcatatatatatatatataagattgaatctaacacaatactaaaatcacaataaagatttgtaaaaagcaccatagctgaaactacaaacaagaaggaaaaaaaatgcttcattcaagctttaaaattaaagtccaaagaaattgttacatctgatagcatttgactcatcatgttaggccttggcttttccagcctgaactgattggattctctgttgcaactttaggatctgcaagatgacataaccgatgtaactaattaatattcatcttgcattttcgagattctattacagtaatcttttgaaagcaggacataacagaaaatcgactagagtacacgcatgttcatccactagtaattcaagaataacaaatgtaaattatacaagcacatgaaactttcttccagcctcaattaattcaaaattaatcagaaaacaaaagcttatataagtatgagctttagccaccagaaatgaataaggagcttcaaataaagacatgttgccaatgcatttattcctatagaatcatacttaagcaatttttgaaagtctaaattaccgatgcaatgctaccggttatatgttatggctattttttttttctgaagtttaaagctcacacatcaatactcaagttcaggtgaaccttcacttgatttgtggaataggttcaaacgctagttgcgtctcggtctcaggtttcaatatgtaattgaagttgactttcatgtcttctgcaagttttgtgattaaaatgtccaattcatggtatttgagtttgtaaattaaagtgaaatgtaaaagggtcctacgatttcctaataatctgtataatgagataaataatataacaatgttgaaaaaattcttacaacctattaaactatgatgaactatgaagcttaaaaaaatgatgattttaaccttataattaaaaattatttggagatacaaaaagggcaggcgggactagctttccacatcatttcgaggaatctaaaagctgcaagatcattttagattccggattcccatccctacaacacctcataccttatgagtactaaagccttagatctattctacttcagagctatgaaagatagaccttgatgagaatcaacaaataagtaaccaatgcaatcaaagttaacataacaattcacaataatacatactcgaaacacacagatacatatcatcacaacctattcacaaatcaatatactaataagacatatgaagtgagaaagaaaacaaaccgcttcttttttgctattttgcttctcttctaaatcttgaagagttccatcaagccgtttcctgttttgcatcaatacataaatttacactcaacaatttgctctgacaactagaagagatcaaaatataaagcagtgaaagcaattgtacatgttatatggcattatgttatgaactgcaattgcctaaaatgcaatacaaacgaaagaaaaaccccattctgattgcttagttatcatatcttagttccataactatgaacttaatatagaataaatcgaaactttacctctgaactattacacatgtaggattgatgtggccagaaactacacttattattacagtaattaggcctatttaactaacttaagctagctagaactaagtataatgatcttaaacattcaaatattaactctaaaaatacgataaagagtctctgattttctctttagagtattacctatgcgattattttttgcatagactctcgaattacagtagattaaccattaatcaatcttacattaagaaactaaactgtttgccaaaaatcctattttattttttcatatatcaaaagaaagctccaaagttttagttttacaatgattcataaaacaagaaaagagaagcagaaacatacaattcagcagagatgtattcaattctctttttcacatttgcattagcctctgccaaatcttgcttcacaagaactggaccaatcaatttgtacacatttgcatcttcattcaataggtctaactcctaaaaaccaaaattcagattaaaaatcagtaaagggtattcaatttataattatataaatcaatacaaatcacttgggccccaaaagatttttacacaaaaccaaacagaaattgggggaaaaagaaaatgaaaaaataaccttgaggacaagctcgttctcgcctagttgaatggtgtacttctttctcacttggtggttcttcgaaatatctgttcaaaaaaagaaataataacatttcagatcaatattcgatcgtaatgatctccatgtgcttgaagaaatgcatgaacaatatatatatatatatatattaggtctaaaggtgaaattttgaagagagtatggtaatgggattttacccttttgaagtttgcttagatcgttagctttgttctccaattctcgctgaagttctttgacggcggaggaggaagaagatgaagccatcgttaagctttggaactgttgttgtgagttactcagagatcttttattctttttctctgttctgttcaaaattagaaaaataccatattttaacacattttgcataaatacttaagtttaatttttaattgcagataaatatttaaattttattttttacgacaataatacttaacttatatttctaaaaaatttgtaagtatttagcagtcaagtgtcaagtaaatgactacgtggcaatctctaattgattcatatcattaaatttttatttttatttaaaaattatgttaaatatattataataagaaaatgatacgtgaataataacttcatacttgatggtcatgtatctataaaagctcctgaaatataatttaggtactattaccgtcaaaaataaaacttaggtatttatctgcaacagagagtctaacttgggtatttacgccgtaaattactctaattttttataattttggtgcaaaaatataatttttttttttcaaaaatgatattttatgggaaagttgaagtaaaagttgaaaaatatagtaaaatgaagtaaggataactaagaacctttatgataactagacgagtaactagttaccatggggtaatcgtgtatcttatgttattttttacatatttttttactattttttaaaaaaattcataaaaaaatttttgagaaaaaattatatttttacaaacttatattttaaaaaccataaaaatgaaaattctccttaattttaattattttattaaataatgatatcatacaaagttttgagaatttaaaatgatttacaatatagaaagtacagtttttataataatccataatttatggggtacaactttttttaataaaaacttaagggcacaatttaatatagtataaaata

SEQ ID NO: 69519 - DNA, 2414 bp, Cannabis sativa
aaaataacatccaaataacatacagataacaaaaaaaaaaaaataacaagagtacaacataaaatgaccgtatcacaaaaagtcgtaaaaaaatttaaaatttcgtaaaactgtaattttgtaattttttttattgtttttgtatatttgtgaagtaatctcctttctctatcattcaatcattcacagtgttctaaattaatataatacattataacacaaactaagtatcgaacgactattattagcgacattttgaggtataaactttttaaaattgagaacaaaaattagccaaaaaaaaaaaagatgtaaacaattaggactactaatgggaaggaaaggtcaactagagatttggatgttgtaactaatgaatagagaatcatacaaaagaaattagagccacaaaggttggtggtattggtgccctaataagagggcctcaccacaacacttaggcctaaggtcttcaaccccatagtcttcccaaatagggcacagatatgactagagctcttggaccaatgcccctttcaaaaattaaaaagaaaaaaaatcacatgtgattcttttaaattatctagaaaaaagaatatatattaggttgaaaatgacaaagagatgggagtttctttcatttggttttgtatgggcctcatcatgtctggcccattgtcactcaagttaggccccaagactttcttagattggggcccggtccaactgttactaattatttttttaaaataatataaaaagctaaataccaaaaatctaaaaaaataaagttcataacaataattattaatattataggaagaaatatatttcttgtaactagattccacatgtcaatttaagtactcactataaacatttattattattattaataatgtagtttgatatatctaaatatgatttgcaatatatgaacaatatttgagataagaattagtggttggaaaattgaataaatatagttattataattagtaataatatagaaaggacttagctagctaggtaaggtggtaaggcacttgaattcttaactaaacaataaataatattaggttttcaataatattaattagttcaagtcatcttacaatatgccaaacctatatattttaattcaataacattatgtcaccacacacccatataagttaggctaaggcccattactttggctttttgataaaatattttaaaaatatttttttgttaatttgttgtatttatatgattgctttctataggattatatatatgtatgtatatgtatatgtgtgtgcatgtgcatttgtttataaaaatgccaaataaattaaagccacaatggttgcccatacatactattagtgcttaatagagaagcaattatattatggtccacactatttttatatatagttgttttgcctttaaagatgtcaaaaacagctctcaaatattcaaacttttagctaccaattgtaatatatatatatatatatatatatatatatatattgcttagtactattcctccactagatatataattattactattgaaaaatatgagtagccgtggtactttgaataagtttttgcaccatgaaaaattctcaatatatattgtcaccatctcataactaattcaataatatttgtgtgtgttaaaaaaaaaagaagaaaaaaacatttaaatagatgggacaaagccttaaatgttatgttaaataatatttaagtttaattctcagttatatataaatatttaagttaattttttagaaaagttttacaattatattattcttttatttattatatatataaataaatatgcatatttacaattatattattcttttattcaaaagttaaataatttgttttttcagcctttagatggtcataagaataaaaccctaaggttggtcatgggaattttctcttattatattatttatatatagaatagtgtttgtgttccgaaattaatgcagggtcaaaggtcaacttagttcaacacatgaatatatatatttgtgaagaaaagcaaagaagttgtatgtagatgaacattgagatttgacattgaggtgagtttcttcacgtatgaagaaagatttaatatatatttttatatatatatgatatatatatatttgagtgtggcgtattgaaagtagagtttaattagtagtggttggagttgacgtatatgtatatatatattgtttggttggttggtgctcatcaatgtatatctctctatctatctattatcatatattagagagtattctagactacactctcctacataataatctctatttaattatttatatatctatatattttttaaaaataaatattaatatgtacacacgattgtatagtgatgaaaatat

SEQ ID NO: 69520 - DNA, 5357 bp, Cannabis sativa
  modified_base (5091)..(5111): a, c, t, g, unknown or other
agcaggttttgaagggtattaatggctggataggggctgattggtcgaatcaggtggaaaactggcagctgtggactatgcagctgagaaacaaacagaaaaacttggttgctgcaagggttttttcagcaacaatttattatgtgtggcaaaatagaaatatttgtattttcaatgatttttcttatagtgtccaaaagattgtagagatgataaaaaaggatactaagtatagagtaagcaattttacttttaagaagttgaaagatgaagagaggagattattgttaaaaattacctttttgtaaggtgagtgcttgttgtgttgtgttgtaaagtcggttgtttgcttgttgattaatgaattatttttttcttgataaaaaaattttgtaatcaatctctctttagtctttgtattaatttataattgagttatattagcttgatttatttttattgtaataaaatatatcagaataaaaaaattctaaatagttgaaaaagaaaaaaaattgaaataccgttgtcctttgcttgaatatgtagttttggtattaaccgttaaaaatttacaatgactcggaaggtattaacaatagatacttactaaccaacagaaacttaaacatgagcgcattcccatagctttttccatggttgataaacgagcaaacgttatccatattcagatttagtggaaaacaaatccaagccacccaaaatgacaaaaaattgacacttttttcttaaaaaaatatggaaaaggaaaattacactcactcactctcctttctctctctatttctcatggtttagtctttgctgaaatctgtttttgctctaccatggaaaccattctttcatctcagtctctctttcctctctcgaatcacaaagcttcttctccaacgacttctccgtctccctccctccaacccagatcaaattttgtgtttttaccaaaacccattacttcaaaccttatcaagaaacaaccttttcaatcgcttaaaccatcttttgcactacccactaactggttttcttatgcccaacaagggttagctgctctagctctctctttagctctaaacttttctccggtgcttttgtcaagtggcactgctctagcttctgagtttgatatccttaatgatggaccaccgaaagaatcctatgttgttgatgatgcaggagtgcttagccgagttacgaaatcagatttgaagagattgttgtctgatttggagtccagaaagaatattcacatcaatttcataaccgttagaaagctcactgtaagttcttctttctaagtcccttttttcatgatgggaaaatgctgttatcttgtttggttgctgagaaaaatgaagaatttgtacaagttatttaactcaggctgtagataattcctcaacaatgcatttgttgcattgccaattaattaaaaaaacaaagctgggaaaaagaaaacaaaatctaaataccttaaactttgaaaactgaacatttcaagcgttgtgtttcagagcaaagctgatgcttttgagtatgctgaccaagttttggagcgttggtatcccaccattgaagatggcaacgacaagggcattgtcgtcctggtgaccagtcaaaaagaaggagctgtgaccggtggtcctgcttttgttcaagctgtaggagatactatccttgatgcaactgtgtcagagaaccttcctggtaaatgaaaaccctttgcttttcattcctcaagtcagtatttttggttttggaactaaaactctagtgataatgacttgttttagtttctgaaaactagctagctcccaagcaaaatagtcataggaagttaaccttgatctggttatgtctgaagaaatactattagctctaaacatttccttcatagttcatattgctttcggtttcagtcttggctacagaagagaaatacaatgaagccatttatagtagcgcgaaaagactcgttgcagcaattgatggacttccagatcctggaggtccccaggttaaagaaaacaaaagggaatccaatttcaaaagcaaggaagagaccgacgaaaaacgtggacagttcacccttgttgtcggaggcttactggtgattgcctttgttgttcctatggcacaatactatgcttatgtctcaaagaagtaaagtgaatgggacaactagatttgttgccattgtagattatatccagcaaattcctttaaacaaatgatattgttttgaagcttgatgagaaatttgtttcaagagaaagagcatagtttttgttaagtgtataagataccaactgaactttgagttctctttttactaaggctgctcatgttcatgattaatgatattgtaagatattactgctatacaatcagcttttcaggcaggtattgtgttccaaacgtgttaattggctaaactgttaatttatcatagcataatcaaggaaagaagaaatacttttatttagattgtttatttccattccatgtataatttccttttcaatgaaagaaagtgacaaaaactaacatatgaaagaatcacatccaatatcaaaagaagaattgatgttgctgctctgttatttatggcttctggttgattaaaagttacatttgtcagaacttccttaaagttctttggttcatgacaaggtactaaggaagaacaaagaatgtaataataataataataataataataactgtttcttattgtgtttagaacttgagcttcaggacgaaaggcattttgtctgagaaaggtggatcagaatattttccagtgagtatttgtgaagaaacaaactgatttgcagcctctgtataatgaattccatcccaactgatatagtcagtactatcagtgcacccttttgctgtaactgaagtcccattcaagatctttgtttgtccacaagaaattctaaaatcatagttcaatggcggacctccatacccgcagcaagccataataggttgttcaaatcctggtacaaaaaaagaaaaatcaactaatccgtgcacctcaacagaaatcaaagcaagtggagtttagttcgtttttatgtatactgaccatatttgctgtagtttgcaataaggttagattttattgagaagatatcaacataagtgaaatttgtatctgagtattggccctgtaatttcttagatagagcatgaagctgaagattgaacagtttagcggcttggttgtgtgcgctgacgcacccttgttcatcaagcttggatgggtcagttccgaatttgagaacattctgagtcaagcatccaagagggcctgtgttgtgtatccaaaaatttctggccccttgatcatatagatactgaatagtaaacaaacaaagttaagaaaagtacaggaatcaatactgatgtttatgactaaattttgtgttgttgaagcttacctttatgccattttcaaattctaacaatattgttggaattgaagcaattatctgatcgaacgttttggagtaaaatgcaccagcaacatcattctggcctatatcaaacatgtatagccccttggagaaaacgtcctctgttggaatgtacttggaaaactttctacctaaatttgtcaaagaaaattttctcagaaactatttacttatttctatctgaaaccccttataaaacagaggaaactttggcatttttgcactgttatagctaaaataattaaaatgaacaagaaaatataaacacctttagccagcaattcaagagtcttagctttaaatctgccaaactgagacacctgaagtccaaatgaaaaagggctaactgatgttgcagttgctgggagcacagtagatcccgcggctgcgaaattgcacccttttcgaaaacttggcgcaccaatggaatccagataggaatttagaaacggaagatccattgcatccactgcattattgcactcgtagatgttaaaaatctaaacagagaataactaaaacaacagagaaaaacagaggatatagaaatgaatgcagcataaggagagctataaaagattatttgtttactcaaaaaatcaactataagacgcccatcagagtatctcccagatgggattttgaagtagttttgtccatatggaggattaatggtttcaatcccagaagatacaagcccaccagtgtcagagttagaatcaccaaagttaaaaacagcagggaagttgaactcaaccgatttggccagaggaaaacagagatgaaccaaggtgaggatgaagagagctaaagtcttggtagccatggcaaatgagagacaagtttgttgggttttcagttttcactcttataataagtaccaacaacccaaaaaataaaataataacaaatctcttactatggaagtattaacatcttctggtggtggcctggtgggcctcatcagtcagttgtctatgactttgcttttaattttggtgagccaaagtaagaaaacaaatgtttaaagttatcttcctaccttctatatgcactttgcaaaagggtctctactaatacaatttttagtgcagaatcatgcatattagtgtacacacatatataaatatatacttgagtaaaagggtgagaaaatttacttagaaaatctacgattagacggccatcacaggctctgccagatgggtttttgaagtatgattggccataaggggagttaaggaaggacccataagcagcaacaagctcaccagtgtcagagtttgaatcaccaaaattaaaaacagctggatagttgaattcaacaactgaatctacacaaggtgcgagaattgataatagggttaagatgtggggaatcatcatggtcttggaagccatggataaggagcttggtttcacaattgaaatcccacaagtatgtgcgttattatttataagtgtacacaattatgtttgctaagaaaaagttcagttactttgccacaaaaaaaagttcatttacttattattttgtcacgagaaaaagcaagttgggagttttctctctctctctctctcnnnnnnnnnnnnnnnnnnnnnatatatatataaatatttatggtagtgacagtttgctttggattatggtagtgataaaatgagaactcaaaagcattgtcataaggaaactgtaatcatgtgctatatagttaccccttatgctgtggcgggcccaaaaagtctgcaaactccaaaaatattttgaacacctaaattaaagagcataagacattatttttttttggtaaaaaaaaatatatttttacacttaaagatttttttttt

SEQ ID NO: 69521 - DNA, 2587 bp, Cannabis sativa
ataattaagcaacaattctcaaaaattgaatatacaatgcatgatcaacaagaatcgagtaaaaactattatactcaaaagagaagataccaaaatattattattttacaattaattaaaacaaaacaaacaattagaaatactcgaacacaacacaaagctcctaatcaaaacatgatatgtcaaatgacccaataacgcaccaccaatgagccttctcctacaacactcgacgactccaagtactcgaggttgccattcccaaaccgaatcgatcaacacaatcttatgacctaacatgtttctaaacatattcttaacagttcaatattattaccaaatcataaaaataatacacaaacaacgaattacatcttaaagccaacaacctctcctattgcatagacaaagccctaaatataaagctctaagaaaatgcaacaaaaacaagaaagcattgtcacaatgactaaccaccatcaagtgaagccaagcaccatgaacaaaacctaacaatcatagtcatcacataaaataataacaacatacttacagttaaaagaaagtcaaataattagtcagattgtttagccttataaaaaaatttatcaaaaaattaaattagttacattgtctgatagctgctaaaactttttcaagggagagcttttgaaagttcaaaattttggagaatcgttttctatttttattttttttaattattttctattgaatattaagaataaaaaaattgtataatttttattcaacaaaacattttgcttttgaccaatcatttcctcatatactcaagcccttttcttatgcaaatcattcacactccttaataataccaaatgagcataatttaccatcaatgaatcaaacttgtgaatattaaataaaagtaaaatcttataaataaagatttagactaatttaaagaataagaatatgtgagacaaaagtcattacacatcccatacaacaacaacaacaacatgttactttgttaatctcaaaaatatatatatattttttaatttgtgcaattaattattttctattatcacatattattcatgatggaaaattattggtaaagaaaaaaataaacaaaatagatttgagtgagtgagggaataatgtcctcacaatgtcactttaggggttggtgagtgttaggagagtagtacttttttttttattaatattattattatataaataaataaaataaaatatgatataataacaaaaagttttggtctttcaagatttgtggttggtaatgggcaattgtgtaatttcaataaaccaaccccattagatgtggacattttccttttcccaaaacttaagcctagcttttaggtgagtctagttttggttggatttcactttctatgagttaattactaaatataaaatgagccaccaaaccaaatatataatccataattaaaccttaataataaatttataataagaaacaaatatgattactcagaaatataggtaagttaagacttttagtatatatcttaccaaacacacaccaacccccttagctatatgagtgtgtatatatatataaatataaatatagataatataatataaacaaaatctaatgcttgatcgtggtgaattttacatgtgataagttctatatgattttaatattgttatataatagtaatactcaatttaatgtaatatgcaggattaaatctaattcaatctaattcgcacaagtgcggatatttgtacttgtgtggattagattagattggaaaatctaaaatttatatttgtgcgaattaaatattgattagcatataaaagttattgatttaatacaattcatacatttttatatattaacaaaaattatatgcataattaatattttaatataaaaaataataatttaaaaatctaatacatattttatacaaatatattttaatttttaatagatcaaatgtatattctaattttatttataaagaaaatgtaatgtaaaataaaattcaaaaatatctttattcatataatttttttttgttctcttaaaaatttgttaatttttatattatttaatttaatttgttattagtgacataaaataataattattttattttattttgttattcttatatgatttattttaaaataaagattaaataatttaatattaaaaaatagtcaatttaaaataatcgatctaatttgtaatacgttcttgtattatgattagttgattacatttttttctattaaatttgttgaagtatattttttttatagaaaatatagaaataaaaaaaaaagtttaatacgtagctatttcatgtcatctcttccaaaaggaaaaaactatttttggtgattctatttttgcataatgaatataaatatgtgcttgttattagtggtgtctattattttttataaataatgttttacaataaattagcgatatatttttttatttattttttaaaattatataaaattaaatacttaattataaataataataaatatatattgttatatataaaaaataaataataat

SEQ ID NO: 69522 - DNA, 2642 bp, Cannabis sativa
tgaatgccacaactctcgaaagactaacgaaattttgaatattgaaagcagaataagaaatttcacgcacaagagaagagcataacagtccagagagagaagcaaaaggtttgcgcggtatcattttttatattaagtttttccaaacaaataataaagtctcctcaaagatgtgtatgagaatctcaattaatccgttagtgtgaaaatattaaacagaaaaagattcacagaacaaaaacaaaataaacaaataaaaattgctgggttgaatttatgcacagaaataagactaattatacatacttctttcccagcagtagtaagatatgaagcgttggtgggttgaggatagactccttgactgttaaataaaccaggatcaacaccctaaacaacacaaaatttggattcagaaaaaaaaaactaagaaaacatgttgagttgctataaaattgagaaaaatcaagcaacaagaaggaaaaacaaaagtgtggtactagccttatccttgagttttaatggacctgagctcgtattgcaatctgcatcagagaacctctggtttccaatatcctggacatagttttttatctctaaggtggataaggatgagtgctgatgttgtttcacatagatcatatctttcccgccaatagttacagatattataacatgtgtcccgaagttttctatgaagcttaataaagaggaaaaagaaaagcaatcagaaagggatcaggaatatcttatcgtcacatttcacctaacattataaaatgcataccttgctaaggctgctgggtcccaattgcttggtacagctcgcttgacattttctttcaatacaagtggggacataagctgaactttggaaagtggaatgtagaatccatcaatagaaagggtctttgtggatgcagcgtcaatatgcctcgtgccagtgaaattgaatgaagcattaaaattaccgagaggaaaggccccagaaagattagccttttgattgaaatattccaccatctgcaacattcaacatgagaagtatgatacttgaacaatattacttcaaaacactgatagtttttcattgcacatctcataaatcttaggtttgagcaaaatatataaatcaaatatttgtttcaataagctttaacattttccaaacaataaacactaatgcacactgcttccacctaactttaaagtaaaggtgaatatagccaaacataagaaaacaaacactttaagattgtccgaatcttgaatctctctaactgcccaataatacttggaaacatcaccattttaataatcagttttttatgtgaaaaaattgcaatgtcctgtggcttttgagggatgaaacgatgagttgttctgatcaagtttcaaggacactgtggtcgtgtaaatcaagtatcccagccaacaaaaccacttcaattaagtttgtctatatttttggttcaactcaatggtagtttgcgtaaatggtttcagcaaaggtgtagctttctaagttaattccttaattgaatcaatacctacccaaagctataaatcaatgtccttcataactgatgtatagatgcactcgattaacaaatcaaacctagcatagagaagcacaagtaggggtatgggtacttaactgttaaatgtatatataaatatctactgtttgttgtaagttattgtttagcagtaagctttatgtcctaacttgttagtgtgttcctagattagtggtctcccctgctaacagccctaagtttaagtgattttactattaaagaactgaacatgtgtatatgtgagagagctctttatgctgcgtaatatatctcagtgaataaaaaatattctgactgattacattttggcaataacataatttaaaattttcctaatttcagaaaatagaaaaacccatatgatcataggtcaatattccttttcagaagaaattaaaaatttatcaaggttgcagatataataaggtatcaatctgaacagtataaacaaagctggaaatgaaatagcaatgttgatcacaaaagccttaaactaaaagcatccaaacagagagaagttttaagctcttttgccactctagcacagaagaaagcaagaatttcacccattaccacagagaccgtactccatttccagctaaaaatttgagaaaggtgaaatttttgagcttttctaaggatttcagtaattgaaaactcatagttagaaggcttctttctgattcaccattcaatatagcaagctcatttaagttataaattggtaaatggtcactgcagtttgcttctctatttcatagcaatgacccatatactactactccaaaagatgctgagctaaattctcatccaatctcattgcccattttgttcttcattcaggttcctagctactccagctagtttatttatgaacatttgacctggatttagctcaatcaccatcaacaagcaaattgggcacttaactaatattagctgatggaagaataacaaaaagaacatttacaacagaaccgattgcattgagttttgcaacataaggttgatcaaccaaaactaattccagtcaaggtagtattggtagtagtatctgataaa

SEQ ID NO: 69523 - DNA, 5135 bp, Cannabis sativa
ctacacgacgctcttccgatcttgttaaataacatacatggtagtaaatttagatcctggtaaaataaccccaacacccttttgcttgcatccttcttcattagaaatgtcttttcctttctctgatttgggatgaattttttttcttttttagccttgggtagggcaaggttataacattctcgcatagtcctttgattgccttctaaacaaccgatccccattttgtgttgggaatttcacacacaaatgataaacagaagttgccgcttttaagtccatacatacaaggctggacgacctaacatgacgttaaaagcatatggaacatccaccactaaaaactgtgccatgcgtgttgtttaagttggagattttcccactgtgagtggtaggcgatatgttctgagtggtgctatgctctggcctgagaatccataaaacagctatggacacaaaattaaatctttgagatgaagatccattttctcataagtagttttgtacaagatattggaagaggctccattatcaatcactgtttgagctaccatcttgtttgcaatttgtacatccaccaccagaggatcattgtgtaggtaactcaaaattgtggaatcttcatcactgaaagttataattgaatcttccattcgtgtctgtttgggtttcctctcctctacgaccaaaatttcttctcctttcttgtactgaagagtttcagcatacttttcccttgcattattagaatctcctgctatgtgcgggccccttatgataacttgtaaattcccatccacgggcagtggcatcagtaggttttggttatcatcttgttggcctgccatttattcttgatcaacctttacatacctccttatgtctggattgttcttcttgatcaggaattcaatctcttcttttcgattcttgcactcgttagtatcatgagcgaaatctttatgaaagcgacattatttggaatgatccattttgcttgcatccttcttcattggcagggggcttttgtacgacaccactaaatctgtggccgtaaggatggcttttatatcttcagtgagaatagtgaaggatgcaaactttggacctttctcctgtgggtgctggttttcaggattaataatttttttccttttttttatttccctgattattcccaccattcgaccttttcccaatgtgactactcccacctgggtttggaactgaagcacttaataacatgccaagattttgtttctgacctgtagaacctactctaggagcaacattttgtattgcctcttccaacttaatgaatctatctgcccgatccaaaaattctgccatggagttcatcgttagcctcttgatgaccttccataaatctcctaatggcataattcctctaagcacagtagcgagtcttccttccttagtcaatccctttactcatgtggcttcggtcaagaaccgacttatgtaatctttgagtggctcattcaggagctgcttaacaccaaccaagtcctccaagtgtacaggaagttgcctacaagatgagaattgtgcaaggaactctgataagtaagaatcccatgaattaaacttgcatggtgtcagtttgaaatatcattgttgagcaacatctgccaatgttgctagaaagactctacaacctacatcgtaatacacagattgcaaatccatctacagcttagagttctttatatgtgacaagggatatttttttttccagtgtatgccttctaagttggctttttaaatttgggcagaagagggaacacatttattcgagcagtgtagggtgaacctcttgctcggtcaagtttaaggtcggcgagtttgggaccagtcaaacttttaaatatgcttttaagacgatctaattgggcttgcacccctggatcaacttgtcttgcttgttgactggcctatgtcacctgttgtcccccttgagctccgaccgacgcgtaattttccacattaatgggctgtatgtttggacgaactaccccaaacttttgctctctctactagttcagtgtgtgtttgagatcaacaggttgggttcccaccctctccaagatggattctctcggaggtcttcttgcatttttagtgttagttggtgaaatctccctccgagcccgtcaatctctttgtctttttgtgctggttgcactatttgcttcttcatcattgttacttgagtatcacttaatgcaagcagttgtagtttgaccctgctgtggagccgtgtacgcaacatattgaaatactaaacctgcccattttaatcataaatggctatagggtcttgaaaccctacatttggctgatgctcccacttggagcgaaatttcaatctatgttgcccattttgtcctgaaaactcttgaccatctaccgttgggcccacatttgtatgtggcctagaattggatgatccggcgcgtaagggattttgggtgtgagtcatcagaacttccagctcgtggttattcacaggtagaacatatggttcctttccacggaagggatctcgaacaaatggaatatctttttacaattactgtccggtctgttaattgaactgcctaatcagctttgtggtttcgcgtgaccggtgattgatcgcttcctactgagctcttagactctctgcctgcaattatccatacattcttggaaaatcctttttttgttgtgcaaatgcctcattcatagctgctcgggtatctgcttgatcaagatgaagtgtattagtgtgactttgaatttgagccactacttctccaaaatttcgtagctcggagtcatcatcgattgtcacctgagttccacttgttggcggcactctggagcccagactattctcccaaacaccaattgtactagtattttgtgtgctaagatcactcacaggaggatttctcgaattagcaggattttgggcatttggatcagttgccattggatctataagattagtggcttgagtccttcaagtttgtacaaccatttgtaatgttgattgaataaatcaatcaaattgtgttcttgagttctgctctcaatgaaagtaccaaaatattgacctcgcttttagtcaacaacattgggtccttaaagtgacaagaaatcaataagatttaagaaagatataattaataataagcaaaactaagaacacgatatgttatagaggttcaatcccattatttaggtaatgacttactcctcttgttattgtatttaacttatgagtagagaagtaaaaaatgaattaatttctctcgaaagctttacagaaaaaatgagcaacataagggctctcttaaacaaatgacctcagatccccttacattagaattgatctactatttataggggatatttacaatagaatttggtttcctcaagctgtcaacccataaaatcaagaaataaactaatcatcctaaaatactgaaaatataaatgggaataccctttgactggattttgattatatataaaataagaaacttcatttgtcaaaaaaaaaaaaaaataagaaacttcatcaaatgtatttttgtcacgcattttccccttggtcggattgtacgcggttcaaaccacttctttctgaccaagtttgttcgtgctaatgatgcgcgacaagttactcttaatttgtctgttaataataccgaacttggatacattttgggtggccaatccatgagactcttttatctgcctaggcctcgcggtgataatacatgtcacccaaaagaacttgtcacgacacctgactaaaattcaagataacaccaacaaataaaaacgttagtattagtaacacagaaaaagttaaaagaaatagctacatcatttttcaaaattaaatttaaaatagtgtaaaatgtgaaaactcctaaactttaatgtactttcatattggatcttagctaaataattacattatttaactggtaagaatactataatattttaccttaacaaataatacacagaaaatcaccactactactctaggatcatatctattcattattaataataataaaaggaaaaatataattattttcacacaattaattttgaatattatctttaaactaggtattacattaaccacaaatttagctactaatgactagacgtcaacgaaaaagttaataccgagaactaaaatgtatagaacaataaatataaatatctacaaaatatttatagtgcattgcaagcagcaagaagcgttgcatccactaacacacttagtattatttatatagtttaataataacttgcacaataaaattaaagaaaaaaaaaataaaaagcatcggtgctatgtaaaaaccatcatgcttatatttctttttgaaaagttaaatattttgttgagtaagagcatctctaatgctgcttctattatcgatgcccatctgatctggcaagggtatggctaccaggaagagtagctaatgcattggagtaaaaatatttgactactttagctgctacataagggcaacggtcatggggtctatattttgtacttttttgataaaaaaattaaagtagatattgaagataaatatagtgtgtgggaccgtagtaacttttagaattgctaagtattgaagtactttttagtagtaagtgaccaaaaatgacgtggatgatggacaaaataaaatattatattttggagtgatgtgtaattttgtagtaacttttagaattatttgcattaaagatggggctcattttctgagaagccacctcaataaaactagcattggagactagaaactgagtttctccaaaggaaatcttaaatgcataaggatctttacaacaaaaaaaactttgagacaaatttagagtgactaattatgatcactttagcagcctatttatagtctttacaagatgggtcgttgccatgagtaatataaccatggctagtacatgtgccaagtcataggttaactatagttattctagaaattaaataataaaatattgacgattaaaaggaatattttccatatatttttatgattccttattaattgatggcatatgatcgttgc

SEQ ID NO: 69524 - DNA, 5694 bp, Cannabis sativa
agtgcaaatcataaagttttcaggattacccaaagtactgaaagatcctcttagtttcgtatgaacgtatctgtgtagcttggaacttctgagtatgacgagtggtcctgtgagacgagtttcacgtcaagatatacaattggtatgttaataattcgagtctctacatttgttcaatttcttattgaacttaatctttccttttcttaaatcgtaaatatctatttggtgtatatgctatcatgttttcgtatcttatggttcttaactaagttccaggtacagaatcttattgaacgatgtctgcagctgtatatgaaccaaaaggaagttgtagatactctattggatcaggcaaaaatagaacctgattttacatcactaggtaactatcttgtcccgtttaactctaattgattgagtgttcatagacatagcctcttaggttccaaattcaaatctcccgaatcctcttaggtcctaaatttgaatctctgaaaagaaaaaaataatactaataataataataataactcattgcaagctattagccaaaaaagataaaataaaatcattggcattaattattttttaatcttttcctcctcttcaatatttgttcattccctgtatccatatgtgagtacctaatctggttcttctcatgttaatgtactttcagtttatttatttttctagcatttgtgtttttttttatataattaaaacttgtctgcgtgtaacagttaatgtgtaccagattaatcattcatactttcacagttatattcattgcctaccaattattcatattcactaggcacttaattgctttcacctcccttccctcaatcttactgtttataatctaacaacattatgctagccttttactcattaacttctctcagaagaccctcatacatcctgcagtagttgatatgttataatataaaaatatttatatatattttcacagctgaagtgaaataagacttaagggaagggactttataatgcatgtacatttggaatagtttttttcccctctctgaaaggaataggttatttttgtttttgaggacatacaaacgtgaattggagtttagtcatcttgcgtccatgaatttggtatttgtattctcttcatcgaataaaagtcttgtttgcatttcagtttggcagaagcttgaagaagagaatcaggattttttcaaggcttactacttgagattgatgctgaagcaccaaatattggaatttaacaggttgcttcagcaacaggcccaattgatgcatcaaatgcacccaagtggtgttgctccgctacctacatctaatggtgcccacatttcatgtaagtatactttattaagttggacactttataggctcaacataacttcagctccctttgcatcaatcagagttcaaggataattttgtattattgttctctcaaacattttttccgtggaagaatgattaactttttttttttattttgtttagtgtatcaatgtttggggaaatttattattgaagggtaatgttaagagaaaatgttcagttggtttaactcttgaataatcttcaattgcaagttttcctgttttggtatggaaattttaaggattggtttttaactttcttacctacaactggttttgatctaatcgcttatggcgtgtttggttggttggaagggtcatttatggactcacaattccattggtcaaaggaattgttgtctcaatccttcttctagtggaaagcattttccattctaaactacataagaaaatttatgtttcacctaggggtgctcatggtcactttggttggttttgaaattccaaaccagttaccaaattgaataagtcaaactttatttagtggggcatattttttatgtaaaccgaaccaaacgaaatgataattgaacctgtatattttgagcatcaataaactttaatatcatacttgaatataattatcataaattatatagttatcatgtattatcaatttcataataatttctactcaagcaaatgttaccaaagttaaaaaatgttaatatgtgatttttatgtgtatatacatacatatatatgtaaatatatacgataaggtctgtttgcggtctttgttcactcaaacacaaactgctaactaattgattgtaatttttaacccaaaaaaataacaattgaccaagtcgaccaattaatagataaaatcacttgttatagtctatattagcagttcattaacacccttaattaaaataaatagtattatgtaattaaattattagtttctgaaatttagtgtaatattgaattaactaaggtagtaaaattatttaattatataatgaatgattaatctcttctgctttagtattataaattcatccaatcactatttgcattactcttacaattgcattaatcattatttccattactatgttaattcaattccattgaacaaaacattatcttagttcacttagggtccaatatttcatgattaacaagttttttatgcgtattaatttagtatgttgatcactgttcagtcacagtttaaggaaaaaaggataaaaatatggattccgaaattcgatcttgtaggttgttagtttcttaagtagcatcacaccttttacatatgacaattgtcagttgtacatttatttaccaacgagattatctctactttcattatcactcaaagccaactaacttaacttattgtctggtattttagttagtttgtccaaattaattatctcaacattttaatggcatgttgagctttattatcttagcattaatgttactagttattactttccgacgtgtcatggtttgaaaactattgaaatctacgttttgaaacccattaggttctgaggtgtagaaaaaagtatcaaaacctacattttttttctgaattgttccaaacctacacctcaattaatcgaggcatctgaaacctacttggcatgagttttaaatcaggaaacttgtttgtctttggctgttctaacatttgtcttgggctttcttaaaaagtagtggttgtgtttttatcagattcttgtgggcccactgggcatattcgaatcaacaaaatatcaataaagacaaaacatagaaatggaaacataattactattcttctattctgttctaattcaattctaggtttcggaattttagtattttcttaattttgtgaactttgtatgctttcttattactttctatgaactaatgttattttttaatgcatatgaatctatgattattaattttatgattttgatgttatttgagacttacacctcagtccaattaaaaacatacgttttgatttgatcgaggaaattgcctcaaatcctgatttagcttttctaaatcttattatctgacagtgcaccagaactcagcatgctatccccaagagcatataggaccagctctgaagccagaaaacatgcaccatgcagttggttcttgtttgtccaatgcatttaccaatggtgggtcttcagtgcaccagggtatgcacaatgctgtggatatgtctgctcatgctggtaggattgatgctccacaaaacatgatctcaacacagaactctaacatgggactgttgcaaggaataaatggtggaatgatcaaatctgaagttggcaggatgatcaaatcagaaggtggtggtgtcattaagtcagaaatgggatacccaagcacttccccatatatgttcggtgctgataacaatgtcatggaatcacggccaaatattggagatgcatctgttgctcctttcagcactgtagatcctaacccgcaagccctgaatgattcacttcttgatgtagacacttcttcgtatggatttttaagtcaaattcctagaagtttcagtttatcagatctgacgactcatttttctcaaagttcaggtatgtacatcttttgtctgtgtctctgggttattattagttattctactttgtttgagcaggatgagtatgtgcatgagcttttttgtcatgtgtaagattgtttgtcttttttagctagtaactataatagatatcttaggttcagactgcacttgacacgtcatcattctattggtttttcccatactataatttccaccaggtggtagctcaaatggtcaggcatcaagttttttttttccctctcatgaagtttgatgttggacccctcttgggtgtgcatagggtttactctctcaaatattgtaggattaggctcagagtagcaatttgatagagggtgggtgtacatagagttttctggctttcaaatattgtatgattaggcagagagtgtaacaatttggtagaagatgtgtgcataactattttaactgttcacgaaactgaatccatgattcttaatttttcagatatactggagagttattctaggtcaccttacctggtaccagatgctgaggacttcctggattctcgtgaaagagataatcaaggtcacatctttcctgagtagagtaaatcttgttactaaataatcatacaattccatgtctaatatatctcctgcttcatttcttacccttacaggagacaataaaagattggacaatcccaattccttatctaatatctcataccatttcttacccttacaggagacaataaaaggttggacaccatatcagaaggactaagttatgacgattttgggagtgactagttaataaagttacagagtaagttacatgtgtcatgttctaggaaaattatccttttcttctttagaacttaagttgttagcattagtattagatggtaatggatgggatataaacatgtagctaggattgtgaatgtgtacacacttgagaaattggacaagaagcacatgaaagtaaatgattcgcctttgaagtgtttgccaaaaaaatgacttgaggttttactaactcggcctcggctggtggttttgtttctgcagctctaatttgacagtggaaattgggtgggtgtacataaacacattatggagtttggatgtctaagcattaaactattttgaaggtaatggttgttgacgtagtgatgagaattgacattagaatggttctcaagagatggagaacaaaggacaaggcttttccaaaggtttttgtaacaatggactacatagactttatactacctgctgtatttgataattgtggcgtgttagttatttgtatccacaacaaatttggtcttttgttggatgatgatgatgatgatattttgtgccatattgtttttttttttttttgaataaaaagaaaaaagaaaaaggaaaagtaactttcttagagtgttcacacaaaatatgcaccaaaatattataatattatttaaaattgtggctcttcttaattaaagtcacatgtgatttggctgaaatctttcgagtgttgagtgcaatgttttagtgtatatacagtatttatgtggacatgtcattattcagtactatatttttttggtttgtgttttttaattattaattgatttctattttgatagttttttttaaaaaaatatatatattacaaattttttattatcttagaaattattacattggaaaatacaaattgtcattttatttacaa

SEQ ID NO: 69525 - DNA, 2480 bp, Cannabis sativa
gttaaaagtttgataatgaaattacaattataaccttgaataattaagtgtttggtatagttattttgcacaatagtatatcgtttttatgtacaatagtatatcaaaaaaactgaaagataatatattagtttaagattatggtatattattttaatgtgctatggtatataatgaaccaaagacgaaaattaaaaaatgtggaatattaatttgagtttgaggtatagttatgtttcactagaaaatattgtctttaaatttttggtatatataatattttttaatttattatattaagttttcattatagtaattcttgttatgattgtagtatatattttgtgtatgctattatataacttggggaaaaaatttcatttaatagtatattagtttaagtttgtggtatattcatattggtcttaggtatatcgtttgtaagtgatatatgatatatcgtgaaggaaagaaagaaaaaaaaaattaaatattagtttaaatttgacgtatatttaattttcactacattatatatattatgcattacattatcttattaaaaaataaataaaagacaaacaaaaaagaaacttataaaaaatttaagctcgtggtatattaattttacactatgggatacccatttaatttaaatatatcttttttatgtgctgatgtatatcaaacaagaaaaaacttaaaaaatagtgatttttttgaataaatacatattttaatatgacgaatgaaataaaaaaagaaagaaaaaaaacaaaagattggtattatttgattaaaaatatatgtatgctatacaacaaaattaatatacaatccaagtttttttattttcttttttgaatggtatactatagtatagaaaatatatataccataatacaaaatgtatataccaccgagatgacagccgattgcatcgatccgtattccccttatcgtgacatcgtgtcctccactgaaatgacagccaaatttcggatataacaacatgtaaaacatgtccctgtatctgctcaacttgctgaatgcctgacaaagccaatctctagttttcgattcactgatattagagacaaaatgtgtatatatagtttccaaagctacctacactcagtttgatgggggctgtcaaagatactaatagttagttagttagttatcctgtgttagtttttactgttacaagttagttacatctgttacaaactctcttcagtatagtataaatatctgcttgtaattaacacttaataaatcaatacaattcaattctttcaatctttcttttctttttgtttctctcctttcctgttttctggttcacactcatcattagtaaatattactcatgcattaagaataattataattaaactaaaagaattgctaaaaagttgccacacatttttttcgttatgatgccatatttagcatgccaattttaagtttttcatttattatggagagatactgaaaggagtttcctcattttcattcattcgtgatatagattttgactacttttctagaaaatggacataaaatatatttgataggatcttttgtctgtcaatattgatacttaatgtagtgaaaatataaagcttctgcgagagctcaagaatttaagacaaaatgcttaccgaaaaaagaaaaaaagaaaagactaaatttaagacgaaactactttatgatttacttttctgtttttggaacacgttgaatgaaaaactaaaagcctttatagctagtaataagagattaacggattaagcttttttgcaaaaggcgaataatttaagagtacttttgaagttacttatatcaatatgtatatattccatatttctaataagtttaatgtgtaattttgacaaatgcgatggacattattttattattattattattctgtaagggcaatggatctgattaagatcaaatctataactatataactatataaattactttttaaccttagttcaatataaatcacattacatttacatattaaattacttttttaaccctagttcaatataaatcacattacattttgatatttttttttgttttcaattaatttctttttataattatatattagccaataattatccaacaaatgaatatataaatatataatacaatatacatatattaatttaatcatagatattataattaattacaaaaatgagtaaatttttttatataattataataatatgataatatatttttattcacgaatcgatataaataattatatttatattaattatagaaataatatacctgtattataatttattatgtataaatattattaataattataaaaaaattagtaaaataatgatttttatataattatttataatacataacttaataatataattatttataaaatatataatattgttataaatattaataattatgtggat

SEQ ID NO: 69526 - DNA, 2345 bp, Cannabis sativa
gaatcatagcttaatagaatattattagacaccaaaatttttagcatcactatgagatcacgttttataattaatttgtggttctttataatttttattaaattaaaatatatggaatccgatattaaattgtacttacaataatattaagcatgagtattctttcacatttctcaaatatatatatatatatctttttatttattaacagatgtattttttttaattaaattagttaaaaataagttattttaagttttgacaaactagacattaataatagctttaatatgagagactattggaatcttagtgttttagagaaaaattacaccaaccaaacttcaagtaaatggaaagagaaattgaagcaatatgtccaagagtgatgggtttgtctacaactttgggcaagtcttataatttcttttttacttttttatgtgttatttgttggaggaaatgaggccttttaccttattttatgcagcttgcttagtggttttagtgaataagttcagttgattttttttatgtgctcaaacatgcatattgatatacgagtatgttgagctattaattgtttttcaatttgttctatctattttcttaaagaaagtaatttaaatattgctatttggtaaataacaatgcatgatattttgctagtgtctgtcaaaactgcatttttacaagcatctctacaaatatgctaagttaaattgtttggtaactttgttatgtaaagttctacacttgagaatttgttgagtatccaagccaactagcaagatgaatatagattctcttaaaaacaatcaaacagaactcaaaaggaaactggaaattaagaatattgtttttcattaactctttaaatggtcttttttatccatacgtggatctgtataagggagccttcacttcacttcacctccctcagaaataaatttcccaataacaaaaaaagccaactgaacaaaaaagaattgttccttgttatgtacacttaatttgggttgctcttcttctttatcccttttgtaaattggtcaagaaaagataacccaccatttagcttggataatcacacactgttatttgcaactgagaattattctgctcggacgctcgttctctgatgaatgctcttctccaccaaatctcgaatgccttttgcatgttgggacagtcatctcccttgttaagaaaccgatcgaaccaattgagtaaaatggcttgttgctgaggcaatggcagtgtaagaattgtctggccaagtccatcttcaactaccttcttatcaacagatctacaagctcttctcatccatccaaagtcctcgtaaagtgcttccagccatgtcgaaagcagggcagaccgagtatcttttggtaccaagatatgccctctgcctattgcaacacagagttgagcagttactcggctgatttcatgacggtacatggtgggaatcttggaatgaaggagtgcaagctccttctgatctgcccacaatttcacaaattcatcggccattttcttgtccaccaaaatttcaacaatccattgaatattgtcagcctctctagcaatctcactcatcacaactcctcgatcccgttgagtctcatcaatgcttgtagcttctgataagcataggacaagagaactgatacatctatgacaaagatgataaagtgtgtctttggaaatgtcaagtctgttgctgttgttgggtgcatcttctctgagcagacgagaaatgacatttttcatttctcgacgagctttatcatctttagcttgaagaacaccagtcaataattgcatgaggatgtcatcagtttgcgtcgaagtggatggttcagacgatactctcatcaaaacttcactagctgtctcatcaagatgaagtaggctgagattagaaatgactttctcttcttcatcctcagaccatggaacagcttccaagtactctaagcatgtggcaatccccatatcaaacatgatagccgaacaaacctatcacagaagaataatggttgaatattttcttgattattgattgtcaattcatgcaactattttgtttgagctataaccagtggctttccctaatatgcaaaattcttagctttacaattgaactttgaattttcattatcatagttctactattacaccatctaagctggtcaacattaaaagaatcagaacaataataatccaaactgctatgagttttcaatttcagaacaaatcatgagctgtactaatattttctagagtcagattcagatgtattttctatactaaaaaacaagttatttgggtcacca

SEQ ID NO: 69527 - DNA, 2924 bp, Cannabis sativa
taactaaaagattgtcactaaaagtacttttttgtagtgcaaaatgggtctaaaatttattagaaaaattgaaagttgctttgtaaatcaaaatttgaaggaagaattgaatgtggtttcatcttttgtccacttcaaccaagcactattggctaaacgaaaaaaaaaaaaaaatgtgttgtccccaaattggtgtgccctctctgttcccaccaattattccaggacacatcattcatacctattttacatgtatattttaacctatttttataaatgtgaactctaatcgtagtatataaagtggttcaaatttaacatatgctaaaagttgtgtcaaatttagaataaaaatataatcaaattttacactataataaatatatatttttttttttactttttgctacttattaatctaattaattagtttttatattttatttatatatttaataaggtttttatttatttttaataaaaaattaatatttttattgacttttttacttttttttattaaaaaagatgctcattttacccttaatagagcattattattgggcatcagtgtcagtatagtgtctagcatctctagacatgttttgcaactgactagcgatactccttaaaaattattatattaaagtatatgagatccgatacttaattaaaccaatagtaatattgatacataagaataaagtactagatgccagtgttttagcatttctcaccccttattggatcattattgtggaatttggatcaattaatataacacttattcattttttgagcgtgaaagtatatactattggagatacatagcctaaaaggatttagtgtataacatatgcacaaaatatccattaaaattttatccatataaaattatagacttgattattattgtttttattaaaatgcatgtatgcatcgaagacgtacataattaaattgtatttttggttaaaatattaccttactaatttcattagggaaaactacttttggctgtatttataataaatttcaataaatttatattatatatatgcatgtggtcggagattcatgcgcactttccttagcctgaaatcagtgacaaaatcgaagatatttatacctccacacacaacatatcatatacttttggtttaatttccaacacttttttaatattacttaatttggtctaaattgttagctgtcttatagtatttaattaattattaatatgccatgtatatatgcatgtgtttaattattatgagcacaaaattgtattaatttgtatgctcctatatatatatttattttttatacactatacactacatgatcaaaaccatatatacgtaagtatataggcgtatacatattatattaaatttatttataatagatcaactatcaacattatacatatattgaaagaaagaagaactcaacatatataattaatatcgtataattcacattacacaaaccataacaaagaattaatacaacaataaaaaatttaaccaaacaatagacatgggtgagctatacatatatagtcgtcaaatgcaataatttttaacatatgacagtgctcgcctttattatataatcacactacaataatattaatgcaactttttcatgacaaaatatataattaataattagtatagtaattataattatcatttgttatttgcctagctaattaagcatagctgcacattccataaacgcaggaactccctttgttgcacctgttattacaactcccacagtttctcttgtccgacctcggattcacacacctccctttgcagcataactccgagaacttacatttcttcccacaccgcccgcagttgactctgtcagatgacaagtcaacgcatttcttcttgcagcaatccgagcccgcgctgcctttggcgtagcacaccttcggattcttatcgcatgtcagtggccgccgagaagcaagaaaacgactctttgtcgctttctcgctttcggcctcagtacttgtagttggctggtttggtgttgctatgagatcagcatttgtaattatggttaaagccataagcattatggctagtacaagaaatatgatccttattagggttttcatgttggttttgaactaatatatattggtgaaactgagaatgatgattttggatatggagaagaagttatggtagcaagtatatatagaatagagggagatatcgatcagagagaaatatagcttgaattattagtggattggtctaattcaatggactaccccaaaaaatgaagttaggtgtgcgtagaaatattgtagtactccaaattaggctaaaatacaatgactgaaatttttcattacagcacatgttatgatagataacatacgtagctacgtaaataactaaaatataagtaggcaggttaggctcattataccccacagtcttttttttttttgcttagtttaattaacatatacacaaattaagtgtatatttcttttataataaaagtaattaataaaggtgtcatatttaatttaaggcgtggaaaaaaattaaatatatgtatgtgtgatttcatgggcatatgatattgtacgtacgtagttttcattatatatacacattattacggtcggatccatattatatccaatgtatatataatatatatatatgtatagcagtatgtgtacctctagtgaactatatgtataacatgcatgattattataattaatccacatataattaaggagaaaaatatattaaccctcgctcaaatgtacataatacctacatttcttttttaggtaaagattagataagtttggtaagatttatgtatgttggagagaaaataggaagacatgtatacatatatgtatatatctatat

SEQ ID NO: 69528 - DNA, 2520 bp, Cannabis sativa
atattgagagtactttgttaataacgatatcttttctaacatgaacagcaaggcaaccaagggcggacggagagtcattgctcgaagaattgcaaaaggcagagcaagaattacagcttagcatatatctgccgttagcttggactggtttttcttaagatatcaaagtttagatgcccgtcttttgaaaatcaagatgaaggaagctctgtttcttgttgtgttttacggtactgttggaagccttaatgggatttgaatacaattagtagatctttttgtgtttttaggaacttttgaagtaatttttgattttcgattatacaatccatcctcaagtaataaattagacttggaagcatgcacagcaatgataaatcatagaggaaacaaaattgaatttttttttgaaaggctttattctccagagtggattgtgaaggagctaacattgtttgattatagttgaaagattgttttgcaagaaaatgtttgattttcgttgaaaaattgaatatccttgattatagttctctcctccaaggagtggtccattttgatccaactttatgttttgcatctcattttattcatgggaaaggtcatactctctgcaggaaaatgaacttgggcctttttatgttgtgggcctccagatatgaaggtgagcttatacggctgtagtcggtgatggcccataggccatagtgttatgtttactaagaatctcaatcattggcccatagcctataatctgaacgttggtacaagagaaatcatgacattttccgttacaatgaacaaggggagaacaatgcaaatgcaattatatttgtaaccaattaagtcagtgcctaaattaactaattataacgatgaaatgatagtccttttgtaggggggtaaaaaatgaaaaagtgctcttaagtagtctgactttggtccctttaatttagcggcttaaaacaatagcatagtttaattatgactttgattaactcaagttttttttacgttgttgaaagaagattaactcaagttcgtagaggttaaatatgaggcaacgcaattgattatcggcttttggtctacaatgatccacgagttgactttagagtccacaagtattggcatcgattattataacttgatgtctttgcatcatagcgttgaaataatggaaacagatcaagagagaaagagtcatttatattcttgacgatcaaattctatagagaaaacctttaattagtatgaaataataaattgtactaaaattacaaaatatatgttgactgttaaaattaaaatgtgaaagatgggtacataattaatagctaggaatattatagagagcctgaattattaatatttctatagctagcaacatttggatgttgtgattatggccattgcatttacttctattcaaagttgatcgatctggacataaatataaaagcgttaatatgaggtagtaagatgttcgccttataattgattaatagttttatgtaaaaaaatttaaaataaaataaatgagatcggatattaaatggtgctaacaaggaactagtgccttataacattttcctaaatataaacaaaatggttgcactgtgctattcataaatccatgcaagcatattcataaaaattccatacatatataaaaaataccttaatcactattcgaatgatttgttcttactcttgtactactacgtacattacatactgccatatataataatgtaaaataacatatatataatttatataatttatatatcaaactagtcatataagctaggattggagctggttcacgaattgaccgttaggtaacggcgttgacaatgctgatatgcatgaggagggagacgacaaagtcgatgaagatgaagataacggtaacgacgacataatcatcattgcatcaatattattgtactcggacgtttgacttgtaataacatttgggacacaattagaatcctggaaacttgagacaaccacagctgatcttgaagaagcagaagcagctaacgttaatggtgccgtggaacacaagttacccatgtgatcaaccacatcatcgcatagtttcggcatggaaatggagggggccgccattaacgtgttctcatgatcattataagctgatgataatatcatcatgttcggatcgatgataagctcaggcttgtcctcaactacatgatgatgatgattataattatcattgatcataatatctgcagcagcgcttagattttgatcgagtaatgaccttattataatattctcaagggctggagctgttactgaagcaggttgatgatgattatgattataacctaaaaacgacataaatgaagaatcataattaagtgtcgttgatgaaatatcattagtattattattattattattgttgttgttgtagaacaatccttgagttgtggtccccacgagtgacgtggccgttggattaattatgggaaggtacagctgctg

SEQ ID NO: 69529 - DNA, 6501 bp, Cannabis sativa
  modified_base (557)..(560): a, c, t, g, unknown or other
  modified_base (678)..(680): a, c, t, g, unknown or other
atcatattaaaaccaaaaattaatatcaaataatctccatccagaccctaatgaactgtttagctactcacgttcatcgtagcaaattcccacatattaatttaagaaaagagaagaaactaaagaagaaaagaatattgaaaactccgttgaaaacgcctttgcgatcaattttgctctccaaaatttgtactccttgattgcttgttgaaaactattgaagttcacttcttttatagccaaaaaaaataataataataaaaaaagatgcaaaacgctgaaaaaaaaaaacatattctgcttgggattagaaggggcgggccgcggcatgggatttccatgcctaggcatgaccccctttatttggccgtgagttttttgctgcattgactgatagtattttggctttctctctcaatattgctcgaaattggacgatttaagatgttttagaaagataaaagagagatctaaaacttttgtgtttttactttctctaaaatttgatcacaacatagtctaatttaggcgcaaagtttcagctttattttcttgcnnnnttttctctattttatagatcatctttttgtaagatttttttatattttttccatcttatttctttgatattttctaatctttttctattttaaatctgcaaaaataaaatataaaaannntaaaattgatccaaacaagagtagaactaaattaaaaacacactaaaaataatttaataattgaataaaaatttaatttaaaaataatgatcataaatttagtattatttttagtttatctttagcgacacattttagtaatgtcaaatatcacaatcaataaaaatttaatattttataaataaatcattggcgacaaaagtttacaatatttcttaagaatgcctttaacaaatattgtgttgcaaatggtcacaaaataataaatttaattataaaacaatttttcaattatatattattttgtgatgcattaatttatcgcacaaagtgactttttgcgacactctaacatgggcatcgtggaagcgcatttctaatgtttacttacatttttttagtgaatgcctagtaacttgattttgtcgcaaaatttagcgacatatttgtgtacttcaatataaagagtaatttgtgacgtaaatactttagtttaatgcagataaatacctgaatttaatttttaaaataataatctttaagttatatttttagaatttccgtaagtacctatcgtcaagtcattatacacgtgttattttcttattggtatatttaaattaattttcaaataaaaattaaaaatttaataacttagatcaattaaggactatcaagccattaacttgacacataacaactaggtgcctacgaaagatccaaaaatataacttaagtattattacgataaataattaaatttaattatttgtctataattagaagttaaacgtaagtatttatgacacaaattactctaatataaaatgtcatatttattcttaaactaaaaaatcataattacaaaaaaaaaaataatattataatttgaacaattaatttcttctttatccttttttctttttgatgaatcttctctatccttccaattccattgctaataccaaataagagaactacttccctcttcatccattctactcttaaatacttgtttttggatattattcttatttccattgtcaacaaataattcatatttacataaaaatacattttataataattaatcctctaaaaataataataaaaataatttataattactattacaagtgatgaaaatttaaatccctcaattaattctaattacatacatgattactatttaattacctcattaaacaaatacacctaataattactagatacactccaaatgcagcctaaacaaaataaatatttatatccatagcctttcttaaaagtaaaatacatgggcatctaaaattcgtgaataggtgtgcaaaagctacaaaatacaaagtccaaccaagttaaaaacattatttatcgagattgttaatattattctgatgagtaatactaaacgagtaatatcatttcatcagttcattgataatttaaaaacacacccacaaattgttagttgaaaacatttacatatattaatatccacataaacagccatttacaataataataataaaaagaaataagttgatttagcagtagatggatgggactctttcgaatcaaatgttccatgtacacacgctaaataatgtggaagcagaggccatcagattaaaaaacagaaccaataaaaatgctataacatattcaactggaaactccaacagcaaattaagcaccttcctcccgccataaaaaaatgtgtaagatcagtgagaactgacaagaaatggatgctggcaaactccacattcaatcgtttctgaacccgagctgggaacttgaacctgcatcaagagaaaaaaatgtcactgcactgttggactatcatcatccgcatgttacgttctctgctgctgaataagcagcagcatatgaagatgattttcaggaaaaaaattacacagaaacctttctaacctgcaaatggaccgtgcaaataggacaggcaacttctctcatccgcctccctgatccatctgattttgaccctacaaatttataaattaatcgatcaaattccagcgcatagcaaaaaattaattacatttttaatctaaaaccaacttggctttaaaaaaaatcaatctaaaacaaacttggccttaaaacagaacgtgcctctaacaataatgaatgatcaactgccattaaggaaaacaaagttacctgatgatgacttgcggttcttctccatctcctcctgtcataatggccaaacatcagattggaacatattaaatcaaataatggacgactatgcttatgtcacaactacagataattgactaactattctttcccaaagtatcagttatttaagtaaaaaaacaaaaagagaaaatatatccaagcaacgtatcatttggcatcggcaacattaaatgaagcagaaacaagagaacctagcgcacgacgcaaaaggaacagttgcataaacattaactacctgaagcttcttagcaagatcctcatggctatgcaatcctgccggtttacttgcgacatccttagcattattcagcctctgagtaacttcagcctacaagagtacattaacgacataatctaagaactccaaagggcacgtcaacaatatccaaatatgtctaaataacttgcatgcaaatcagattagaaatctaattgacttttttcacattttgatgacttacgctctttactggtataaaaattcgtgaaagtgatattattgtcaaaagcatcgtaaacttttttttaactacaatgttaggtccccaaatccaccaaagacaaaaaggaaaaaccctatacttgactaaaaagcaaaatgcattaatgttacttaccatgcatcgatcacaaacacgaacaggttgggcattctcatcagcagtaagagcagtcctaccttgggtgcacttatcacagaaaatgtctccacagtttcgacaatgatgctgatatagaataaaagtcagagctcaacttaaaaagttaaaaaaaaaagcgaagacaacttaaaatgaaaggcaaccttgcgcacaaaagccccgaaatccgttccacatgatgtacactttgtaactgcttcatcagggacctaaataaaacaacactgcgattaacaaaaacaaaattccaaaaatgttggatgacaataaaaaaaggcaaaaatactacaatgcttccagaaaacaaagtacccaatgatccttctcctcattgacaggcttcactaagttcatccaatctgtaaaccctttctttttctctgtagactgttcattcatcttgaaagactccgaaggccgaatacttccacccatttccttcacctggaaatataaaagtctttgaaaagtgggccctactaaaaattgcatgcatatcccaaatagggagacagaggaaatacacgtgcttccgataaaaaggaagtttcaaatttgggaaggaaaagaaagcatgaaattgtccattgataattatgtttactaatttctacgaatatgacatcacctaaacacaactgttctactatctacccgcctataaaaaacactacttaaaaaaattaaagagaaaccaaaacatgattcctttttcatcaaattatagcacaaggaaaaatgccaaaagaacaaagagcgcaaatagacttgtataaccagtgaagctcaggcattcaggtaaaaagcaattaaaacatatataattactaatctacatcaatgattaccaaaccagtcaagtgactacttcagaaaaaagaaaaggttcaaacagactcttatctatgtcaatgattaccaagccagttaattaaaaaatataatatactactagatcatatttgttcattagttcctaaagactcttacctgtacagttgcagcagtaacagtgtctaaaagagtgttggttgtataactacttgactggagtctaatacgccttggctcaatgtctacagagctctttgaccaaaatgccaaggtagatgaatccatcacctgtatgacatttgaaaaagaatacacatttatatatagaagcacaaaccaaaataataataagaagaaacatactgtagaacatatacatattatatgtacatatacacaaacttacttcacatctagtaatggtttcaaggggatatattcttaatgtccgactggtattaggatcaagcatgcgaattccatccaaaccaatctgaagcaccaaaaatatcaagatgaatatgaaatcaacatcagttaaaaatgtacgtgacatgaaaggaagaatagataggtgtcacaaagcatcaaataataggaaatcaagcttcataattaaaagaaaccaaagtggaaataaataaataaataaccatgaaataaggggaggtaggaaagtttatttattcatttaattaaaaatctcaaatttataactccccaataagggaaatattaccagaactcttcagagttggcaaagaaaggcactagccactagcaacctcaatagaagacaattcacaaagtagtcaagcaaaagatctttaataactagccccaaaaaggtagtgacaaagtaaaagctttcagcccaagaaacatagaagacatttattaaacttaaaaagagtttatgtcaaagcaattggcacaattatttaacgaagtagcaatatcatgtggtcaaacaataatttctaagcctggtcagcgtcgttcgttaactttgcactagactggaagaatcataggcgacagtagagcatctcccggaaccatcaataagatctttactcttaaattttaagtgaacaacaaaagattaaacagacataagcagctaaatccaagtactgactttccaaccatcattagttaatggttctatacccactatctctaatcatagaaaggaaaggatgacctaacaattgtatcatcttacagcattaatagcagtagccctaacaaaacagtttcaagatgttacatagacaaacataacaacattgctaaaagagggaatttacatgatgaaaaacattgcaaaaaaagtcttctattttagctatctagaaatcagagcagctatgaataatttattagagaaataaaagaatgagaattggcgcattctctggcatacctggcaaagaacgtccatggtactctgtcctccactttcagctaacagcttaacccgaaacttctgaaccccacttttcacgtcttgctgtacctccgccttggggaccgctctcacaattttggtcgagctattactcgaatccttactggaagagaaactaatcgatctcccataatcgtcgaacaaagtcgatgacttattaggcgcagtgcccctagacccatacggctcaaccttgttcccttggtaagcataaactccatctccgaatccatcgtcccgacccgaatcatatcgctttccatacagatccgatcccaaatcggaccgtggcctctggttgtaacctccgtatctatcatctaaataaccactaccctgatcgtatttcacagaattctcatatgggttatcgtagacgggcggcaccgaagctcccgattgaccatacgaagaggaatatacagaggaatattgagaattcggggtggggctaggatttgaaggcacggaagctgcagtaggagcataattaggaggcgtctgatgctgatcgtacgtgggaaagtacggctgctgctgggtcggaggttgataaggcgtgtgggcctcaaacggagggaaaggagttgcctgagaagcggaattgaaggactgcaaa

SEQ ID NO: 69530 - DNA, 4340 bp, Cannabis sativa
cgtaaattttttttaaaaaaaaagctaaaaaaaagtacatgtgataactcacctaaaataaaataggttatatcacggttacaactaattaattaatttataaattaatcacagtgatttaataatgatgtaacgaataaaaagtaaatgttaaatatgtaacaattgaaatttctttcatatattttatatttatatacattcatttgatgcctttcttaaataagtgtcactatttttttgtttaatattttagtgtttaattttagggacaatatcattatatataaagaaaaattagtggtttttaccacataagctttagacactataggattatgtccctatagtatattacttgttaacttttacaataatatatatagtcctattatattttattcaatcaattttatcgtgaataagtgaagtggtagatgctaattaataaattgatgtaaattaaatatttttcatcttttatatgttaatgaataatagaagaaaatatttttttttatataaaactttatatttttagttttagatttttaatcattaaagaaaaaaatagtgaaatttatttattttgcatatattttttaattactaattaatgtgtcactcgtttagtgataaaattaaatacaatatgaaagaatgatcatattattgtaaaatttatatttggatggatattattaattaattatatactataggaggtataacttggtaatataaaaagtttagatgcaaaaatactaactattcttatataaattatttaaaaaaagcatcaaaccgtattttcaacatatgaataatttacattataagtcccccaattatatccaaaaaaaaagacattataagttactaactgaaaatatagtttagactgttgcatgcattataatgcatatgacctgttttttatactccttatgaaataagttattttaatcttatttttatcgtagtaaatttttttagaatttttacattattacatatattttataaaaaaaaaaataaaaattaaaatgttcaagtgcagaaagacaaacactgcactaatactatatctttgagggtgcaagatgcccccatattatctactccaacatcgaagcatgtgaaaatggaacctttattcattttagtagagagtccttttctatgaggggtggggaaggaggacgattccttatatgttttttttttgaggggtccttacatgtattattgaaaggtaaaatgtgaaaaactataaatgggccggtgatgtaataggcacgaccaataatatcaagacacgtatgcataattttttgtccacaattgcatgtcattaattatatcagaggatcttatatatcttagtgactactttgttttgacattgcattttgggtttcgccaactggtttgcaacaaagtggccaactatgtaatcctatttataattttttttaaaaaaaaataaaatttccttaacattattgtctttgaattggtcccccacttgtacgatcgaagcccagaaggccaggccccctctcctctagttagtactgatacgtgtgtaagaaatattttctttgcttcaaataaaaaaggtgagtttttataggttaaaatattataattttttttcctaagggcgctgttctaggtcatatatatgtatgtgttgtgactaaattaattattgatgattagagatatatcattgttaattttttcctcagtcttgaattatgagtcttcttgagtttgctcctttttcttgtgaatacaatgtacgtaatttcaatacataggaaaagttctcatgtcaactcaaattaaatggcatcctatcctatatatcaggtgggggcaatacgaagataatccacattttcagtcaatatatgtgggggagatgtgtttttatttttattttatatatacatacattaatttatgtttatataaatatatatataaatgcatagtcctttcaatgatggcattacacaatatagattcatccttcctgtcaagaaatatggtagaaaacaaaattgggaaataataaaaacgaaaaatactccatcaccatatatatgtagataactagtaattatgatttattggaagagggggaatattgagtaaagagaaaaaggaattgacaaagtaaagcgaatatttgaattttgaattttgatttagcatatctgttataattatattcttgtcccttagatagggagaggttgagtctaacgatcgtacaacaaaatagctaggcttgatcaaagtctattctttatatctatatatatttccataaacgtttaacaaaaatatataaaattaaaagaaaaaactgactgttatagtagatgtaatgaatgtatctataaacgtgccgccgttgagaacgaaaataaggacagggtcttagggaaatgccaatttaaaaaatgtgttgaaaagcaatatatgtatacaatgcttctttctactctcatactatattttttaatgaacaaaatatatttacacatagatatgatgctatctagctcctcattctcaacttgcttggatacttacttctttgtctccatcatcgatagtgaatgtcattttcaccattgaaaagaataaaaatatagaaaaaacaaaacaaaaaggttcgtagttttggtaaatagtattgacattataattctttctttcaaaagttacttgggcactttggctctcctgaaaacaacatcctttttcttcatcttcctccaaattcatcatatatattttatttagagtgttgatgttgttgggagtgggatattttcatactttgatatggtgtctttctttaaaggtcaagctttagtagggtattcttatctcgtacaacagaaagaaataggtgcccaataaagaagtggggtatgtgattcggactcacttgctatatgtgttgtacaatatatgtattaattattattattatttaagtataaataagggcagatagagttgacgggtgcagtttaaatataataataattaaataacaaacaaacaaacaaggtcgtcgtcgtcgtcgtctatctattatgcaacacggtcttctgcaacgacttcaaagcaaacgtagtggcccaaacacgacctcttccatgctctccacgtgtcatgatagtgatggcttgatggacattgtgtcttttttttttaatgttctttctgtactattttattagagtacttgatgataatatgtaagaacataatctgtagaaacataatacttataacagaagcccatatttttttttaatcaatttctaattctaatattcttcttcaatctaatatatggtgcaagaatagaccaaaattattttgttatgatctaattctgattggtaatatagatacaaagatttgcaatatttgattgatcattgtttttatttattataaaataagtttcctttccttagagaaatgtttcgaacaaaagtagtttgttcaagcatatttggtttccaaattaatctggaaactagagataacagaatatgtaagagatttatatacaacaatttttttttttaaatcagcaattctacactgcaaaactattattgaatgaaattcggatgaatgcattttctcttccatcctaagcattttttttttaatttcacatctatattcatgaaaattttctttttattctcatcaaataaaatatagcattgagggaatcacatgaaattttacttaattaattctgttatcttaaattttgtccacctgacgtggcatgtctacgtaaatcaaaactaaagatacgtgaaatacaactttgtcaatagtaatttaaagtttccttacaagatataagaaaactgtcgaacaacaagcaaaatgagttaagcaaaccgtcaagaagttgtacaaccatatctggccagccaaggggagtacataggccgacctggaaaagtttgtatggcaggacaggatttaagcacaagctggccagccaaatggtaactgtcaaaccaaaaagggcctgttcgactaagaaagcctgatctttacaaggaaagttgtacaaaagctggccaacacttgccaaagctggcaggaacatcccgaggctgcaggagcaatacctggctggccataggagtacatgttgggttttgtaccataaacaaaattcatttcaaatataatcagatttactaattaataaaagatcagaaatcacttttatgttgcatggttcacatgatctatttcatgattatgtttaatgt

SEQ ID NO: 69531 - DNA, 6278 bp, Cannabis sativa
  modified_base (284)..(285): a, c, t, g, unknown or other
aaaaaaaaaaaaaaatcttccactcttccctccaataaccccaaatgggaccatggtagggcttgaggaagtagatgattttccactccacaccacaatatcaataaaataatcccattttattaacccaattgggtagctcaaacggttaggcatgggtacccacatagcaattgcttggtggcctgagtttccaaatatttgagggttaggtcgggagaggagagcctcatttcaataattttttttgaaaagaacctcatttcaataataataataataannataataataataataatcccattttattttcttgtagcacttaagcttctctccaaaaattatagcactgaatggtattatagttatggatcaatttttatttttatagatcatgcttattagtaaatggcttgtcaaattcttaagttaggtttacctcacggaaggtcattaaactgggcttgtttcccactggtggtgtctgattgcaaaccatgtgagcaacaggcaaccttgcagatgtgccattgcgcgacaacacacgacttcgagcaacaacctcatccatccacgcacctcctcttttctctgaaggccgagcataaggatcaaaataaaagtatgcaacaggttcacctgaaatatctttgacacagtagaatctaacatccttgttccacacctgaaagataaccgaatattattttgattttgagttttagaaagaagtaaaccacataaaccacaaatgaagtggacaatatacataccggagcctgaccatcagccgcctcaatttcaattccaaaaagagtcttcgcaaggtcaaaaagcccattcataacctttggtaatgagaaatatggacgcaattcttcctgtgtacaaaggctcacacataagtctttgaataaaaactcagggctttcataacttcagagggctttgataaattcagaatgataattaaaaatgaaatcagaaaaagctcagaacccagaaaaaccaatttagaaccaaataaagctttcctgcttttttttcttttaaaaaaatatagttgcatataaataatgtatcatatgataactttcatcatcaaaacaaaaatacacagctctataggaatggaagattcctcataacataaaactattaatatattttgcaatacttttaatttcaaacctcagtagcacatcaagaccacacacatgtcaataagattctctattcttctactaaaaaatagtaaatatattttgcgtagtggaagctaatagttcacaatggttcatactaaatcagaacttgcaaagacacgcatactgcacatgaatagagtataagagaaatccaacctcattgatgtcatatttggactcacgaagcctctcgctccaaaaggtcatgtcccaatggctcaagtcatcagcttctaatgccccttgcttcttggaaaaattcttaaggtcttcaagatctacaaggaaggaaaaaaataaacctcaacagctactctcccaaaagttaaaaggtatgaatatagttacgtataacacaagacttaaaatccaactcaaggaagtccaacttctacttaaaagtttaaaacactggttctgtatattgtctgatatgaagtttgcttcgttttagcatagaccttgcacattaatgtgtcaaatttaaaataaacacaaatgaacaattatggaaaggaaatttgtaaacaaacatatgattgccttaccttgaactgcaggaccccatgaagcactgcgaagcttttccagaagttcttctgctttttcaacagttgccattttggttgccatgcttacctgtaagattgtgtgtcatcatacctttggtagttgagttgcaaaagacaaatttataataaaataagatactaccacaacctcagcaaaagtattgtaattaagaagcttggccttctccaatctaagcttcaaaatttcttcaatgatggatgtattatctagatccccactagaggcacgagttatgtaagcacggtaaatttcctcacgcaatgaccggtttttacaatgttgcatgacagcaagaaaacttggagcatctaatgtgatcatccagggaccactctcggcggtggcattttcatgcccctgaaggtacaagcagatgtatcaagctatactaatgaaaagcaattgtaacgaacttgaagaatgaaacttatagagcagccagatgaaaaagctaaaaagccaattgtttcaatgggaatacctttgaagcagcagtttgtgcagccaacccaagagcagtagcgggcaatccctcaatttctttcttatcagtaattagtttctcaaacttttttgttgcatctaaaacattctcttcaaacttttgagatagtctttgcaattcctgcaaataaatttaagacttattagaaatctgatatgaacttttcatcctaaacagactgaggaagaaacctaaccaatctacagcttcaatagttcccatatccaaaattatctttctttttagggaaactcacttattcatttaagagagacatatttggtttccaatgtttatagtttacaattagcactaggcaaacactagggaaataactttttttttctttcttaaaggtggagggagaagagaagccttctgttctccttgctttaacaatactaacttaagcatacctgttcaattttgttaaagttgtccctctcatcatctttaagagcaacaccactgagaactgcttcctttatttggcctgaatgtgcacaataaatatacaaggggaactgttagacaagacagttaagctaaactatacaagtaactatgtgatagtaagtagatggattaatcacgccccatttactacagttttaacagaagttttttatgtagacaagcagaactagttagcagccatacgagattcacggaatataaatacactgtcatcagaaaacagcagcaagctatcataactgctatcacagaatccagtcacaaatttgcacaagaataagtttagattacagagctttagatacttattataataccacctctgtggataacatacatgacagaacaaacccttcactaccgctataagcaacatggaaagtttccaatcttgacaacatttaaacaacaaagaaacgaaaaagatagactatggccttcattcacgtagtatcaaatagtcttgatactcaccttccactatgcgtttacgtgcttcacttaaggtctgccaatcaggggattctcgaatacttttgaatgcattgtagatgggcttactttgtcccaaccttagcaggaacttgaccttctctggctgcaaaccacaaacaaacaatcccatcgtataaagaagatacacataatcatacactttcacttcctatgctttcttattttcatcgtaattgcagaagctaaaaaagcatcatcaaaagaaagcacattcacgtgtattaaaaagtgcatacctggacttcttcaatggcagaacgaagctcggtggaatccttgacagatttgagatggttgacaaccccccaaacgacagtcaatttgtccacgatcttctccaaaggctcaaccaatttcggccaagacggctcaactgttagctccaattcatccaaatcagcctcctaaagaaaacaacaaaaaaacacacccactatcacaatcaaaccaaacccaaaaccccacaaaatgaaatcgacaaaagcttctctcttttttatgttgcgttccccacaaagaagggatttcaatccgtacaagttttttcaacagggcacgaatcccaggcctaacgtgggaggcatcgacggaatcgaagggcgggaattcaaactcttgaagaagtgggttggcttgaagcgaatcgtcaagagcagcagaggcggtggcggcagcagccatggatgaagaagggcgaacagagcaagagcgagagaacggtgaaggtgtaacggtggtgatagtagatttgtgtagacaaaaggagaaggaagaagaccagagaggacaaggatgggatttgagtaaatgtttatgcggagaagagcgagagcagcgatgaaatgagtgagagtgtttaagaagaagaggttgtactactgagcgtgagaggccaatgcgcgttgttgccatgaccatattcattattacaaaagctcttaacaactctccccttcttacgtcaaacaacttcattttactaataaaaaaaatggagtttttatccacaaaaatggaacaaatatcttaggattggtcctatcataaaactaacttgcttatactcttacacatcccatcattttccaagttctataatcaatttgaggttatactttaggaagattggagttccacctgactttcttaggtcaattatcaacttttaaggtaagattgagttttcttattctctttcaattagaatatagaatatgcaacttttaatatgtttgagtcaggtttttgtcttgtaacataaacatgagatcaattcatttggtttgagcactagtaggattatgcttttattaaaccaattaaagggagtttgctatgtcaacatatcacataaataaaagagataagagttatgtagttttattgcattacagggcctcaaatagtgtatttacatatacttcttgaagaaccaaattgaggtctcctaaatctgtaggtaaggtataaaagcctcaagattaaactccttcgcatatggtccttctcatttgtcaaatgggaaactcctcttcacgtctgcttacagtgcctattctgttccatacttgtaatcagtgaaagaaaaacccacgaaatatttaaaatatataaactttaaaatttcattaaaactcaaattggcatcctttgtttttttctttcaaaagagctttcgaaaacaaaaaacacatttaaataatcatccaaataacttttaggctctgaaagtactttcaaagctatgacaaacaagtttaaagaatccaaacttttcaatcaccgatgaattagatacatggacattcattcatttgcatacctagaacagaaggatgtctcccttaattcttgtacttcatggtttccttctcaaacccaattgtagggaactgcttggcatactcttccacatcatgtttgagctttgcaacctcggattggatgtgaggggcctgcaaggtggccacaaagtccttcaactttgtacctgctgcttctcccttgattttcaaggccaaagtcacagcagcatcaaagaattctgcaaccttggcaaaatcttcctcaataaatcctcttgaggtaagagcaggagttcctgtagtgcacaagaagatatactgagtaaaccatttagtagagaaagcactagtacagtccaaatgagaagaggctattacccatcctaataccaccaggaaccatggctgaaacatctccagggacggtatttttgttagcagcgatgtgaacagcttccaaaaccttctcaactctggagccatcaataccctgtacgaaattccagggaaagataagagagattcattgctctttataaaatttcaggataccaggatggatcaatacaatatatactaatgggttcatatttatattatcagttgaagagaaaaaaaataagaacagccattagtctattaccttctttttcaagttaaccaagaccaagtgattatcagttccaccagaaacaagctcatagcccctttcagccagagtctgcaaccatgtcaaacttcaggtatgggaacgcttaaataaataaatcagagataaatgatttatgtctgcaaatacttgtttattttgttttcttactataaagaaaagcttgagaaaacattgaaattaaaaaaaagtttgcgaaatttcttaataaactacatagaaatacttaatatgatacctgtgcaaattttgagcaattgttgagaacctgctcttgataggccttgtattctggagttgtagcctgcatgcatgcaacagatgacataaatgaccatccaaagaggaatcacaagccaaatatgataacttcgcttaaggactatcacttaagggaaggaagagttaacggagatggctcaggagggtaatgtccctctactgcctactaggatattttaattgagatcagaggaaattatttcttctcaaaattgaat

SEQ ID NO: 69532 - DNA, 3904 bp, Cannabis sativa
agtttctttattacgaaactagttttaactacatgaaagtaactgatttcttaattccatggtcggccagcctattgaggccatggtcagccagccttttggaggccaggtcgatgttgcggtctaggacagtttaatcccacgtacactcaattgactttgcccccaacatgattgatgtagagcctttatgcactcctgttaatacctgttcaacttcttacttggtaacacatcgtagaggtagtattgggataccacgtctgtacgttatgcagttcaggattggacacccagtagctatcccccttatctttgctttctggcaaggttttttttagaggtatgctattatgggtttcatccatattggatggttgtccaacatgtatatttcttttgaaataggaatgcttaattctttaaagaattgagcgggtaccaagtttaccttagctgccaaggtaatactggccagtcgagcgagtgcatcggtaattgcatattctttggggacttgccttttaatacaacctttgagctaacttaacaagtcttgaatttatctcatatagaccaacatctttttaccttgagctgtgtattcacctaggacatgacctatgactagttgagagtcgtggtatatgtctaggtatttagctcgtgctttatgtgctacctaaggcctgcaatcagagcttcatattcagcctcattgttagaagctttgaaactgacctttattgcctcgtgcagccattgcccacaggttccctaagggccatgcctgcaccaagaaggtcgtcaatgcaccttctaggttgagttgtcttgctcttgctctcacttcttctttggctcttgcttttctcccaaatcttgagagatttggggagatatgctttacatttagccatgaagctggagagagcttggccttttatggccatgctaggttgacaggtggccttatattggtcgagctcgatggcctaggtgctttaggttttggtgacatctgcgccatggccgtttgggatgaattgctttgggaattttggtaggagagtgaagcatgcacaattctcctactttttccttagacttcatggcataagggaatagttgaatgtcccttttttaccattattttggctagagcaatgcctccaatattctcattgtcggaggatcgacagatattgtctgcgctggctggcatgtcaaacaacacttggggtagtatgatgccctgtgtctgttcaacattgacctgccctcatgtctaggcttgccggataacttcttctaactttatgaaggcatcagctcgctcaaggaactctttcatgttgctcattaagatccttctaatatctttttagaatttactcaatggaaagatgcctgcgagtatggccgtatatcgaacttcttatgtcaggtctttgaacttggtggccttagccatgaaccattgaatgtagtctttcaaaggatcgtcttgtcttcactttattttgataagatccttcagttgcgaaggtatttgtcttgaggaagataattgggtatagaattcttgggagaattcttcccaagaattaaatcttcctagagccagcttgaaataacactgttgggctatttcagccagggttaccagaaagattcggcattgcacatcttcaaatacttgttggagatttgtttagatctcaaagtattttaggtttgctaggggatctttattcctcgtgtacatcttctaagttggcttcttgaactttggaaggggaagtgcattaatgtatgtcgagaatgataagcccattgacctatctagttcaaggtctgatagtttcgggccatccaagtcttttatcatgtctcttattgatccaactatgattgcacaaaaagatatgatgctgcaagaacctggttgattggcccttctcaattgggttgcagccttggattggccaagacctagttagccataccgcgaaagaaggtatgttcaaggccagccagccatgggtaagataactggccatggccagccagccctaccctaggcagttgttcatggttggccagccttatgctgggcaatatttggtcgcccgttctcccctgattggctagtgtaatctgtgtattgacagggggtagatcataccaattgctagagtttggttgatctaactgtctaaagttattgtattcacttttcgagttgttgttatcttgggtgtatctacccattcacggacctagccgtttaaagattgacctttggaagacttgctcccgaatgttctggggaggaagttcaccttgttggccgaccaaaggtgcaccactaaggggctagccagccaaaggttggccaagtaggagtgttgttgtgctagaattctctgaccagtcccccaagccgctggttaccagagtttggttactcgtgccaccggatctgtgtggcagtacttattcaccttccgacagggagaggtcagtcttggttcctgcaaaatttggttagactgtttgtctgtagaccctactcgatctatcgattagtctcccttaaagaggatctctgatcacatttttattttattttgttttagtaaattataataaggtatctaattagtagtcaatcttctcataaataatattcctaaattcttaattatgtagttgttgttagtcttaaatactccaatttcctaataatagtttagtttataaatggcaagcaaaagtaggtaaagtgtttctaaagcggtggtcgttggtgtacttgagattttaggaattttagtattaagtcaaacaaattagtccatgacaagaaaagagaagttttattattataattaataattagcttgtttattaaaaaaaaataggttgcttatttattttcaattttgagttcttattattttttttttttttgaaaaaaacatgattaattaaacactagattaccaaatttgtggggtggtcttatatgctttattttgttggtgtgcaatgtccaaattaacttttgaaatctttttaatcactttgacataatttgtctttaatttgtactaatttcatgattacgacatgatatgatgtacactctattcatgaaaagccccaccaatcttggagtattaggtgcaataaaaaatgatgaccatccataaattaaataaatgattttatttcatatagtgggtcatattttgttcaaaattaatataagtaaagatttcattacaaggatttccttaattttaaatgtcgtttagaatttataagatacgcataattaattaataatgcactaaaccaaataagattcttctaggatataaaaaaaaatatataaccatgtacatagtattagtatttatgtttattaatataatcctgtacgtagtaaattagctcaatcttattatttgtctttttcagaagagagactgttggggtcaaacaacttagatatgcaattttacttttcttttttagtcaaaactaaaccattttctttatattctcatataaacgaggctggtctataaaaataaaataataaaagctgataacagttttagctaccatatataactattaataacttatgtgaataaaactcaatctggttgaataattaattgatacatcacaatgaatggtgctaaattattttcaaagacaagtatacaaaatttatgttgttaagcatttataaacacaactaatatttgtcaacatcatcaaagttcttaaattttattagctgagaagaaacttcttagcaatatcaaatgagactaactaattccccttaaaagaaagattgaattattccatttctgacaaatat

SEQ ID NO: 69533 - DNA, 4580 bp, Cannabis sativa
taaggtctgcttcctcatggggttctcagattgtgaaaaatttagccggagaaaggaagagcaggtttcagacgaccaatgttgggacgaagaaaatcccgccggcgggctcagacgcgccaagccagaagaaccctgttgtgccggcggctcagtcgagggtgaagaggtcgctgattggagacttggcttgttcggtcaacggcagtcaagttcatcctcagtcctttcagacccaccggagacagtcgtcccgggacatgtttactgagcttgaccaactcagaagcttgctccaagaatctaaggagagggagtttaaattacaggccgagttgattgagtcgaagagaaacccgagggttttggagctggagagagaggttgaggtgaaaaagagtgaacttgatgatctttctaggagagttcagttactggaagaagaaagggctagcctttctgagcaaatacccattttggtgacttccatttcggagagggaaaggaatgaagacttggataagagagaagagaatacgagtttgagggaacaaggattatctcagagcatggagatggaagttgttgaattgcggcggctgaacaaggagttgcagcttcagaagagaagtcttgcttgcaggctttcttctgttgaatcccagttagcttccctagcaaagtcatctgaggtattatttataagcctcttccatttttctttatttttgttttgttcacttaattctgatgtaatgtgattggtttgttgtttggactatttgagtttctgaattgtatcttgttttctatcagagtgacattgttgcaaatatcaaagctgaggcttctttattaagacacacaaatgaagatttgtgtaaacaagttgaaggtttacaattgaacagattaaatgaggttgaggagctagcctatctgaggtgggtgaattcgtgtttaagaaatgaactgcggaattcatgttcaacaatgaattctaataagttgtcaagcccgagttcagtagaatcagttggtggtggtggtggtgattcttttggttcattgtcttgtcaaagtaatgagtacttagaatatagtagtgcaaagagattaaatctgatcaagaagctaaagaaatggcccctgactgatgaggacttgtctagctcggagagccaagatgaattgttggagaaaaattgggttgatgaagaaagaagaagtccaatgagaagacattccattagtggatccaaatttggtgcagaagagttaatgctcaataagagaaggcaatctgatggctttatgtgtgcaaaagagatagaaaaggaggcagaaccactagcagcttctcagaaatatgacttggaaatgactcaaagatcacctttctatggaaattgccatgaagtagttaagttttcaacatcctttgatgttgagaaaagagctttgcgcattccgaatccccctccaaggccttcttgctccatttctagccgtaccaaagaggaaactggctcagctcaaattccgctcccacctcctccccctccaccacctccaccaaagtttgctgcaaggagtaccacaggaacctttcagcgagctccacaagtagttgagttttatcattcactaatgaagagagattctaggaaggattcttcaaatggagggatatgtgatgttccagatgttgccaatgctcggagcagcatgattggtgaaattgagaataggtcatcacatttgcttgcagtaagtgctaagcctatgatatcacaacttactgtgaatttcaaacacttttttgggatttgaagcttcaaaactgtaataggttctgcttaaaaagttatagttgcttattattgatacatcttaattgtcatgtagataaaggccgatattgagacacaaggagagtttgtgaattcgttgatcagagaggtgaatgatgcagcttttcagaacattgaagatgtagtggcatttgtgaagtggcttgatgatgagctttgctttcttgtaagttgatttctgtcctacaccacaatctattttgctatttctgaatttcttttcagtctgaaagctagtccccaaaacttggctggatatgaatattctgataagaaatagaaatgatcctcataaacaatttataccaaagagctgcttaatgctcaatatcatgcattgattattatgctttcataagcctgatttggtgattacttgcattgtttattaaggtggatgaaagggcagttctaaagcacttcgcttggcctgaaaggaaagctgacacattgagagaagcagcatttgggtataaagatatcaagagattagagtctgaagtgtctgcttacaaagacgatcaccgattaccttgtgacattgccttgaagaaaatggtggcactgtctgagaagtaaggacctgaaaattttacactttctttagaagtttataatattttcttctaatattccaatatgcagtagttgtaaagttgtaagtgtttcggtaccactggcaggatggaacgtacagtttataatcttgtacgaacgagagagtctttaatgcgtaactgcaaggagttccaaataccagaagactggatgctggataatggcattataagcaaggtaagataattctagatggttactttgctattcataattctaaaaactgttgaaattatcacagatgtattctaaattaagattatcaatatttttgttgcactaggagagacaatgcacagtctcaaataacttaatttctctttcactccaacctccatgcccttcattccccaagtgcaattgatgaaataccatttagcagatcaaattagtttgtaacatcttttaatgttattgtatggacataaattagtttgtatcattactgaattacataaatggcaaagcaattgatgaaataccatttagcagatcaaatttgggtctgtcaagttggcaaaaatgtacatgaagagggttgctatggaacttcagtcaaaagcagcactggataaagatcctgcaatggactacatgctactccagggagtgagattcgctttcagaatacatcaggtattgtttcattttgtaagtttaaacagtgaaaatgaatgcttagataatgagatggacattttagaaagtaggatgaaggtattggacattatggtgacaatcatgagtttggaaatgagtcgtgtaactaatttaaatatccttctgtttcatagataaaaagaacttctcacttacatatctgtcctaccctttttcgtagttgtggttgtgaaagcttttctcttacttttgctgaatttaagatgtgtttcttgtttattacagtttgctggaggatttgatgcagaaacaatgcatgcatttgaggagcttcgcaaccttgctaatcttcttaataagaagtaaatgcttgacgaatactactacacactatctcagtgacctttcaagaaagaaaacatgtataacatgttgtatacaatcatactctgccatatggtctcaaagcaaatcttttggattgaagacccaagttttggctgttcaaaaagtttggcaacaatgaaaaaggaaagattatggattgtttgttactattataattcatactgagttttccaaaaaaaaaaaaaaaaaaattgtcatgtgtaaaaagtaggaaaggaaaaagatgtgaatgaagcatgtttttgacatcaatgcaagagtattaggtgcttttttttatgtaaaaccaacaatctttttttttttttttagttttagctttctttggcacttctagttgagctaataatagtttgacttattgaagatagtactttggtgaatggttcaattgaagcaagtcataatgctttgtgatcaacaatgaatggggcatttttgggtagggaaaaagtaaatgtactcaccagcaaattatgaggagcccatttaatgttggaatcacttataaatgatcaaactttgatgtaataactttggaacatataatggaactcaaagtagggaataatgcaagtaatacaaaaaaatagggactgtctcaggataaatccatgaagttagaaatgatgtccaaatcgttttatgataagagtactgttttccttaaaacccagagatgcatttagagctcaacataacagatcactttgtgaatactgtaaagaattatttgaattttttcaagggctaaggtggaaaatggtctcaaatagattgataaattaagtaaatatcaattttttttaaaaatttagcaaaatgatcaaatataataaattaaataataaaaattattaaattgcttttatttcatgttatttttgtattaatatttatataatgataaaattaggtcatataaatttattagtatttcttatacatttattgtaattacaatgcataactatattatatcattaatcatatatattgttacatttttattgtaaccatatggttacatttttctttagagattttttctattataga

SEQ ID NO: 69534 - DNA, 846 bp, Cannabis sativa
ttattatcatcaacttcaatacaatcttgccaagaaagtaggtagtattttgtcaaacactgtttcgatagcaacatttgataattcggtggcgccgccacttcggttttgttttcaatctcaatgaacaaaaatgtataactcaactcaagcacaagaaaatggacactccaatccaatgctaaaacatttaaaaaaaaaatggagactccaactccaagataaaaaggtaaaagaaggagtcaaagaatctccctggacattggggtgttgtcattctaccagaaaagttttcagacataccccacatataaatataatatattgtatatagacaagtactatgaaccacatgatggaattcaatgaaatggcatgatatatatttatatatgtaaagaataattggctgactttggagttttgctgtatgcatcggtgttggacggtgatgaaagctgataatttatacttcgtatggtttaagcaaaagacccacctaagtagagttgtctgctttccacaggtgctttcttactactgtaaatgtaagcaaaagccggcttcttttgttgccatgtcagcatcctacgtggcataaacaaaaaaagttgatatggagagagagagagagggagagagagagagagagagagagaaggtaggaaggaaaggaagagaaggaagagaggtggctgttctctctctctctctctttgccttttgcttttctcactggcatttcctctgcttttgaattcctttacaacattcctttttcaactttcaaagctttgtaaattcacaaacaaatcattcccattctctcaagaactccctctctct

SEQ ID NO: 69535 - DNA, 2972 bp, Cannabis sativa
ttttttgcagggaaatgtgctggtgttggttcatgtatgatatttatgccaagaattgatttatgggctgttcagcaagtagaagactgtgattccaattcaatgaacgatcagcgcaccgagaagggtactcctcccagtattaaacatgatcgaaataaaaacttgtctagtccacatagcaaattaacagggacagtaggagatcaaggctttactcagaatgcttcgaatacctggagattatttgttgaacaggtggaatctatctgtatttcgacctcggtgatgattctggtatgctatattctctctgtcaatctctcttctccaaatattatgcaattttggtgatttatagttatggcaaaggttattatatgaatggcttggcacaagcatacaagtgttttgatcttcattgtttccatagctgtattgggaaaaaaatcactttctaattttttatgctcttgcgaaaacttgtaatttttatttttggaagatcattaacagataatatcattgaaatgtcttaggtgtctttgctcctatcattcaaataccagtcatttaaatcattttctttgcggtacggtacccactgtccagacactaatttgatttttctgaagaggaatcacaaattatatgaaacctagtaataataatccaaaatattctaattaatactttaaactcttatctaagacacagcttatgatgtgtattgtcagataacacttctattttcctatatcgttgttttgctattttgcttagttctataaaatagtttttcatttaatgattagatcagaaaattttcaatccatcctgtgtaatacttttttcatttttctacaggccacatcagaagttccagtacttccaattgaaatcaggcagttcttcaagaaagaggtatcaaattgcaatcagtcatcacaaacggagtacacagttcctcgatattttgtgcaagttgatggggatttcgaccatgactcggtaatcaacctatctgccgccaagttatcaagggatgtgattcaacagctaattcagttaattcaccaaagatctcacatccatataacatcagcagaggaatattataaaactactaatttactcgaagaagagcatccaatgtcggtaaatcacaagacagttgatggaacaggtgatgcaaatgaagatatagcacaaccgaaggaaggacctatcgataaaatttctctgccaccaaatagtagaactgtcaaaggaagatcaaatttgcatctagctgtatcctctttcggctttcaagttttgcggtatcctcaatttgccgagctctgctggttcacatctaaactgaaagaaggtccctcagcggacataactggaccctggaaaggctggcctttcaattcctgtatcatctggccagatagctcagacgaaaaggcagctggtggtggctctagttctgccaacctgaaatcgaaagagaaacccggtgtagttaagggcttagtagctgttggtttattagcatacaaaggcgtctacacatcgctgagagaggtctcttttgatgtaaggaaggttctcgagcttctagttgaacagatcaaagaaagagttcgagccgggaaagatagatatcaattcgttcgccttttgtcacaagttgcttaccttgaggacgttgtaaacagctgggcatacacattgcaaaggtaagattgtcaatcgtcattggtctgctttcggattgttattgtttcgtatttgttcttgtgtaattcgagttgttttaatttccagcttagaggtcgatgctccaatgccagcgcccatggtgccagtagtgaactctaatctcaatagcactacaactccagataatcaaactcaaagccaggagttaaagccttgtgtttctgaagcacaaaaagaaaatcaacagagtttcgctactgatttggacttgaataaagaagttattgatttgaattatcataattctgacggtacagatggtgctgacgccgatggattacagctcgaagttgttccagtgaataacaaacctgctaaggattccgagcacactgaaatgttgaataagcaaaatgggacacacaaaccatcggattcttcgagctgtggaaatatcatgcaagtagacgtagatcacgggcattctgaacatgtaaacggatcaacattcgcagattctaccgtgcatagcattgataccgataagattcttcaagacgaagaaatcccttcaacgaaagctacaaagtctggagatttatgtttataccgttgttgctctcaatgcatgaacaccctcaataacttgacaaaaaaactccttatccaagaacagaaactgtacagtagtcagtggaaaatcgacgatgttcacgatattgttgcatcaatatcggttgatcttctatccgctgcaagtagggttcttgcagaaaatcccatcgatgatgataaatcgaaaacatgtagctgcaacgatctcgaaaataagagctatgcgccattgccgagggaatgtaggtgtcacaatccagcaaccgaactcacatcggagcataactttattttcagagacggtgtgttggttccgactatggatccaagcaaggatgtttcgtttcactgtaaattcgagactttgtgtctctgttctcttgtagaaataatagcaatgaccaagcaccagcctttcgattaggttttttttgttcttgttttttaaaatgggatttcaaaggctttcaattactttccatggctatgcttggtccggccatattttttttaaacaagaaaaatgggataagaaaagaaattctagagatcaaaattttgttaattgtatacttttctgaatggaattttttctcttcaccaaaattttttcaaacttgaatggaattaattataatttcttt

SEQ ID NO: 69536 - DNA, 2420 bp, Cannabis sativa
gaaagcaaaaagaacttctcatcactttcagatgataccaaagccttgagaagagtagtatgattgggagtgtggttcttacgaccttttttcttttgctctctagttagagtcatcatacataataatttattattattatatatataatatataattcatttgtacacatataatgtagtacagatgaggttggtaaggatcgtgggcggtagatttaatgttgctttttgaaataataattaatgtgatggcctttttgctctattgttaggattcatctggaaaaagtgccgatccctattttgatttcccatttatatattcttcttttatttaattaatggcttctcaagtagactaatgagggtctgattcattgcaagaaccatgtgttttttttttttttcattcattttgctataatggaactatttatatctctggtcttgaaagcaatgcccaaatatacatattctctctatctcgctctctgaagtacgtacgtttagaaaaaaatatgtaattgctagcacagtaattacacaacatagtaattatactctataattttaattataaacggtatctaaatatatagtagtaattatttatgaatttttaatattttatttggcaaaataatgtataacttaaaaaattagtagtatttaaaatagaaagttctgaataattacacaatcaaaaaacataagaatttagagagtgtaattgagttctctcaattagttttaattaatctgttacagtgtggatggacaaataagcaaaatggtacaataaccttattatacccaattctaagatctctcatggctatccaaacgcggactaaagctttttgattatcagtttggaatatatatgagggtatatattaaagctatatgttgataattgttaagaccccacatatatatatattttatatacagcaagatgagttttcacatgatgaaataagagaaaaaaatagcaactattatagataggccgtaaatgctgcatgtaccgaatatatgttctctctctctcactctcactctcactctcactctctctctatatatatctcatatatatgcaacatatggttatcatacagttaatcagagcattactatgatatcactgtgattagcacctttacatatatacttttgcaattgcttaataatactctctaaatattattacattaaactatataaaatctcataataaattaaaccaataacaatattaatatttaacattttgtgaataattttctcatgtatggctggctacaacagaatatttcatcattaatttgtactatggtactcaatataggggcttctctttaactcttctatgaagttaatatttaatttaaattgttattgggtagtagtgtttagtactttttattagtgttgccccacaattagttaatgatattgtctaaaagttattttcttaaattatatgtgactcaatacttaattacaccaatagcggtattacactaaggaatgtactaggcaccaataatgccttttagtaattctcttaatttactattctagtgttttataacacttttattttttagtttattaattacaaaaatgaaagtaaaatttgtatttttaaaaataaaaatgtgttttataactattttttattttataattttaaaaacagaaaataaaagtgtgttctataactttcatttttatttttttatttaaattaagtcgattaggtccaggtccgcatttgggactcaggtcgtggtttcgagttcaaatgtagggtttgggccagagtccgggtccaagatccaaaataaggtcggagtctaaaatattgatttgagaaagaaaaaatatgtttaaaaaaattgtaaaaataatttttttttatttttaaaattttaattctcagttaaataattaaaaagtgaaaacagttttatagaagatatttatttttatttttttaattaaacaaagaaaaactaattaaaaaagaaaatacagcttatacatgtttgtatcaagctttatatatatatgtgcatgcatagatccacactccatgagagagagagagagagagagagagagtaaaatttaatgatttgtgggcaacctctttatagtcttaggctgctaacatataaaaagatgtactataattaacatgctttcggaatttgaagtagaaaattgacataaagcaaatagagagaaacttttgattgatcaattcacctctctctctctatatatatatatattatattatgatatatatgttttcaacataaagatcattgcttttgtttgatcagaactctctctgctatatagctggcccttttgaatttatatagttttattatgtcgtat

SEQ ID NO: 69537 - DNA, 4866 bp, Cannabis sativa
tgtctcaatgcggaccatgttcatggttcggggagagacgctcatggctctttgaatagaagattagatagatattgaagctatttgggaagattttaaagatgagttagatcccaagcttgggaccaaaacttataaccaatggaggaggtagacgaggtaagcataagtgatgaaaaccccacaaggactattagagagggaaggaatctaccaccatctataagagcgaatatcataaacacaatcaaaaggaaccatgatgtggtagcatggagccattctaatatggcaaggattgactgtaacaccatctaccacactttcaacatttgagaagatgcaacaccagtctaccagaagtgaaggcctttagatccagtaagggcagaagctttgaagacggaggtggaaaagttgactgccaacgattaactccaagaagcgttatattcgatatggctcgcaaaacctatttttttcgaaagccaatggttcatggagaatgtgcattaactttaacgatgtgaacaaggcctaccccaaagattgcttttctctcctacgaatagatcagatggtagatgccacgtccaagtacaagtttctcagcttcatggatgcctacttcgagtataatcagattaaaatgcatgtcacggatgaggaacacactagcttccaaatcgacaaaggtgtataatgctacaaggtgatgccatttcggcttaagaatactggagctacatatcaactgatggttaattgaacgttcaaataccagctagggagaaacatggaggtgtacgtagacgacatgttggtaaaatccaagacctctcaaggacatgggcgagatcttgaggaagccttcacagtaataaggaagtacgtgatgaagctgaattccaagaactgcaccttcaaagtttcctctgggaagttcctagggttcactgtcagctcttgcagaattgagtcaaacccaaaaaaaagatcaaagccttaatcaacatgccttctcccaagaagcataaggatgttcaaagtgatacaggtcaaattaccacacatagaaggtttatttcaaagtctatagataagtgtatagcgctcttcaacgtgttgtgaagcaacaaaaagtttgatggactgaacaacatgaagttgctttcatgaaattaaaggagcatatgactcaagctcttattttattcaagcccgttgaaggagaatctttatatttttatttggcagtgtctaatcacgagcttagtgccaaacttctgtgagaggaagaaaaggtttagttcctggtttactacataagaaaaagattgttaggtgtagaatccaaataccctatgatcgacaaattgacattttgctcactaaccgtgtctcaaaagctaagaccatacttccaagcccatgccataaaagtactaacgaatcatcccctccgataggtgcttcaaaattttttagtcctctggtagtgttctaaagtgggccatggaacttagcttgcttgatatccagtaccaaccgtaagtatctaccataggtttggcccttgcaaatttcatattagagtgttctagcttaaatgatctttaagaaaatgcagtctctgaaatgcccacctagaagaactacgtagacggagcatccaacaaaaagggagctggagctaggatcattctactctcccttcaagggcaccgattccagagtgcattatgttttggttttcacgcctccaccaatgaagcagaacatgaagctatactggtaggcttaaaattggctaataaagtgggagcccaatagatcgatgtacacagtgattcccagctggtagtgaatcaaatttctggtgaatactagaagaagggtgaaaaaatggttgcatacgtcatgatgccccgagagttgttgcaaggatttaaaagttacaatgttcgccatgttctgagagaacaaaattcgtttgcagacatgttagccaaccttgcaaaaggccttgagatcatccatcacagagtagtcccaatatgtcaccaggagaaactaagcattggggttcaaggggtaaattccatagtcgacaactctcactcttagatggaacctatttataatttcctgaattcgggggagcttcctatagacaaggccgcttcttgaaaggttcagtatcaagctccccgttacgtgatcatggatgagaaactttatcgcgaggactatcaatgccatacttgaagtgtatcactggaacagaatttagcactatgatccattagattcgtggtggcttttgtggagaccatacttctggagccaatcaatctaagaaaatccttggccaagggtatttcttgcccataatgaagaaggattgcatagaatatgtaaggaagtgcaagcaatgctagagatatgctaaggttccacgttcaccacctactgagatcacacccatgagtagcccatggcctttagcagtttgggggatagacctggtaggatccatccccacatgaaaaggaggagtcaaatacataatagtcgcagttaattatttcaccaagtgggttaatgaatattttcacctcaaggaaggccctagacttcgttattaagaacattgtttgttgatacagacttcaattcaagatttcctctgataacggaaagaagtttgacagcaagcacttcacaaacttttatgcccaacatggaattgtgaagagcttctcagctgtagcccggctgcaggccaatggataggtggaagccgtaaacaaaagcttgaaaataatgttgaagaaaaatttccaagcctataatctcattggtcagaagaactttcgtgagtactatgagcctacagaaccacagagagaacttcaacaagacacgcaccatacacaatggcttatgggtgtgaagcattaattcctgtggaggccatcatcccctctcatcaacgagatacttatgacccttcccgaaatgattccctgctcaaggaatcgttggacttgattgaagagctatgcgaaaaagtcataggtccaatttaaaatgtaccaaggaaaattttcccagaactttaattctcaagtgaagagtcatacatttgttgttggagacctcatcttgaggagagtatttcaagctttgcaagagggtacttggccctaatttggagggcccatatgagggactttaaaaagtaggctaggaaacttttcagcttaagcgaatggatagatcgaaggtttttcatgtttagaatgcagaccacttatatcggtactaccaattggccaaggtgaccaagccctgattaaaattgcttaagctttgtgtaaatttttgtataattaccctccttatgtaaaacctctgggtttaatgaaataaagataaaagtagtttatatttgaatttatgctttacgtttttaagccacatgctatgtttaaaccagtgaccaaaaagttagagacgtctaaacttcttagctcacttggggggtactatgtctagttgtgtatgcacccaaaacttacagtgtgttatgtttatttatttttcttatgcatgttaaatttttataactcgcatttaaagcaaaattaatatgcattttcaaccaaattaattaagggaaagatacacttggattccttttcgaggttaaaattagtctaaactctgaaataagatgcgtttttaaccaaatttcccaagaaggagagattcgcctgaattccttctcgaaaaattttagtgggttgcgtaaagtttaaatttggtgaatgtttcaaaataaaacgggagagtcttgcttgcactcctatgcatttttagccttatcttggctgtaaaatatttcctaaaatccatagtgtgtaaaattggcccgcaaaatttatgaacagccttcgtagtgaaagaatcttattgatgaagtctaggatgagaaaatgcgcttgaacgatatcacagtttcagcttaattcctaagcaagggataattcctaaaatctgtaacatctttaaccacttttctcggagtttaacttcacaaagagcaagagtgagggaacgcaggcaacacggaagctcacccttccgtgataaaacaatctctgaccagcattcaataagcatcattttaattatgtaattgactattcaagacattcaaaaagtgttaacactttgcgaccactggatggttcgggaacagtttaaaagaaaatttgtgttgttatgatatttaattaacttatgtttgtagattctaaaaagggttgcaaccgggacaatcctagctgagaacattaaacaagtgtttgtgaacgcttcctaaatcagtagttggattaagtattgagtgaaatctaaggttttaagtgttggtcattggaaccgtaaacttaaaaacaacctaagataatagcccttaaaatgatctaacaagcacatacaagggaataaaagctcgaggaaagaagtgaatagaatacaaaggtctaaagctattatagtgccccgcagaccagacacattaaattgtctctgtgaaaaagaaaaaatagtagtcttctaagttatggcaaagagcctcttagaccgggcttagtaaaacaattatccgaatataaaagttgttctggaaaagataagtgtgttacaaaaaagagcaagttatgattgttactaggatggaatgtttgatttggcatttggttcctggggtggcacttctaaggcattttgaggaagaggaacatcctctcttgagggaatgtccataattcctagtgcttgattttctccgactaa

SEQ ID NO: 69538 - DNA, 2860 bp, Cannabis sativa
ttttctctctctctctctttgataatatttatatgtgcatatagttccttattgtattcagtttgttctttattgtttgttttaagcatctgtttctgtttgggtgacgagaattagaagtaaaagggaaaattggatcagagtataaaacctgaaagagttaactagcatttgataatgattaggattggatattatgttaggttctgattcagagtccgtttttgattattgatgttgatggacgcctaaatgtaggtttggcctcattttaattttagaatggagcaatgagataatgagattgtttgtacccacagctagaataatttagggttttgaattttgattacttccattcattagtctatatatgagattggtagagaaacttagtttatagtaaaatatacatggaaatttggtggtctactagctattgacattgcaatgcctcttcatttgaggtgtgtggtatgaagatttttgaatctttagcaataatgtctcagcgggtcatacattcagaatacgctgatttcagaatatgatccatgtctctggcactggcactggcattagcatgattgaatttgatttctgattattataatcacatcagtaggtgtgtggtttcctttgttcctcaaaatgacaatttcggcttcatacagcagcagtaatatggtctctgaattggtgcacttgaattcatgttcttgtggaatagctctagtttattgataaatatcatgttgtaaataagatggaaattttgcttttgaccatatcgagattttttctatttcacaggttttgaggacatggatagcatttatgcatcacccgaagactttaagaacttgaataatagaaacaaggcaaaagggcttcatctactggagtattttgtcgataaatgccatgaaattggggtacactactacactctttaatatgtacgaacatatgcatattagctgtgattttctactccaagactcttatacctgcaatcaagaattaatgcaacaaaatgataggaaaaataaattcacttaccaagtaatatagaaaacaaaaccaaaataatatgctcttaaacagaaggttgttatacccttcacacacgcacacaaaaataaataaataaataaaactagttccatgagatataacattcatttttgaaatgtgatttttctagatcacttcaaagatggtagccagtactaagcgattttttttttcaatcttccaaataacaaaccaaatacatttgaacaaagcagctaagtaaagacacaaaactaaaaacatcaagatgtactagttttggcctaaaagcctacacatcgaatttgagttgagcgattcactgatgaatcatgaatgaggcacacactgacagtcaaagatcacagatatacatacacacactcttacagtcaaagatcacagatacacatacacacactcttacagtcaaagatcacacatatactcttacagtcaaagatcactctcaagatattttgagtcttcccaacccaagtcctttgacacaccttcaatcaacacaacttttctttcaaaacgatcttctttcccttagtgaaaaactcttttcataatttcttgtgaagaattaaaaaactgatccatgatatatatagagataagcttactaaaaatagcaagctctataccaaccaacttaactactttccaagaaaggaaagttctcaaacttagctggttgaagtcttaagtttgatttgctgatgtggatcttgtttagagaattaatcccgaattattattattttattttagaaaaatcccacattattttaaacttggaatgcactgctacattcatagaagatatgttaatattatccaatatttcatcctagattagattgatgaataacacagcattacttttgattgatttcacaattaatgttgtttattctggtttgcattaagattgcttgtgaagcatgggttaagaggggtgatgccaaagaagtgatctgccatgaggtgaaacgtacacagcctgatcttctggttgttggcagccgtggtcttggtcccttccagaggtaatgatctcagttcttagtattcagttattattattacttctttttttaaaaaaaaaaattagtgccctatgtctacttgttcctcgaagtaaagcctctttcgatttgcttttgtagggtttttgttggaactgtaagcgaattttgtgtaaaacatgctgaatgcccagtcatcactatcaagcgcaaggcatgtgaaactcctcaggatccggtggatgattgattgtctggccaaaatctgttccctattatgttaatagatatttacaccagacactgaaaaacacagtctaaaattgtttgtttaaacattgtattctaatattctgtaaacatttgtgtgtgtgtgtgtgtgaatttgttgaggacaatgactgtggcaatggccatttgacaacgtcttcctcaaagttctgtgattcttggataaatttggcagttggggttctttctttgataaatgacttgtttttttactatcagttcgatgatttaatgttggattaaattcccttattagcttaatgcatacagggacttatgcagctagattcatcttacttggtgttagtttgtttgtaacaaaacagatataaagaactttaccgacttctcaactgcaaagtcagctataaatagcctcagcaagattgagctccaaaagagctagagagagaagagttatcaagtgagagagaagagaggatctattatcgtttccatttgtagatggaacttct

SEQ ID NO: 69539 - DNA, 3180 bp, Cannabis sativa
ttttttgttggtttgaacgtagcttgcacatagtttgaattaggttggaacctagtctgcacatggtttgaactaggttcgaacctagtctgcacatggtttgagctagccttgcatagttcaaacataacctaaaacatggatcgaacccattcctattcatccaccatgtcatcattgtcatgtttgataggccttttttgtaaactaacatgttttatacaacatattttggaatgggaaataaatccctaaatattcagtactttaaaaataatgattttacatatgaaaatatttgataaatatgtattcttatttttcttcacaagttaatccaaatttagtaaataattcaaataacataccttgaagcgccattaagataaggaaggtggaaacttggggtggctggcagagactcatggggtgcacaacttttgaggcagcaattactggggcagatggcggtgacaactatgaaagtaagcgacaagaggcttcaaatagaatgaggaaactgatggcctgtggggggtttcatggggcggcgatggcagcttgaacatatgaaggagggatgtgactgagaaattttggaaaaagacctctaactttcattaagggattaaattttctcacaaggtctttaaaatatattgagggatatatttaataatatgtatattatgcggtaaagacttatccatctccaaaggaaagtcagtgattccgcaggagaaatgggagagaagaatgctaacctgttaaaacttgtaaagtaagacttctttagaaggggaagaaagtgtgttttctcggaattgtgtattgagtaaagtcaatgatgttccgagagaatcaagctctattaacaggattttgtgtttcatttcacaatgatgatgaagagtagtagtattttttcacttccataatgaatgttattgtacttcaggtttgtgaatgtccttcgctatttgctcgattggaagtccttaatatggctagtaatcgcctcactgatgcttgtgcatcctacctatcaactatactgcaaaattgccgaggtaccttttcttagtaatcctgctgataccaataattccatttccaatacgttttcagaaattttaattttttagtaccttatcaataacttcgaatagtgtcgcttctttttggaatatgttgcaattagttgttggaggatatttttttggtcaatgcagatattctcatgcttcagctttgcttttgtttgtagccctttgtagcttaaacgtagaagactgtgccataacgtctagaacaattcaaaaggttgctgatgccttagatgctgggtctgtccttgaacaattatgtattggtaagtttgcttatcttttttttttttggtgatgacagtgtcctttgattttcttatttttaaattaaaaggttgctcaacttcctctcctacaggacataaccctgtctctggaaatgccatcgttaatttactggtcaagcttactgccttgaaaaggtttgaatcaatttttaaacttcattattgttctcttacatatagctataaatttgctgccaactgaagaacaagtatgttttttttctcctgatttttctatagtttttcaaaattgagtctgaatggtttgaagcttagcaagcctgtagttgatagcctttgccagcttgctaaaacctcttctttgtcagcattaatgcttggaaagactggtattggaactgtgagtgaatttcatttcattttaaaagtacaaatgttattgtttatttaactgtagagttcatgttgcaatttctcctatgctgactgcgtatgatctattctggcaggaaggggctttaatgattacggagcttatgttcaatgggactgatgattctgtaaaacttgatctgtcatattgtggacttacacctgaatacattttcaaattaaatgctgatatctccatcatttgttgcattcttgagctcaacctggcaggaaatcccattacacagcaggtttgctattttatgctgtattttttctgttgtaactggaaaaaaaaaatcggcagtaaagaatcaagtggtaaatacatttatacatttatttcctccaaaaaaaaaaaacatttatatcctaaaccaatcattgaagtttttattttttatttttttatttcacttttgaaaaagagggaccaaccactgaacactgttatgctcttatcatccaataatatatgttttaggggatatcatttatcttcatttgatataattcagaacctgtcaatgttaacctattatcaatgtttatagatcaattttttttcttcagtgtttactctatcaaatgatagtctgaaattgcataattttcaactgtcataatcatccatgtgtgaaagaaataacagtttggaaagtaatggttctcgttaatttggaaatgaagtattacagccttttaagtagaagactacagagaaacccaaaaagactaaattacccttacctattaactaattaactaattaacagagttagttacaataggtactaaacattattactcttaacactctccctaaaacttagggtagatagggactctactcgaagtttgtttctaagcagtataaaccttgcattggacagtgcttttgtgaggatttcggttgtttgatcatatgcaggagtgtgcttaaccaccagagttttagctaggaccttctcccttacaaagtataggtcaagttctatgtattttgttcttgcatgaagaacatgctttgcagacatcaaagcagtgctaaggttatcacaacacactgttggccttggaatggatattctgagttcagatagtagtgactggatccaagtgggttcagctgtgacactggatagactcctgtactcggcctcagtgcttgatcgggaaactttttgttgtttcttagatgcccagctaaccaaatgggagccaaagtatacacataatcttgtagttgaccttctatcatccatgtctgatgccatcagaatcacaaaatcttacaagatcaagggaatttgatttttggagtgtaaggccatagttaggtgtccttttcaagtatctcaaaatacgtttcacagttctccaatgagact

SEQ ID NO: 69540 - DNA, 3231 bp, Cannabis sativa
cagaatacaactctgtaactccagaagaaaccaaaaaaacaaacagtgcataaaagtaaaaacagacaagatttctgtatgtggttttaacaatccatattgagttccaatatcaaaaatttcataatttgggaattggagatatttattgagttccaatatcaaaaatttcataatttgggaattgataaccatatttccaagagggctaaagaaaccagatttacatattgttggtattcaaaattcattatatctaaaataaaactacagagtcaatgaccccgacagatagtcatttttacaggacttttaatggaaaaataaaaaataaaaaccacaagaaccgaacaaatggttcaaacttttattgttgaagataaaaatgtgttcataacccaaacattcataacggcataaccttcatgcgaaaacaagagttaacaccgaaagttcctcggtgattgagtggaatatgctcaaggcttgcagaaactatctagatgggcacctaaagagtaacttaactcttcattcgccaaaaccacgtgtcaaaatcgaccaaattatataaaaatagctagggaataatgcaatgcaagaatggcttggctttgctttgttgcgatcctactcttcttcaatatgatacctatatgtacaggctttagaagagcctaaaagatttttgctagacggggaaaacggatccttaatcttctccacctgccccttacaagtgaaggatacaatcccaatatatgttcgggcatgaaatcatgtcttgttagtattcccacaacaggagatctctgcaaataaaaacagcaaacaccatgttaaacacataacccatagagctgttaagttagagagtgaaattgaaatagtcacttacgcaagagatctttggtatcaccagcaagtgcctcaagcctacttctcggaatagtatgagagcctttgctagagacatcgtctccaccaccgtaaaaggcgaagcattggtaaatggatgcaaatctatgaacatttccaactcttcctcggtaaattctatatcgtctaagttttcgtcattgcctgagcctctctttgcaaaatcccctgacgagaactccttgaatgcattactgccagttagcactggggtggtcatgaaagatttcttcttcaacaatgtaataagatgagcacgaaggattatgccaaacaagacaggggcttgggacaccggaggctcgtcgattacaggaaatccattgtgctttgtgcttttgagaatgtgtactatattaccaaccttctcaatcccacgaaaaacctggagcggaccagttacgacgtcgcttactgttagctgcctcatatatggttcaacatgagtctccagataaggtaatccctttgatttcatgataagatcgtatatgtttccattgaaaacatcagccacagtcttggaaacaagaagaaccagcattattaatggtaacagtaataaattattcgtcaattccagaatgatcacacacagggaaacagtcatcctcattgatccaccgaggaatgaagcggcacctaacacagcataaaggccttggttcagattcgagtgtggaccaagtagcataccagcgaaacgtccaaaagatgcacctgtcacaatttcaggtacaaaaagaccagagggagcacaaatcccatagctaaagatgctaaggaaaaagcaggtgacaaaaaatatgagaactgatgaatattgaaactcaaaatcagtgcctttgctgaaaaggttcttgatggcatcatcatttgtattaaatatgagactagccagatcattatagtgaccaggaggacattgaaacttcttgtagttaccagaccggcctattgtaggacaggcctcagttgcatcagatgggcaaggttggcaggatgcaaagaatggtaagccaaaaagaaggaaagatgtgaacacggaaattgcacaagcaagaagaattctgaaaacagtgcctttcctggaaaggggaaacatgaaagattgagcttagacttcaatacagaaagttgtgaaatcataacatctcctagctaaaagaacaaaaaaaaggcttactcgttgattatgttgtacaatctaagaactttgtccaatagaaagttataaaagcttcccaatatgccaccaacaataccaagggcaagaacaggaggcacatcgacaaggtgatatgaaatgtttgctgagtaaacatcaaacattatcagtcccccagtaccaaacagcccacatttcccgctgaagcaaacatcaatgagagcccggagcacaattgcaactacagctgtcgcgaagaaagctctccacagaagagcacttctccacctacataaaaatgcaatattatagtaatagttacgtgcaagaaaagtaataatggccatacaaagttttgaagtagaggcatagaggtacagtaaggttaaaagacaaacgagctcagctattcaggctgttataccaagatgccatctcttcaaaagcaaacagcacaccaccaacaggtgctcggaaagaggcagcaataccagcagccgcaccacatgttacaagatcccgtctgtccctatcattcttgaaaaatcgaagccatttccatgtcaaattatattttttggacccgccctgacctagtattgaagcaatacatgcaccagtatgaaccattggccctgccttcccaacaagaagagaagatgacactgctgttatgctgccaacaatctagacatcaagaaaacagaacccgaagagttaaaagtaatagactcaggactacacaagaattttgaatctatgcaaacacctgctctaagtcacattagctcatgcattttaagtaaatattagaaaaaaaaaagttgccaaaatgacagcataaaaattccaaattagcaaataaaattttatcaatattaatatatacagctataattgttttttttaacagtgaacacaaatataacttttcattaaagttataactattaattacagctataagttttcattaagaaattacgttttgaacaagaagtacaactataacttttcattaagaaattacgcgtttcaaacaatgagtacaaatataacttttcattaagaaattactgaagaaaacaactaagttgtcctaaaaacttcacactaagatttct

SEQ ID NO: 69541 - DNA, 2795 bp, Cannabis sativa
  modified_base (630)..(632): a, c, t, g, unknown or other
agtatctgaaaatcctgtagaatatattgcagccatgttactccacttgttgtagcagccaatgctcgatattctacttttgcatagcttttggaaattgttggctgcttctttattttctaggagatgagactgtctccaatgaagatacaataccatattgttgagcgtcgagtaacgggccaagatgcccagccagagtcagaaagccatagagtgtcaatgctgaagtagatgaatagaggagtccttcaccaagatttcctttcaggtatcggagtaagtgataaacttcttggaggtgagttgtccttggtgtggccataaattgggtaaggtagttgatagcaaaggtgatatctagcctagacaaggtgagatacagcatcttgccaatgagttggtgatagtgtgagaggttgtcaagtgcttcactgagttcattatcgagtttgagctttggatccataggagtcttgctaggtgttacacaaattttcgttaactaaatttgagcctcacaatagtgatttcgcatagaaaaaataaaagctatagaaataaaagtatgaacacagggttatttatgtggttttgcagtcaaaattctacatagtccacgagtcaatnnnattcagatttctgattgtttttttttaggaactctcctgtatgagttttttttgtcccttttttgatcttctttgtcactatttataattacatagtggacctactgtccaaacagacataaaaaaagatagtaaaaagaatgcaattaaacagcgggagccccagcctctttgtacgggtcagctggatctaaaggagtcggaggataagctaggtctgaagaggctggaggatcatcagtctgggcagtaggagcctcgacattctgttcggtcggagaggtggaagtggtcgccttaggattctcattagccgtctgagcagtgcagtagtcgagaaacatgtcttttgaagtgccgaggtattcaaagtttgccttaggattggccttccaaaagtcataaaaaatctcaagaccaactgtctctaaggcatccactttcttcccgagcttctccacctcagacttctcgctcttaacctcagtctatagttccttttccctagtatttttgtccttaagctcatcttccaacctacaaagaagagtttggagaccctctctttcgtcttggagactggcaatgtcccgagacaaagaagcattatctgcctcgagttgctcggttgacggcatctcctgtagttccctagtcagctcggcaactctggccttagcagcaagaagtttcttatagacctctccaagtttcgtccggacagtctgaagttaggtcacatcttcagcatcctttttggccaagtccacttcccttcgcattgtattggacattgcaaggttcttgacagcagtcgacttagctcgggagtaggcgtaggccatcttcacgcctgtctgtgcgggaatagcattaaaatctgaactagtcaaagagaaatgaaagaaaggtgttagaaaggacttactcgtgaaagctccttcagaactcctcccaagaccagttccaaggacaaatcagtgtccgccccagccaactattcgttcacctctgggagcgaccgggtcacatagtggttaagcatgtctttgcctctcttggtctccgggcataataccaaaggtgcggcaagggccctaacttgttcagattcgcccctgacgagctcggatccagtcctagcctgcttaggtccatccgaactgcctccctgggaacctttggatttgacgacctttaaggtagaagggtccacagtaggttgttcctcaaagagatcaatgacctctttaactggtgccttctccttggacgaagtctcaccacctttagacttcttagctggaggggacaagcctcagctccccctactctcttcttcagagcctcaatcatcttctaagacattttttgcacggaaaaaataatatagtaagaagaagacataaaatatatgaaggcataaaaatcaagtaaaataagtgtaagttgaagtactctgcacactggcaggagcgtttccccgaacaagcacagatggagtgtcatcatccgaagattcttctcgctcctctaggacggcttttccttttccctctacaggggtagatggtcgagcaggcaagccaggctccctgatctggatagcatgttctatcggcctctgctcggccgggaggattttcttcttcttcaacggcctctcctgctctgaatattcttgagcctccttctcctgctcagaatattcctaagcatactgcttggctccagcatcacccttcaacttagcctcacgcttaagttgaataagctccttctcttgctcaactcccttagcccggccagacctggacttcttcttcctccccttcacacacaggggtataaagtctgcccaataaagcttgtacttcacaaagttgtcatctcagttcaatgaagtgatattctgagcagcatccgacaactagagaattttttgggccctttccctaagtcccaatgcgaagggtggacggcaaaacacagggatctgttgaaaccgaatataggtggcctccatgccctccacgaagtagtactcatcaacaaaacccccaatcttgctaacctccgtggggataaaggctgcccaataaagcttgtacttcaccaagttgtcctctgagttcaatgaagtgatatttcgagcagcatccg

SEQ ID NO: 69542 - DNA, 2772 bp, Cannabis sativa
ctctctcttctttctctctctaagctcactcccaaggtaccatctcaccatctctctctctctctctctcttagtctcttaaatttattgttttgttttgctctgtaatcatttcaggtgccattaacatccgcgtttcaaagcttggttggagctcatggacggtacttttctttttctgatttattattatttattgctatatatgtatgtatgaatgtctgtatgagttatgaataaaggaaccatctttgttcaattagcttctctttttttaataatggcttctcgtgatgggtttaggatatgattagagttttatttcttgtgttattagacattgtgttggtatttaatgaagattaatgggttgttcaaattgagttgggtgtttgtattggttgtgttttggtgttggtacttagattttgggttggtgaacaacaagtgtttgttgaaatgtctaagagagaagatgtttaggtccagagtttagcttgcttataatctggctgcatttatgatcagcagagagattcattgggtacttttcagttaagtcgttggaaataatggtgattaactcaatagtattgaaatatcttatcagctcttcatgatgatgtcttcactggcaggaaattgaacttgaacttagggtgttgtagtagttatgtaatttgtgttctgatatccgaagtagatgaaccgatatgaagaggtatgagaagttagacatacattgagacaacaaaatgtgaaaaaagatatcaagatgtagttggattgagctaatcaccattagtttatggggatttgattttgtttacccgctcgtattcgcgagcatcggtatgtgctgcatctcctaagtcctaagcataagctatttggtctgaatgtggaaaagagaagctaattgaaaggaaatgtcttcaatattctactaacatatacatttttgcagtcttatcacacttttgtttgggattttaagaatttgatttaaatttaaagaatgatgctaaaagatattagtttgtgtagcttataccatcactgtgtgcaatgttttgtatttggagttctgtgtttgctcaactaaaatcaatattctaataattctttttcggtagcatttcagtttcctaagacataattctctaacccacggtagtattttaaagcttgttctggttttccaaaacacattttattgctctgactctctttccatgcatttggggtggtttcctaatacaagagtatctaaaaacttaaatttgaggctcttaattattcttacaagtattctatcatcataattcactttgtttttccctcaccatttttggaatttaaagtatataatgtagataaatttctacatacttacagtgccagcacccaattatctgagatacttccaaacaatgaagcgatgtcatcaagtagaaagccagtttctggatttagaaccttttgcaccggccaaggtgcgtgtagacctttaattaaccatccttcgtgcgctgagccacacttacaacctttatgtgtagcttgatatttctttccatggatgatcttttgccaattgaatgtgtgttttcgggattctattagcctcagtcacttattgcttgtctatttattttcagaatgtgatgacactgaccttattttgtaatggaaattggcccttttaagacttatacaatgaaataaaagtcaaaagtgtgttagttagattgtgatgttcttctaattatagttagaaaaaaaaaatgatcttattttttgcctatgtcagatttgtcaacaaagaaatgtgtgccctgcagtgcgaaagatttgcgacccatgaccgaagaatcagcaaatcatctgattcaaaaggtttgtggttgaatgcctttcttacatctagattagtgtcatgtccaaagtttgaatctttcctctaatgtcaaaaaaagggttaaaagttctctttgtttattgttatacactttcaggtggatggttggaatctaattaatgaagatggcaaactgaaactgaaatattcatgcaaagtgaagagtttcactaaaggattggaattattcaagcttgtaggtgatgttgctgaagccgaaggtatcttgaaatttcattcttttcggatacaaatatgcttccaatcttccatgtatgattgatttttgaattgtgtgaaaattatgtcgattcgcttacgcaggtcatcatcctgaccttcaccttgttggatggaacaatgtcacaattgagatctggacacatgcagttggtgagctttgtcattgatcaaactatggtttaaattatgtctatcatgttcttgagtgtagttaattacttagtaatcatattctgtagtagttgattgttacatgacatcaaatcagttttgatttaagatttgatgtttaaattatgtttgaatatgtcacacacatgttgagatatctaagtcttagtacatttagggggtttgaaattcttcattttgcatgtggttgcccttcgaaataccttgtctctttcctaaattggctcagaacttttatctcctggctcaacataattatagtactgttaattttagatggaatttttcaacataggttggatgatcatgtacataaatgaatgtgcccaccaaatatttatttattttcttaaccaaattccatttatgaactcttgttgaaattttcaaagtctattgcaaagcttaagcatttg

SEQ ID NO: 69543 - DNA, 2330 bp, Cannabis sativa
acagtattgttgtaatattttaccatttttagaatattcctgtttttttccctaaaaattaagtggttaaagtgtatatttattttataaattaattagttaaagtgtatatatattttataacttgttaaccaactaataactacggatattacctaactctattagttaattagttgttagtttgttattcttgtgtaactacttttctgtttcattcttggttgtgataacttggtctataaataaagaggtttgcttccctttcacgggtaagcttttagctccaaattcacgccctgtttctctttgatctgctcttaagctcttagcttctctctttcttcttcatgcatggttttaccttcttcatggtatcatcgtctctgacttgcgtccacgaaatcttccacctctaatccattggcctcaatggctcccactgctcctcctccctctccaattcagtggaatccgtttgccaattccctgtcttcttccctcaccattaaactcaatcgaatcaactacctatcttggaagtcccaagttgtgcctactgttacaggccatggcttagatcagatcttgttctctgatatcaccccacccccaaatctgatcaccggagctcctaatctagagtacctccaatggaaaaagaaagatcacctcctcctttcttggcttcggtcgtcaatgtcggaattgattcttgcctgcgttgctacgtttgccacttctttctctgtatggagagctcttgagcaatgattctccagccaaacaaaggctcgactactacagttgaagggtgtgttctctcgtcttcagaaaaggactttgtcaattgctgaatatgtcgaaaaggctaaggccactgctaatgctctggctatagcaggatttcttgttactactcaagatctggtgctacaactctttaatggtcttggacaagaatttgacccagtggtctctggaatcacttctcgcggtgaccatctttcctttgaggaagttcaggccctcttgctctcgcatgaaacacgattggaacaccacaacagtgtcacagattcatcactcaagatgcaagccaacctgagtatgaatcaatctagaaatggaggcaatcatggctctggtgcatctactcgtactgaaaacaatgaaataggtcggggaaatggtcaatactttgggcgtggcactggttctaaattattgtgtcaagtgtgtcttcgttttggtcacacaacagctgtttgtcactatcaattcgataaaaaatttgtcactcccaagtatggtagttcttcttcctctcaagcctttttaacttaaattgactctacttatgatccgcaagcgttaaccacaaccatgcttcctgacatgggagatgatgatctctggtatgtggacagaggagctaccaaccatgtcagctatggcacaactaatttggacactgctacaccataccatggcactgagacattggctattggtaatcgtaagaagttactcatttcccatattggtcagtcgtctattccctatattgattcctctcctttacatttaaacaacatcttacatgtgccttctattaagaaaaatcttgttagtgtttctcaactcaccactgataataatgtctatcttgaattctataaatcttgttattttgtaaaggacaagctaactgggacagtgcttcttaaaggcagagctaaagattaggggtgttcactaagtatccgatccaatccaatccgcacgatctaatataatccaatccgcaaaatgcggatatccgcacttgcgcggattggattggattgaaaaatctaaaatccgcacttgcgcggattggatgctgtttgacctcaaaaagtaactaatttaatctaatccgcacttaattatatatattttaaaaaaattataatctataatatatattaattttaaaatttctaatttcttaatcttttttcttaatatattaagttggtgtattttatttgttttataataaaaaataccaaaataattattcttatagacacataatacacataaatttaaatatatatatatatactaacttatttattttagtaataaatacatatatattttagtgtaaatctaaagatgagtacataacatatatattgacatatatatatatattgatttaatttatatataaatggatatgaaaataaattattattagagattaagaaacaatagtcttttttattttttttttctatgaaatattaaataatttatcattaaaaaaaataaccgat

SEQ ID NO: 69544 - DNA, 7566 bp, Cannabis sativa
  modified_base (7501)..(7526): a, c, t, g, unknown or other
taaattaaagtttaacatagtattatataaaaatatgatatataatccaattcaatataatacaatacaatacaatacgtcctaatacggcgttccaaacgagccatatatgaataaaacatgtgatggctcatttttctactgtatagtttctcacacttgatcatgaaccttagagcaaatttgccgttatttccggaaaatttcgtttatccagcaggatcacaactgggctagtaggcgagttgactagattattgaggtttgaccaggttttgttcgtttttatttccttcaacccaaaacattaaaaaaaaaaaaaagaaaagaaaaatttattcagggtgtacagctggttacccgtaccaggacaaggaggtaaattgatgattagattccattattccttgtgttcctgagactcaaatcctcccaaagttaaaaagaaagaaaaagattacatgtactaactttacttaaaactaaaactaatatatatataaactaaagctaatattaaaacttaatgataatagtaaaagaatagataagtgattctctgctacagcgggcatcaaccatacctatctctgagttggcttcactagaaccgtccacgtgttatttgggccaaaagggtaggtcccatttaacttgaattgaacagatcaagacggcatctttatatattattctaatgtgtgaatacaacatatatgttgctcacggacgggatggggtccacagtggaattgtactgttttaatggagaatgatgtacatgggggatgatggaggttaggagcataatgagtgtttcttaaaagaaatgaaagaggtttagttggcactgagaaaaatgagtgtgtaacagcaaagagaggtctgttagaatagttggcaaatgtgtcagtaaaaaataaaaataaagtatgtcaaagaagcaagcaaggtagcaagcttggccttgaagagaagaacctctccaatctactctgaaagtttatttctttaaaaaaaaaaaacacaatagagttatactatattattattcagtcaaaaagagagagaaagttagagaaattgaaacagtaaagtgtgggaggaaaaaagattaggttctgtaataatttttcgaacaagggcagttggcgcagtagttagtctgtcttttaaaatcatacatgtcacctgttaacttgagcaggtaagcaaggtctcaatctttgagttttttattttaattttttaggtttttctctctctagctaggcttggggtgagttgagtatggtctgtgatctataaaagttggaacttgatggtttctttgttgtttttgcaagtacccaatttgatgaaattgagttttcttagccgaattttagctaagcatttgatgctcttgaaggtacaataaaagaccaattagggggactgttctaaacaacctgcccatttcagttcttacacaattcaagtataatttgatgcctcttggtctttattgggtacccatttgagaatatcttgaaaggggtttttgccatacccctttttcttggttttggttctggaacatctattactaacaaacaacttgttgtaacccccttgagacttattcctacggaattaaacaccctttgttttcttcgtaaatctatgtagtaatcttcaattgtgtccttgttgtggagattcaaacgtttacgtcaatcatattgatgtatttgatcgattagaaggtatgaaaatttagttcttctcctctaaacaaaaaggaaaaagggtatctgctttcttttcgctactcggctgagctgttacttagctaatgtctttgtttgcctatgtctactttatgctctgaaaggttcactttcttgtctgtgggaagcatttatttttcttctttcttccttctatgcagttgagtagtttgatcctatggtttctgaatgaaataagttatttgtcatttcactttgtgtctatagggtactacagttgaagggcttcttttacttttacaccccatcagtttaataaagctgtcaaggttacttgccccttattgattcctgcaagttatcaactttagtcaaaactcacttttccttttgtttcgtatatagttttatcttctgtttgtctgggttttctcctttgtatagtgcaactccgttgattttgggagagtttttattctcagaacttttgagttgaagagatgagcggtcaggagaacgaggatgtggggtttcaacatagaagtcactttcttaattgtccatcttcagggatgagcacaaacgcccttcctgaaaaggtttcaggaataccattgagctccctgactatgtttaaaccttccaatggacaagaacatttctttccttctggttgggatccacttgtttcattgagtcagagtgagaattttggaggttcttcagtgatttctcatggggaattttgcaatccctcataccctgttgcgttggaaaatcaggggatgagtagcaactcccagctagttcaatatccatccgattcgagtttcgttgagatggtgccaaagctttcgtgctttgacaatgcggggttctcagaaatggttggttcttttggcttgcctcagtgtgctgagattgctagtaatactaatgggtgtcctcaaaattacacactaaacaaagagaaaggcagtgagaggacatcaagaattgggacacaatctcaagatggttgccagatttcagatggtgccataggatcctcacctactggaaaaagaagaaaacgcgttcccgatttatgctttcccctcagtccggagaaggtaagatcatgtgtaccttaagaaattcaattatgctatttggtgatttcacttttctttagttttgtgttcccaaaggattggattttattgttttctttgatagaatgctgaaggggaacaacaaatggatctgtctggagataattccaatgttcgaaaggagccggatgagaagaaactgaaaactgaagaatttactagcggaaatatgcgtagtaagccaacagcagcagcaggtaaacaagctaaggagagttctaacagtggagatgctcaaaaggataattacattcatgtgagagcccggaggggtcaggctaccaatagtcatagccttgcagaaagggtaggttctccttcagtgcctcataataagcaaattccttcctgtttccatatatactgtgagacaatagaactttctttccaattgcaggtgagaagagaaaaaattagtgagcggatgagattgcttcaagaacttgttccaggatgcaataaggtacataattagaaactataaaactttcaagagtagtgctggtctgtcattgcattcttagtgctgaataatactccatttaatcattttagattacgggaaaggcggtaatgcttgatgagatcatcaactatgtacagtcgctgcagcagcaggtcgaggtatgttgttctgcgaatctatattgaggaattttactcttaatgctatgctgtttttagtcctcataaaattaagtttcgtgctaattacttccagcttagtttgttcccctatccttggaaagcgtcatgaaagagaatttatccttattccctattacaatttcggatgcttgccctttttctggtttgagtttctctactgatgaatatactcctgcaagttcttagttgctccttataggttgtttactacttaacttctagcaaaccatgctgaatcacagatttaataagaaagaaaaggaaaatatattttgcataccaccttactgtttttacttccacatttgaaaagcaaacaagtacccttatgaacgcaaccatgttctaaatggttctcttttattttcacctcactgcagtttttgtcaatgaaactagcgactgtgaatccagaactgaacattgatatagagcggcttctatccaaagatgcaagccaggttggtcccgcgtaacttttcgtaagtgttgaaccctaacaacaattacgtctgaaattcatattactcatcattctgtgtctagattctcaactcgcgaggcagcaacgcagctatttttgggctaggccccggaatgggctcttcttctcaacattatccgcatggaatctttcaggcaaaccttccaagtataccgagttcagctcagcaatttgcttctttgcctcaggtaagttaagaatcttcaagctgtgctgcaattactatataaactcctgttctgccaataatcttaaacaaacattcgttttacttgcaggcagttctagataatgaacttcaaggtctttttcatatgggatatgattctactgcttctattgacaatttgggaccaaatggtactaatttctcttcatttttatcgaactgtgaatgcattttatctgtcatttgtatttctaaccataactgcaatatatcttgttgattctccagggcgcttgaaaccagagctatagttatggatgagattagaactttccagttgactgatttgactcaatcaggaggggggaaaaacacacaagaaaaaagaaaaaagttcagttgtataggatctagcagttcctaactagttcttcgaatttttagcagaagaagatgacatttgaaaaagttaagaatcttgtatatttttgagacagcatttgattggtgagcatgatttgtttttcttattaattgtgttgtagggttgtccgtgtattgaagctttgtgagggttttgggaaatgattttgtagagtgcatcaaattcaagcaagaatagatggacaaatagtttgttttgtttctttcttgttttgcacacaattccctcttcactacatgttttgattagatagagttgttttctttttctttttcttttttttttttttttatatatcattattaataaaatagtaatgtcacagaaaatgttttacatcaacaaattcaacaataattacaaaagttaggcaagggagatacatttttaccataaacaatacctaatccactgttgttctaacttatattttagattattcatgaatttagtttggctaggaagctggggctattttgcatgattttcaggccgtctcgaaactgattcaagtcgtgatgagttgtggcgattgatgagttcatcattaagtagggatgtcgcatggtctctatgaggttggttgagattaaaatgaagatcaataatgcatgcaatttccccttcggggtcacacccacgcattggggtggggtttatctattgggataacagtggccaagtgcttggtgctttctccatcaacctagaagggctgttctctttggccgaaaagaaatctatgagcaccactacaaaaattacatggaacattgtacatttttttttcactgacgtacaaacgttcacacggcggttgttgccagtcgatgttccatgcagtaacatataccgaaaaaacatcatatgtcggcaccaaagtgaacttcacaggtcgattttctcacaaacaatgtcctagaaaatatgttaggcaactcgtgttgtcgtgtcgtgttcgtgttgacacgtttataacacgatacaattaagataaacatgaacatgatacaattaattagtaggccacacaacacgaaaacgacatgacacgataacacgactatgactatattatcaagataaacatagaagttttaaatttttattataaaaagctatggaaattaaatcgttatcgtatcaatacgataatgatacaatatgattattaaatgtgccgatacaactatgacatgacacgataaaagtaaacatgaacttaatacaattattaaatctgtcgaaaattcaaaaatgaacacaataattattaaacgtgtcacccatatttatttatttcgtgtcgttttcaaattgaatcatcgtgtcgtaacccatactgcaaaccttagaacatcaaaataaataaggtttaacgcatttgggacgtcctttgccagccaatcgacatatggtgttcacctggtttctttgaggctagtttctctcccacaatgcatggaacggatgctttgttggtaattgatgctatctaaataaaaaggaatttttctagtttggtcgacccacttataagggatatttcaaagacccctaatagtcttgaacttgaaatcattgtttagccaagcttacttttgatgctaaggtttacaattttggattggttttgtccctgattgtcttcctagtactaaaacatttctctttaaataaagtggcaatacttaccttttaaaaaaaattgatcacacttaattaaatggagacgtcttcaattatttcgaattgactccaatcttgaaaaagctgacattgatactccaatgaaatggttattcaagtttattattttcagaaaaaatacaagtacaaaatattaatgatacatgaaaaacaaacaaaacccacaaatttgttaacatctttataaataaaattagagaacttcgaaagtgtactaagtggtatctacactacatatgtagatgttattctgatgatatttaagttttatataatttaatttaataattattaattaaaattgttaattactagtaaaatgttgcttcatgatagtatgggcatcaatgtcttttatcaagaagaaagaaccttaatcattgtaacggtaaccattgttaattactagcctgtaatatctttataatttttctattaaccattgtaacggtacaaaaatagctactgtaaatacaattattacaattgttgtttagtctttgatatcgtaaagttcacgatcacaagttccttatcgtggagagtgactctagggtcgtaattaactctctcacgtgtcggtgtgttgggagattgagaactactctaatttttgtttagagctctctaattgttttaatggttgtatttttacttgtattcctagaacctgtaattttgctgcacctaatgtggttaagtggactttcacttataatcggtttggttgcttacctttgttttaccttctgaaaaatttattttgtaatgaccagaagtctaatttctaattaataggatcttttcaaatatatatatatatatatatatatatatatatagcaacaaaagttacataaatgatatctaatattatccctttttccctgctccctaaccaatgattcccacaattaaactccaaaggccaagctgctaatattagaatattttatattaggtataaaatgaatatacatgtatataatacaataaatattttatatttattgaatttagttataattaattagttggtattttattcatcaatttgatattatctaggcattaaaattaatattttcataaaatggtgactattcaatggttacnnnnnnnnnnnnnnnnnnnnnnnnnnttttttttaacttgtaatagcaggttactaataggtagac

SEQ ID NO: 69545 - DNA, 6894 bp, Cannabis sativa
ggaggaaaagcttaatgatgaacccattgcctgcttacatgatgtgtcctatccagagggttatgttccttctgcccgactttcttcgactccaatcactttggagcctgccaaagtattccctttcactcttgacccttttcagtctgaagccatcaagtgccttgaagatggtgagtccgtgatggtaagtttttctttttcctgatatatatatatgtatatatatatatatttggagtaattaataaaattgatatttttctacttgaggctatactttgagttgttggaatgcgagtgactgtgagtggtcgtggaatggttttgtaattatttaggtttacacttccactttctaatgtgagttgagtaacactatctatttacaaacgaaagcaaatggtcgatgtataatatctggctgctcaacgtccagtcacagccattgttaccagcagtattaactggagtcgaggtttagttgaaaaatatgtggttttaagtttgatatgtaactgagaaagtagtatcactatgacaatgaacaagttagtgtgactgtgagaaggaatggcttgctgagctttatgaatgagttgaataaatcacaagtgtagaagatattggtcttttaaggctaactcaagtggttgggaaaaaatgtttaagaattgcctggggtacttatagtctttgttaatgtgtcgtctcatagtaataataaaggacgaatctgtgaacatatctagtgttgtccttttccttttatttctatagtcactgagtgtttgttttgacttcctaggtgtctgcccatacatctgctggaaaaactgttgttgctctatatgctattgctatgtctttgaaaaataaacaaagggtcatatatacctcaccaatcaaggccttgagcaatcaaaagtatagggagttcaaggaggagttctcagatgttggattgatgactggggatgtaacgattgatccaaatgcttcatgtttggtaggttttttatgcccaaatgtagtatgtttttctcaatatgcactatagtttatctcatggatcattagtgtgcatttaatttaggttatgacaacagaaatttggcgtagtatgcaatacaaaggatcagaaataacacgtgaggtggcttgggtcatctttgatgaggtacattatatgcgtgatagagaaaggggtgttgtatgggaagagagcattgttatggccccgaagaattctcgatttgtattcctctctgcaacagtgcctaacgcaaaggaatttgctgattgggttgctaaggtaattcatctttctaagcttaacttaataaccattttgtacatgacattgtatctgcgagtgtttgcaaatgaatgatagatgtagcatctgcaagagggactaatactgtaattctgtagtatagcactctgtcatcgtatttacatgaaaattaatgcttctatttcatttttataccatggagtttcttcaagcatataaggaaccgattataatttgaagctttgctttctgtatatgacttggtttcccatatgtggtggactgcagattcacaaacaaccatgtcacattgtttatactgattataggccaacacctcttcagcattatgttttcccttctggaggcgatggtctatacttggtagtggatgaaaagggaaaattccgtgaagatagctttcagaagtcattaaatgcgcttgttcctgttagtgagggtgacaaaaaaaaggagaatggaaaatggaagaaaggtttggttatgggcaagattggtgaagaaactgacatctttaagatggtgaaaatgatcatccagcgtcaatatgatcctgtcatactttttagttttagcaaaaaggaatgtgaaactcttgcaatgcaggtaggatatttatttcatgataaactgtaggtctcctgcttaattttacattctgatgacatacatgcatttatacaaacatatgtatatttttgtgtgtgtgcacaatgtatatttgacagaaaaatgtgtgttaatatgcccctgtggctggtaataacataggaaaattgagtataaaaattataaatatttgggtctagttttatttatttttatatatattactggtgaaaatttattccgatgtagtcttctgggccatgctattttcatgtccaggatatttcataggttgagccacttagttctacattaaaaggaagtaggattaagacctgtgtatttatcctttcaaaaatggctgcttgtttatcagtgtgttataattatgtagtgaggcaattgacctttgtctctatttcccaaaaaagaaaaaaaaaaaaaaaaaacaagtacgatataatactctacctcttctataataaatatcattgctggatttctcatttgaaaatatgaatatgtttgtccttattgtgattttactttggtttgttatagatggcaaaaatggatctaaacggggatgatgagaaagtgaacatagaaaccatattttggagtgccatggatatgctgtctgacgatgataagaagttacctcaggcaagcttcttttcttttctggaatttgctcagaattgccaaatatatttttctgctttattgaagacaacaacaacatgaaactgtgacaatttagcttttgcagtcttagatattttggtagatagtttgataactttatgaatcaaaaatcataagaggtgcaccttctgaaatcaatttgatgcaagggtgtaatggaactttggctcaatgacatttgatcatttagcattcacactgttggagtgttcggtttacttgattttgatgagtgctgtagtgtttgaagcctttttgcttgagcaaaggagggtgtaatgtggaactgtggtgtttgttgatttttgggctatattgctggaagtaaatattattatttgtagataaggagtaggatatataatttttgtgggagaaaatacgattgttagttttactttggattttaatggtgaaggaattttaaagtatccgtaatcatatcccattttataaacaataaccaaaaaagaaaaacagcaatgccctgcaaactgtgcttccagctaaactccaaagtaaaactaaaatagacaggatgcctattataactaaatatacaatctcatataaaaaaaatgggatataatttcttaaagtacgaaaaataggaacgcccccatagtaggagcaaaaatgatgcccccacctaacaagcttcatatattatatactatgtatatatataagtgtatagcaaaattgatcaagggtacaattttgaactcatctattataaatggtatttaatataacaatagggcactaagttagttccaagacaaacattgaggtactgaaatagtatattcccttatttttttccatgaaaaagaggaacaaaaaaatactgattttagtttagtttttatttatgctgaatatattgattcttgttggtttatgttattcattttcttgcctgtcaatatattgtttccatacaggtttcacatatgttacctctcttgaaacgtggaataggagtgcatcattctggcttgcttcctattttaaaagaagttattgagatactatttcaagaaggattgattaaggttggttctagatttgatatttctggcagtattgtttttgtttctatagtttagtttttttgggttatgtctagtgcgtgcttcccctctaaatgttgatttccaatgttttttaaattagatcagattatcaggctggttaaattgtttaatgctattatttagcaatctacttttcaatttatatactgaatcagtagttggatgaaagcagaatagaaaattgggacttgtgcatgggaagatttgagcaaaaatacctgattttaatttgccactacaaccatcagattgtctcttcttaccatttttttaacagaataaaccagacatttatttatattgttaatttaataatgtgataaaattcatccattttcatttgaatttgatgaaacctcttcttgttcacatttaagttttatgtatgtgtatattcagtgtttgtttgccacagagacatttagcattggtttgaacatgcccgctaagactgttgtgtttaccaatgtccgtaaatttgatggagataaattcagatggttatccagtggagaatatatacaaatgagtggtcgtgctggtcgtcgtggcattgataagcgtgggatatgcattcttatggtggatgagaagcttgagccatctactgctaagatgatgctgaaaggaagtgctgattgcttaaataggtacttgtagttgtattgtggtgaactttgtcagtaaatttgatacattttaataataaaataaatttttactctttacaaatatttaaatagaattggttcttccacccctccttaggcgtgtagtttgtgtttgcttggaaatttatagctgcaatttcattattaggcaagttttatacatcgcagagatccacacttttcttaaatgaagttgcacttgcagtagacaaattttatgaccttctatgttgctttctaagtagctataccttgaccttttttctttgtcccaaaatgatttttaagggattatgacagaataagtcagggcactaaataccttagaaaatcagtttgtaagcagtacctaccctcttttttagtttctataatgtgcccgtgtgtgatctgtattttcttattattcctatttttcattatttggaattgcctgttatttacttctttctccatctcattccagtgccttccatttaagctacaacatgcttttgaatcaattgcgctgtgaagatggtgacccagagaatttgcttcgaaattctttttatcaatttcaagcagatcgtgcccttcctgatctcgaggttggtattaacgaaggaaaaatgtgcattttttattgcatttgatttttttatttttctcaagtaaacagcatatgaaagtatggccgatggtttaacagtcaattttaatttctaaattaggcttcagacaagacgaatcttctagaatctgtttaaataatatttgtttatatttgatgaggaaaaaggtgatgaaagcattctttgtaaatgttgttttgccagaaacaagtaaagggcttggagctagaaagggattcaattataatagaagaagaggatagtttgaagaattattacaatttgttacagcaatacaatagtttgaagaaggatattcgtgatattttgctttctccaaggtactgcttaccgtttttgcaatctggtaggctggtttctatccagtgcacaaggagtaatgaaatttacccattattctccactaagaatcaggtcacatggggagtgataatcaatttccaaaaggtgaagaatgcttctgaaggtgagaactctcagtttcttttggttcagtagtgtcttcttctctagagttgttgttgttggttttcttttttatggtgttgaatagtccagtccatatattgagcagatgattcaagtagaaaaccagaagattcaaactacatggtggatattcttacaagatgtgcggtgaatagagatggagtaggaaagaaaaccattaagatcattcccttgaaagagccaggagaacctgttgttgtttctgtttccatttctcaggtatcttgtattgtacttttcttcttgccctttctcccctattggaagtttcattgtgatgtttctctttgtttctatggtaattgtttttcatatgagttatttctctctctttgacttatttctaaattatgcattcattttcgaaacagattcaaagtttaagtagtcttcgtgtgcacatacccaatgacctcttgccattagaagctcgagaaaacacagttaaaaagatttcagaaattatttcaagattcagcgagaaagggattcccctcctagatccagaagatgaaatgaatgtatatattttattccagttccttcttatgtaattatgttcttgtttcctttccttccctccttggcttatatcctactaaggtcttattactttgcagattaaaagtagctcatacaaaaaggcagctcgaaggatagaagcattagaaagcctgtttgacaagcatgaagtagcaaaatctcctctcattgaacaaaagctcaaagcatttcatgggaagcaagaactaacagcacaaataaagtcaattaaaaaaacaatgcgctcttctactgcattggcttttaaagatgaactaaaggcaagaaaacgagttcttcggaggctagggtaaatataacttccactcttcagttttacttgctctttacaggatacatttttgtttaaatttttgacagcttttatgttaaaacctaaaatggtatatatatatattcaatatatattatatgtcgtagacaatgtttgctaaacataatctctcaaatttgagtaaattaggtatctctttaaaatgccatttatctatacttatagcttagtttgatgtcctacttgtggggtgctctacttagtttttgtcaaattaacataccatggtgctataaactacttttaaataacttggatatgatatcacgtaacttatggtaaacatctaatagtattattatttgttgatcaacatatttttagtgttttaatttttgttaatgatatggatgatgatacttacagataccttccatttaaaataggaaaattcattgagctgcatgtgttaatgataattcaatgaaaattttgatgttgc

SEQ ID NO: 69546 - DNA, 3846 bp, Cannabis sativa
  modified_base (32)..(34): a, c, t, g, unknown or other
agtatacgtgcctcgcacgtagtttttgctannntatatatatatatataaaagctccggaattataggctatggtttcattatttatgttttatatttggatctcttttgattgttatatacggcttttgtgctatatgctattattattattagttgctttaggatacttttacatttgaatttctaatgctaataatatttgagagagaaaaaataatatgatactttgtgctttatctgaattgaaacattggaatgtaaatgcaagtgttgctcttagtatttgaacatgttatgttactcctcaaatattttttcaaaaagctacattgatttagatcaatactttaatgctgcttaagaagtgataatattatgtttcatcctcactgtctgaaagtaagcaatcttctatttgttccctgaaaataatatttagcagaatgcagtgtcaaattatttgataaatttagaatatatgtttattaacttctaaataaacaaaacattatgaaactacatatttatacattctaattctcaccttagaatactgagattgtcagatttgctatgcttggctttcgaaactaatggctgtggtaacagcatgtagaagttgtccactgatatgggatctttaggaagaatctgaaactgacaactcgagcagcattcaacacgaaagagatgagaatctttgtgggagtcttccacagatgttgagcttagaacctcagatttactcagagggctattgcagataggacagaatgattctgtagaaattgattcattaggcttaagattatatctcttctgacgccttcgagtggccaatggaacattagtgtcgatgatctcgggaatcctgttgaaatcaaatggagtaagctttcctgctgttctgacgattgtgctttgccgagaaggattttcctcctgaagaataaaatgttaacaacaaacactattgagaatcgctggttaagaactctttgaaagacactatacacacatttcatttgattttaaacccttttagatgaattattatgtgggctcaaacaagttacaatttgcttaagaaaaaaagaccattaatcttatgaacacttcattaaacaaaggaaaaaaaaactaatcttatgagctcatatgaaagatttggggtactattttttatagatcacatgatccatgaatggcagtgttgcaaacttagcaactatgtgcccaatcaaactattcgtttatcggtagtaataaactcacaatataaacatattgtggacaattaagttgtggaaatcattatgatataaacatgtgtcacaccaatttcaacaaatattttagcttaggtcagtcaaactaagaaagatcaaggccaaagaatacctgtaacaacttaacgaatgatgagaccaggctattgattccagcgcaaggacttttaatcagctcgatagtctttaggctgccctgccaagttgagaattggactaatcactgaatattaattcaatacgatttataaagtaatgtgaacggcaataaatacaaacccatcaaggtcacaaagcatgttaagctcttctgatagacaatctcgaagtggaagcactacagggacattccaccttgcatcaacatactgaatatctgctggtaaggaatatcccttcccctgtaataaaaaaagcaaaggataaaaagtcacatgtcatctaccattgactgaagaaattaacaaacattcaatttttgttaacttgaagcattgcatcgaaataatagtaacaactaaagaaataaaccttgactgtggctgaaagaacatgggaagctatccttgatgtacatgaacctagcacaagtctgttgtatccattttcagcagcaatctatagcagcacgaaacaaaatattgggatgaaatatttagttcttcagaaatagtattttttcattctcatcaatttttcttttctttaaccgtaccttttgtaaggacaacatcctaagatgaatcaaaagatcttctttaccagtggcatcagtaacaccatctaacaatctattcagttgatcctttccgtcagttgatgtggacgagaacagactttcaattgggaaaactagtaactctttagttggaggagctaagcttgacacaatctgtctgatatcttcgattccttcaataacttcataagaaggaacagaacaagcaacactttcatcaataaaagcaactcccacaccgaagactggcaacgatctatccctacttgcttcaaaattcagttgtgctttgtattgcaactcatgtacaaactgtaaagcaaccctgaaacaaaaatatcctcttcttaaaatatgtaaaggaaagaaatataaaaaaaggacctaaatcaatgtaaaaagtccttacaacagtaacattatttcactccatcaaaacactatgcctaagaaactgtcaacatgccagtcaccaataaacataaagaagtgatatacatgattgttttctattctgtttcattttttaatagcaaaatgaattgcaaagccaataagtagttaacaatacacctaacaataagtagtttacaagcatgaattgaaattacagctacctaaggttaacttagtcttagtgtaagatgaggtcccatcccctgatcaggtcttaaaaagacaattccatgatcagaattcaatctttccccatacttcttcagccccattttcaattcctaaaaaagatccttccatttctctccaaccaaaacaccccatagaacagccaaaattgctactgtccacatttggttggttctctcctaccccctttcagcttacacatcataaattgatatatgtttggagaatgcatagagttttacttaatacgtctattgaacactttttcactcaacatagcacttacaaaaacaaacaatcgacaatttcaagtgttgcccagaaatctatgaacaatatacaacaaaatccaaagataggatttttaacaaattttcatcctttcaacaatttctcataaattcaatgaataatataccgacctggaagaagtgccgccggagaaagcaacaagaaccttatcagtgggcgaaatcatggcattggaagtgacagccagccgaaacttcccatacagattgcttctaaagcagtcaccacagaacctgacgtcatcgccagagccagaggatgctgatgatatagggtggtttgccttgcacttgaggcagagaccatggtgattaccgtttgggattggattgggttggggtgatttagtcgaactggtcaaaggtgttggtgttggttggtgatcatcttcttcgtttttgtagcaggtagattggcagcccgtgtcagtagtgcacgccatttttggtgagttgggaaggtgtcttggaatggagtgtttggaggtgaagttggatgttagggcatcaacctatggagtcgactatggctataaaacgactagtcgttattctattttttttccttttaataaaatgttaaggtaaagatatatgtttccgttgattctttatctattttggaatataagagaatttttattttttatttttttttaatgatcatgctatagttatttaagattatttataaatttttagaaaattttaagtagtttacaatactaaaaacaagatgtacatattttgttatacgggcgactgttttttttatatgcataataagtaattatttaaatcttcttttcaccaattatgtagcattatgtagatttttataatctatatatatatatat

SEQ ID NO: 69547 - DNA, 7378 bp, Cannabis sativa
ataatatatttttctttttgaacaaatctgtatctataaatagttagtctcttatatctaaaatgttcacccatttactaaattattcattcacaactgaatcaaaaatcagtaaagaataattggtagctagtatacagaattgtaaagagagaatatatatataatatgtctgtattaccaaggtttgtggtcctgaaatctaaatcaaacaacaaatacttgagaaggataagtaaggaatatagcactgaaaaggaactgccacaaacgtttctgacttttcttggagatgaaattacgagtcctgtggtgaaatttgaattggagagagccaagaaaaatcctgaatgggtgcacatacgctgttgccataacaacaaatacttggctcccaatgcttcgtggtgggtgtttgcctcggctgaccacccagttgaaaaagaagatgatgaccaaaataccctcttcaaccttgtcaaaattcaaattgatggagaagaatgttacaaaattcagcacattgggttaaagtattttgctcaaatgttggtcacggacaacaatcacagttatggtctgtacatgtatcccaaagacatacctcatccatacgatgccttcaaactcttcgattgggattcgcttgtcatatttccgaaacacgtcgcctttagcgaccacaacaccaaaaaatatgtcacccctcgtgagctcaacacctacccatttcttcagttcgacgctgaagagattgccgatcagacggttgtaaacgagatctccgcctttggtgatggttttgttcgcataaagaacctttccaacaaaaaatactggaggggtgcctacggcgattggatctacaccgaccattttgagacagaggatgatgacttaggctatctcttttggccaatcaaactaggtaatgatgttgtagcactacaaaatatgggaagcaacaacttttgtgagaagtttagcgagggaaacgtcgcgtcttgtcttaaggccggggcgaaaagcgtaaccaatgacgcaaagctagtactttcagatagcatcatgttaaggagtatctatggcatcctttatcgcaaagaagacgcaagagtatacaatctcaataaagtattcatagatgagataaccgcggacaatgccgaggacgtagagaatactttaagccttaagttttcttacaagaaaacaagctctagtaatttcaccaacagcgtttctttcaagttaggtttgaaaccaacccttcatattgacgccattccactcatcgtcgacggaaaggttaaaatatcggctgacgttgcggggaatattgagtgggaaaaggcagacacagtggaaactttagccaaagctaccttcaccgcgaaagctcctcctaaaaccatgacaacattttctcttgtagccattcaaggaacatgtgaggttcctttctcttatattcagcgcgacactctgtacaacggtgataccgttattcagaggatggaagacgggatttataccggtgtcaacatgttcaacttcgccatcagtagcagccaggacaaagatccttcaaaatataaaagttagaacggtgaaacatatatgtataatgatattgctgtgtaagatcttgtctttgtccaataaataataatctcatgagatgattattatattactaatgctgtgtaattataactagattgggtctctacaatcaaagttctacatgcatggtttggtcagttaattaattttctttgtatagtttgctagatcctctatcttttatcttgtctcattcatgttttgaattttatttaataataacattattttgatttcaatttacttttaggacaatcaaggtaaaattgttttcttgggattactagatgcatgggattatttgtaacagaaatggaacaattgaagcatgaaatgaatgaattctcattaactccattgaagagcattacaatgcttatatacacgagaaaaacagaaagaaggttgttacataactaacttctaactgaatttggacagctcactacaacttactaactaactctaactaacatacactacaccttaacaatcttaacactcccccttaaggtggagtgtatatgttgcagaggttcattttgtctttcaaagcattgaacagtgcagggagaagtgctttagtgcagatgtctggaatttgttccttgcttgatgtgtgagcagttttaatgaccccttcttgcactttctatctaacaagatgacagtctatttcaatgtgcttggttctctcgtgaaatactagatttacaggaatttgttgtgcggccttgttgtcacaatggagtatttctggtctataatgttcaatgtttaattccttcagtaatgacaggaaccagacaacttcacatgttttatttgacattgctttacactgtgcctcagttgatgatctagagacagtgtgttgtttcttgcttttccatgacacaagagacttgcctaaaaacacaaaaaaaccagtacttgatcttttagtgtcgacacaagctgcccaatcaacatctgtgtaggcttctaatctgatttcaaaatttgcagggtaaaataagccttggcctggattgatttttacatattgaaagacactttgtgtagcatggagatgatttattcttggagaggttaggaactggctgagtttattgacagagtatgctaggtcaggtcttgttattatcaaatactgaagctttccaatcattcttccataaagtttaggattagccagttgttcttcaccatcttggcttaatttcaaattggtttccatggaggtactagcaggtttgcttcctaagtagccaaaatcctcaagaagctgcagtgcataaggcctttgtgaaagaaaaattcattgttcacttctagcaatctcaatttcaaggaagtatttcaggtaaccaaggtcatttaatttaaacttattgttcagactaacctttaattcattcatggattttaagtcattcccagcaagtataacatcatctacatacacaagtagaatcaaaatacttgtctcttactatctaatgaacaaattaagaatagtctgaagcagagtgttggaaaccttcttcaatgaggattgtggaaaatttttcgaactactgccttgaagcttgtttaaatccatataaggacttttgaagcttgcaaacaacattaggaggaagctcccccttaggactatacccttgaggtatagtcatatacacttcctcatgtaagtctccatacaaaaatgcattattgacttcatgttggtgaagaaaccattctttgatagctgccaaagcaagaattagtttaacagaaacaagtctagttacaggagcaaaattttttgagtaatcaatgccctcttgttgattgtaccctttggccacaagtctagctttgtgtctctcgcacaatgcttccatcatcattgtacttaattttgtatacccacatgcaaccaatatcatggtggtgagggggtaatgaaactataatccaagtatgattatcctccagtgctctaatctcagtggccatggccccatcctaaactaaaatatggctatgagcctgatgaaaaaatccaagctcaaaatgactagaaatagcaagggcacgaaattgtggagacaatctagtgtaatcaatgattttagaaataacatgatgagtgacagactgagatgattgactgtggatagtgttggtagacaagaaacaatgataatcttgaagataagaaggctttcgagattgtctaacaggtctgccagtaggtggaggatcaggatttgctgaatatcagcagtatgcacagtgtcatgatgctgttgtgtatcagcagtgtgtacaatgtcagggtgctcctgaacattagtagtatgcacaatgttaggtggtgtgagagggggttgagaatcagtggtaacactgatatgctgatttttatgatcatttgtagcagtagcagggaaaaactctaagatgtgtggtggcaacagttcagtacaaagggaaagatgtgttcatggaacacaacatctctacagcaaaagacatgataagtgttaagatcaaggagcttatatgccttcattccaacaggatatcctaggaaaacataggcagcagctctgggagaaaattttaatcttgcagcccctagagttgaaacattggcaagacatccaaaggctttaagatggctataatttggtaccttggaatgaagtatttcaaaaggagttttatgattcagattgagtgggggttctattgatgaggtaagtagcaatactcacacattctccccaatataccaaaggcatgggattggaataaaagagctctagcaacattcaacaagtgttgatgttttctttccacaacagaattttgttgtggtcttaggacataagaatgataatgaatgatccctagcttggaaaataggccaggaaattggagttcttttgcattgtcagacctaatccccttaacttgagcaccaaactgagttttaacaagttgtatgaaggctggtatgacagtttgtgcatcagatttattcttaattaagtgtatccaagtatacctagaaaaatcatcaactatggtgataaaatacttgaaaccgtcaatggtttgtgtgttatatggtccccaaatgtctatgtgaatcaaatcaaaataatgttttgaaatgttatgattggaaacaaaaggaaacttcttttgtttggcaaaatgacatatagagcaatcaaaattagcacaaggactatactgaaattgtaaacttttattcaatgaatgattttttacacaagaagcatgaccaagcctatagtgccacaaggtttcattccttttttcagagttaactacagaaaaaaaagatggcagagtttgatcatgcaggtaataaaggttgccaatcctttcacccatcccaatcactcaattcttggtaatgtcctgaataatacatttgtttggcaagaaaagaaaagaattattagatgaatcagatcgggcacacacagagagaagattgaattgaaagttaggaacataaagcacattatgcagaaatatgtcatggaaatgaactcttccaacaaaaacaactttggcattaacaccattaggcatgctaacagaattgattctagagtttttcaaaatagaaatgaacaaagaagaggtagaacagacatgatgtgtggcaccagtgtctatgatccaactatttttaggaatagaaaaggcattaccagaaatgctggaaacagtaggctgttgattatggtcattttagctttggtcagtttgagttgtcgatccagttggttgagatgtagatgcttgacactgagactggagtctttgtgtcatcatagccatgggcctttgacattgagaaatgagatcttgatcttcaaaagcaccttcaggctaattattcccagttgaaaaattggttgaagatctgttctactgatttctaggtttattaggaatttccttaggaaatctgccatgaaatcgatggcttggtggataaccatgaaccttgtaacatttagcaacagtgtggccaggaactccacagtgagtacaaacaggtctattacaattgttgctcctatttcccgggccattgcctaaaaatttccctgcaaattgacctgcattctcactagaagcattaggagttttagactgagatattatgatccctctttgtttctcttcttgaatcatagctgcataagctttgttaacatttggaagaggatcttgtaacaagatctaagaacaaacattgatatgggattcatttaaaccaattaaaaattcaagtactttgtcctcatcaagatatttttatataactttcatagcaccacaagtacgaacaggttgtggtctatattcttgtaataaattccaaagacatttaagcctagtatagtataatgtaacatcattcataccttgagttagtgtctgcatcgatctcttgacttcgaagatccttggtgcgtgcattcttttgatgaaattgcttttgtagttcaaactagatacatgttgcatcctccatgtacataatatactgtcagcaattgtgggagaggcagaatgtaaaatccataaaatcaccagaccattgcatcgactccacacatcataatcatcatcttcctcatcaggagctggtaattttccattgatgaacttaactttgtttctggccagaagagcaaccatcattgattgtctccatgagctataattctttgctcgcgtgagaatatttggcactagtgtagctgatggattgttagcattagaaagaaaatatggactatgaggattggtattaggaggtaatctttcttcttcatcgagagcagaaaatcgatttccatgatctgaagctccacgagtggtgcttcgagtttaagtacttcctccccttgccatggaagatcagagaacagagtgaagagaagaatcaaagagaagaaaggaaaaacgaagaacaatgagctcacgaatcgtgtggctctgataccataacaaaaatggaaaaactgaagcatgaaatgaatgaattctcattaactccattgaagagcattacagtgcttatatacacgagaaaaacagagaggaagctagaagagagaaggttgttacgtaactaacttcttacttaatttggacaactcactatggctcacttactatctaactaacatacactacacattaacaatcttaataatttgacaaatccacaaaaaaaattaaaaaaaatacagaaatacaattaattttttttaaaacaatttcataatttttatgattattttatgttctacttttgttaatttgttgttgattttttgttatatattattttttttttgttttaatgttagttttacactacaagaaaaattagaaataggagcgctcgtattactggcagagcatatccgcccctatttatgatgttattaccgacagataccaataaagttaaacattttttttaatttcaaataaaatgaacaataccgatggactttagttattaccgggggaatatcccgtcggtattgggtggtgtggatttgtgcgagaaaattgcttttttattttaaatacaattagcagtggatttttaccagcggatcccgctgctaataaaaaagcaatttgaccatgtaccctattactggcagaaaccactaatactggcggg

SEQ ID NO: 69548 - DNA, 4162 bp, Cannabis sativa
actacataaataatgtgagaaagttaaccgtgcctaaactaatatttctccacatgcagcctcattagcatcatgacaagaatatcacatagaataaacaagttgtgtggtggattgtgtgccatatgatataacaaattaaaatcatttcttcgtcttacactatatttgaaaaaacgtgaaaaactaaaatgttactaataaattctcaccaagactgcaatcttttttatcatggcagccggatttgagtttaatcctttcactagggccatgattagttgcttcagcatagagagtttcttatctttagaagcatctacaagaatgatatcagctttataaccttctcctctcaatgcatgaagctcatcaagagtaggaatatcatcaaaagtatccttaagccttttctcctgtatatcgttgcataacaataaaatcaacaaaattatattacatatctgctttcatgatttatagcttttaagcactagttcatctaacaaatttagaagatctaaactaaagaaaatctacatttagtgaattatttatgccaacataactaccagcaatcctcaccggaacaacagaatagaaaccatttggaattggttcagaaagcattccactgtgccatagaatttgagatgctttctgagatgataatacatcttgatcaaaatgtctaggtgattcagtattgctcaaggtctcttcctgggatcccaaagtagcagatccaaatttatcgatgaaatctgatggccaccatgaagcatttgaaggcctatgctcaactggccctgcgtcatctcgtgtctcctccatgtctttaaatatttggaatgcaaaaccatttcgcccccacttctcaccccataaaagatttctcaagcgaagattaattcttaggcaacgcaacaagacttgacaactttaatcctactgatttcttcaagctggaggccataggacctatacaagacaagttcacatcaaaacaaataaataaataaaaacagttaaaaatgaagccatcaaacatttctagactgaaagatactgtttaggatgaacaatataccagactattgcaagatcaataaagatatgctacaagcgcattacagcaataaaatgatattgaatatttaatataagaagaaaataaaatacaaaaataaaagtaaataaaaaagagcaattagctcttcgtatcaacaaatctaatggctcaatcttgatataatacatctcagtgaaatttgatagcctaacatgactacaataacactaaaacaaacctttaaccctttttttatcttacttatgtttagtaccctccctttcatggatctaattgaggacaattgtccttcattatagtcactcgttaaatttttatgacataatcaacttcacccatttatcatcaatcaattccacaaaaaataagcaacttatatcataaatctcaacaataatgttaagcataagaaaaaagtgggaattgatggtgtgcccattgttagtgaaagtacaaacttctttcctggtacaaaagcgatgtacacaaaaatacataactgttaaatactattgacacgttggtactattccgaaaatgttgaacatcattcattcaacatcacataaatgaccgatagatagacaagttggtactattccaaaaatgctcaacatcattcatttcaacatcacataaatggccgctagataaacaagttgtaataaaaatggctaactttcacttttcttcatgagagagaataaggtgacatttacttgtatattcatgagacagaacaaggatattatgtttcctaaaaattacaaacaatcagtctcgtacttagcttggcacaagttgtgcataactaatcttcattgctatttaatcatgcagtcattttgaagtttataagttctattttattatttgttatcaaacaattatccacatgttctatacttcagctatgtatgtaacccacatacttttttttttcttttaaccacacatttcatagttttccattggcacataatgcctaaaacacagtttaactgcttcttaatggcttaaagcttctacatttcattccaccctatcaattctagtacttcgtgtcatcaactaactgcatcttttgaaacataacaactctctgacaaaatatataagcaacagataaactaacagtgatcactttccagccccagaagtatctcgtttaactaaccaagtcccaaaaaagcacttgagataagcttaaatcctccaattcatgctgatgccaatgcagccaatgaaaaccagtacaatcacaattggaacgacttcccacaactaggtccaacaaatgtcccggattatcaatcacgcaagctcaaataacccaacataagaaatgaaacctaaattagagtgaattcccagatctctaaccataacccattattcctaatttaaaataatttaacgccgatgcctccataccgcaacacattacgattttgacaccgaatttctatgcaaatctacatcttagcttaattaatcaaaatgagaatcatatcaattaaaagtaaataaacaaaatcaaccatcatcacaatcacaacaataagtaatttcaccacggaagcaatcgctaatacagaaattgaaacaactaaattgaacaacacgattaccgccagcagatccaggcattagaaatccaatctggttttgcacacaatagcatttgaatctcatttggtccgcatccgaagcatcatccaaacaccaaaacccctaacattacgagcaaatcctaatacatataacacaatacgatatatacgtctgtgtgaaatgtatcgaagaatgaggaaaggaaagacttgatgaaacaatataagaagaaaacctacataaattatatttatatgagagagaaagagaagagtgatggaaacgaggaagagagaggcaaagagggagggaaggagggagagggatttgatttttttaggttgtttggattgatataattgatcgacgaggaaagcgatggcctagagagagagagagagatgaggagtgaggtggtaagtcacgtgcagagcgagggggagagggatctggggacctccccccgacagccagctggcaaggggtggctcaccaacatccacacaccttcatacgcgtgaaacactaccaccaccagccctttttttctctcttttctttaatgtccctccaactaaataaactaatgctcataacactaatctagtaaggtaaattcttttagaataaaaatgtgcattcaaattcaaattcatgttcttgctgttatgtagtgtgtgatatgaattaatgacctcaaatcacaaccacataaatattgtgctaccaagaataattttttctttttttttagtacactaccaagaataattagactcgtaatgctatagaacctaattttgaaggttcacaacaactaaaatcaaagagtatgtttgtgtcccgccaagaaaagatgttaggggcatcaccaatgaccaattagtgtcaggtacctttaaacgtagctcgtcaaatgtgtgctaaataatggttgggtggataagagttaattgtttgtgagataattatggcaccattcttacttataaacaacagtattaacttattttttaaaaaaattatatttatataattagctcaaaattaattacgaagtccacttaacaacataagtcgttgccaccattaaaagtggccttataaatacatgatagtatgatacaatttccaaaaaatatatatataggcagccggattttgtgcccatatgtggaaaacacggattgcaatttgttgtacggcaggtaggtcccacggtacctttaaatattttttaatttttttaatttaggtggtaaccggttgttgtaggtgtgttaaccggttgtgagtttgtttttttaattaaaaaatagtaaggtacgaaaaaggtacaatcatattactgtaggtattagttatagtacgaaaaggtacaacatacttcattgttcctggcaattaatggtacaaaaatattgtaggcagtgggtccatgttgtcggattgagg

SEQ ID NO: 69549 - DNA, 2085 bp, Cannabis sativa
taacttttgtaaaacagatggtccaaaatggtatttaccctttaatataacagtttttaaggagtatcgctagccaatcgtaaaacgacatgtcgagaatatattaagcactactgggatctaataacaatgctcttttttaattaattatgacaccgaaaagaatactaaatgtagcaattttcttaattagtatcctttgtatttatttattattagaaaaatgaaacacagatccataaaccatagtaactcattctcttatgttgtttgttttcccagaaaattttctcagccattgttttgaatgtaatggaggaagagaagaagaatgagtgtgtgataattgagattccagaagatcttaaaaactggtcagattgcgttatctacagagttcccagaaagctccgcaaggtaaatgaatcatctttcactcctcaactactttcaattggaccttttcaccatggcagagttgagcttaaaggaatggaaccccacaaggaaaaataccttgaagatttctgtaaacgcactgacaagaccaaacaagatctgggcaacttcgtttcacatcattcaactgaaatcttagcttcttatgcaggtactgttgagctcactcaccaagtgttcgatcaaatgattcttagagactcttgctttatattagagttgttatgccttttttctgataagggttgtcagtatcatgatcaagatgattacttgttgaaaaccccttggcttaggaatgttgtacagttggatttggttatttttgagaatcagattcctttctcttttttaaacaagttttatgcctttgccaaacctagacatgagcacacagttggaagtttacgacttaagagctattgttgtcctgactcagaagaatgttattgtattaactcttgtattcatttcatcaaaggggttttatcatttaagtcttgttgttgtgtgtgctctaagaaaagtcctgaagatcatatcagtagtagtagtaggagtagtagtagcagtgatgatagtacattgttggacattgcctataatttcttcataaatttctcttctgtgcatgtgaagggaaaaaacgatgggataaaagaaattaaacattttactgatttggtaaggcagttttggctttccaaggagttcagaagagaagaaaggcgcggttgtcccttccgagaacatgaaaagtacctctacagcgcgacaaagctgaacaaagccggggttaaatttgctccctcggcgaacaaacaagctaagtttgtcgagtttaatactatagagaaaccattgtttaacttcataccatttttgcattctctgaaagttgagcttcctacattcgagatacaaggcaacacagagacccttatgcgaaatgtcatcgctttggagcaatgtgtctatccagacaaggcttacatctgcaactatgttgctttgatgagtcaacttgttgacactgctgaggacattgagtttctggttgagaagaggatcattaagaacatgcttggcagtaacaaggaggtggctgagttagttaacaaacttacctataaaatcaccgaatcgaatttcgtttatgctaataaatgcaggcagcttaacaggttctatgagactaggtttaacattgtgagggcaacactcaaaagggtctactttaatgatctttggacaggaagttccactgtgcttggaatttgtattatcatgttttcagtctcttcaactattaagactctgtttttctcaaaggactagtttagtagtaggatggtaatattaacctgtagattaatttgttactcttgttttttaacaatgaaaaatgaggaaataatatatgtcttctctaactattattttagctacacacctaaacctcttgtatatataggttattacatcttatagtttacatcatatattaatatatgtagagttgtcaataatttaggaaattctcttttcctcagtttttattcttgctccctctcccatccctttttattggggctcatatagctaataagaaatatatcaattata

SEQ ID NO: 69550 - DNA, 3642 bp, Cannabis sativa
ataagaaatatttttttagtgtaaattttggtgttatgttggagttgaaataatttttggcactaaatttaatgatagtgtaacactaaatttagtgtatacgtaagatgctcttatgacaaaaaacttttttttttctcttttcttttcttaatatggaataaagatgcacctgtacattataattaatatactatactttttcttcttcatttgtttttgtcagaaaaattagttttctgattttttttttttaacaattaagaaggttaactactttttcttcatttgtactgtttgtagaaataaatgctttttaaagtaaaggaaatactttaacgaggagggtacatactatagcctctcgtttattaccacgtatattaggcctttaattaactggttaatatattattaagtgtaatattagtaggatagcataatattttgcaggctcaaatgttgctggtggtgactccaacagccgtataatattagatgataaaactaatctaatctattattagtattagccttatcaagtattccaatatggcaataacagagatctcaacccactcaactacccttctaaaaaataaaaaaataaaaaggatagagattctttctcattaattagtacagtacttttataagatttttttcccatttaagcctactctatccattgatacagtgctcagaatttctggctatatccataagaaatgatacatgtaatatatgatatgaaggtaacttaataatgaattccaccactttttagtgtaatgttcctatcttcctatgtatacatatttttttaatgaaaaataaaattttgttaacctttaaaatttgttaccaaacataataataaattggtcagaacaaagttcataccgaaatgacaaccagagaataatataaaaactcttgcaaaattataagctactatattagctgatcgtttaataaaaaacatattaacattttgcaactcaagaaggagttgtttacaatcgttaatgacttgtccaaacaaagatagcatacacactgaacttcaaaaaacttaccgttaaataatcagtttcaatgatcactctttgccaattatgctccacaatctagctcatgaatacttcacgaactccaattgcctcaactagttcaggagtggcaaccctgaccctgaaaaaaagtcagcacaaccttccactaagaaactatgatacgatctcttgcaactagcccaacaccatataattgtttccaccttcaaacaaagcagtgtccacattaattatgatattgtttttgcttggagaagactattgcttagtaccatcacccgactgtaaatcagaccataatgtcttaataagagatctttgagcacgtgttcattgatcaagataatttttagcttacactactatacaatccaccccaacatctttttgaccaaactaactcatttcgaccgctccaaattgcccagtaaagaaccgacagtaagagcttaccacccatgtatgtactagaaaaaaccgatatacactagtcttaaaaagagtggtcctttactagtaaagccatatcaattccacacatgtttgacaattggataggtaactaaagcatgtaagattgtctcctcttccaacttatagacagagcaaagagagctaacattaactcttttacattgaagctgatacaaagtaggaagatagttttgtcctacacaccacacaaaatttttgaccttgggaggaagctttaaatgccaaaaggaagactagaacttagaataagcttcttcattcgaatcccatctgccatgaaaggtttgaagtagcttataggcacttttcactaaatacaaatgtaatatctcagaaatttattatgaatatatggggcatattttatgaaatatggattactaaaggtataatgggtaggattgtaatcttacaaattatctaattatgtgagaattaagaaattttatcattaatgaataaagataagcgtaatttattaattatagagactttattggaatatgcaggtaacatgcatgttatttatgagataagatatttttaggaattaaaattatggagactcgatcggcggccaaaaatatcacagtagtattaattatagtattagtgaaactaggaagttaagttgattttgagtttaccagagtatatcgggggtatttggttatgaccaaaatatccctaggttggaagttacttaagagttaagtaagagggcatttttgtcatttgttaaaaataattaacattttttccttttgttttattgggttagaagttgagttagaaagtagtggacttattaaagataagttataattagaaatactaggttagaaactaagtgtaatcaaaagatcaactcagtcatccttactctttttctaagctcgcccaagaagaaaaaagaagaagccaaaactaaacacttaagaactgacctaaattctcaactgctcttttggaatttaactagggtttgatttaattagttatgaagacttaacgtaaggttctaatgcttcttcttctccttagtttatgaaataataataggtttgattgggaattatgatgttttgattattataaatttggataagattttgattgatttcctaggtcaaaattagagttgttttaaagtttctaagcggcaactgctttttcttgggtgaagttaagcttggtcttcaatgacaagttttgaattgtgatttgattttggtttctataaattaggttatggtatattgatgatattggactaatcatatttcctaggtcaactatgttctgatcatattttggaaaaagtcaaaatataaaagttttagatctctttttaagctttccaacgcatcttgaattagctcatttagagtttgtatgagaaagttatgcccattttactgagagaggtcgaagtaaaaaaaaaaaaatagatctagtagtcgcggcgagggattatagaaagccccttttttcacttttctacagccgccacagtgagaatattgaccgccacggtgccgacttcatacaggtcaataataactttgtcttttctctttttgggcttaaaaactctattttaataaaaggggattgcaaattttagaggggagacagaatggaaccctaaaaatacaagaagaaggctctttgagcgagcatgggcgatccgcgataatcctccatctagtttctttctcttctcttgatttcttatgtttttatttatgtttagtttaattatgtatttaattatgagataaattctctatttagggatttgatggatattgactaagattattccatagattgctgctatttgattgttctttctttctctatcatgatgatttattcatatttgtacttattacatgtgtttgattgtccaccttatgcatgatctatgatctcaatacaaaatctaaaaagtgagtactgagaatgctctaaatgaatagacataggttttgatgtaaaacgagaatattcacataatttatgtggcttttagattattgcttaatgtaaattgtatgttgttcta

SEQ ID NO: 69551 - DNA, 4767 bp, Cannabis sativa
  modified_base (1777)..(1779): a, c, t, g, unknown or other
tgatgatcttgacgagtttctcaccgagagtcaaggatactagggtctagtatgtagcatgacctggatttcgaaaaaaaatggtggcaatgactcaaaaggaaatataaaagggatagagagggcatgcagtgagaaatgaggaatttagaatttctttttcgctggacttgcttctctacaaaaatggcaaaagtgacaaaagaaatgagaaaatggccacttataagttacctcacaatcaccgtgtgatcattactaatgattaaccaactgtgatcgactctcaagatagttgaaaagatagctttaattacctgtagagtttttcttggaaaaatacaatgaccataaaaagcttgttcaatatgcacaaaaggacggcttaggccctacaatgtcgattttgaagaaatttgcgatcttcgccgttccagtggtcactaaaggggtgtgagataaccgtagccatatatggtccatatgatgttgattataatatatatcgttgccatagagttcttatggcgttggttattatcaaattctatatacttttttgttattttgaaagctaattaattattgtatagtataatataatctaattagttatgaaattttaaaatgaatgttaactaagatttaaaaaaaaagtataaaacagtaactaatcactatattagtaactaaataattttgtttatggaaataacgaaaaaaaatatatgcttcatacaccttgaaatgttcacattgaaaactagatcacaatgatatttttttaggctcatccgagtaacgatgtgatcagaaattatttttaaagtttgagggaagaaagggaaataagaaaaagagaaaggatataaatgagggtattgaaacatatccaagcaaataaaaatataaatattattgatagttatcgaattatttttgataataagataaaaaataaggtgtgtaaaatgccctaaattttgagcaccttcaacctaaaataaaatagggcaaaaaaaatgaaaatatgtactatagtagtgtttctgaaaataaactatttttgctaaggaaaaatccttgacatatttggcactttaagggctcgtttggtacgccatattatattatattgtgttaatattatttaatacaatactatgtgttgatattgacttgtattaatagtttgtgtaaagttataatatattttcaataaacttgacctaaacaccgactagaggtctggtttgggtcccaggtcctgggttcgggtctgaattcggttttggatcctagtcccagtctgggtcccaggtctcggtctcgggtatgggtgtccaggtccggtttcgagtttgggtctcaggtccgggtccgaatccaatttcggttccaagtcccagtttgggtctcggtcccgggtcataaaggtccgggtttgagttccaggttttgagttcaagtttaggtcctgggtccgtgttgggtctgggtccgggtccgagtttaagtctgggtcccagtttcaggtgcgggtccgggtccaggtctgggtctagatcctggcctgggtcttggtttcgagtccagattgaagattgtggttgactccggatcctttgtaaatattataatacaaactacatagggactatctgatatgtattaaataataaaacttacattgtattaaaaaaaatcgtcgtaagaattaatacaatacaatgctttattcaaacatagtgttatatattatttaatacaatactannnttatacggcctaccaaacaagccctaataattttgattttaattttatatgacgattcatattatattatgcatcttactagttttttgtaaaaattcaaatcattgatgttactactaggggcatttattggaccacatctaatgtttttatgcctattagatctgattcaattatatattcgatgataaattttaccatccaattcaatcaaattaattttgatcatctaatcgatccaacattcattgtatgttggattagatcggttctatccattagatatatttcgtatatatttattagtttaatttaggtttatctaatatttcagacctaattttttagattggatcagatccatcaaatattttagatctagtatgtattggattggattagatctatccaatccaagaaaaaaagagtaatattttaatgttagtttttataaatacatatagaatttacttaaaataatataaaatctaattactcattcaaactaaatgaaaatactaattaatttgattgtatgttggatgtattggatgtttggacaccctatctacaatctgatccgatctaattgactatttaaaaataatatccaattcaattcgatcataattagatatctaatatatgacagtcgagtataattatattagtcgattttcattagattggatcgattcatgtacacccttttaccacattttaataaaactatgtatcaacagttattagacttataactatcaaaagaatgcacccatagtcccttttcatggtactactacactacttccaacgaattttccaatagtatatgcttctatataccaagaacaattgaaaataaagcttaccatcaacataaaacaaaaggataaatgctctagcatattcgatttcattgccttaactggattggtcctttcctcaatggcatttcggtaattatgattaaacatagtgatttgtcatttcaaatagttgttttgcaaaacagtccctctttatttcgagccttttctcgagccctctctttctctctctgtttttcttcttctgaaatgctgacccgtcctctgtgccactgcaagagaaaagagtactagtagagtagtaataatagtatcatcatcatctttatggactctgtaatactaaaacccacgttcgattctttcagtttcaactcttccactcctaagaccaaacccctcaacacaagacattgttctttcttcagattcactcacaaggtcagaacctcaacctcgtttatctctgtctcttacagaccatcctcaactccttcaaattacttcacatacgactatctcttgaagccactgagtaccatcttcgtcccaatacttcaaagcataaaaacctcacttttcgctcgaactcaaagatgggcttcgtctacacaagctttccgtgattcgttgaaggttgtagacgataacggcgtcaagtacttgcagagcaatgggcttgggatagctctgttgagtgttactacgaatgccaaggttaagattagtcccgttgtggcccaattggctgctaacccaactttcgtttcgggattgtttgcttggttctttgctcaatcgactaaggttttgctgaacttttttgtcgaaaagaaatgggatttgaagatttttttcgcttcgggcgggatgccctcgtctcattcggccctgtgcacggctctctcgacctcggtggctctctgtcatggcgtagcagattcgttatttccggtttgcttagggttcagtctgattgttatgtacgacgccattggagttcgtcgacatgctggtatgcaagccgaggtaggaatttttgtgttgttatatactgcgtttgtttttgtactgttacattgtatagcagcattttatgtttttgatattgaaacatgtagtgttgtccccactttttctgacaagaaaacatatgaaatgtgggaaattttccaaaccaagagtttcatttatgaagatatcaagtaggtattaatgttaggcttagttaacgttaggggtaggtgagattcgtgagagtccttttcatataatgaaagtagtacttaaaaatttgttatattggaataccaaattgagctttttatgtgataattagttggattggaattaattcttctaagtgtctgaaatttaatcaattcatatttggtagattaaagttccataagatctcgtatgatgctattgctaggaataggagttcaaagtactggttagaattttcaagttttcagagtttggagtcattcctttttgtatgcaaaattccctaatctttattttggcttattttttcaactataattatagttcctgaagatggcagtgtttgcacatgacatatattcacgtatttccaagacatgtaacttacattgaatgagtatgaatctttacattcttgaaattcttcttctactgttcatgaactgaactttggataaagtgactaaagttatattatatatatataaatatcttgtcaatttgcaaactctttgcatatgttagttttatccccctctttcattcttacacttacaatctatctatgaatgtattcaggtacttaacatgattgtagaggatttgtttcaagggcatcccatcagccaaagaaagctaaaagagcttcttggccatactctatctcaggtccttgccggagccgtgctcgggattgtggttgcctgtgtttgttgtcggggcagcatggttgcagcgtagtgccacttttctagccagaaaattttgccagaatcatcgatcgatgatcacacactcaccatgctataaaatgtacttgctaatgctatattatgctctaatgaagaaattggtcagctgaaaatgaagataggcaactgttttgtcatagtcaaattcaagagccaatcaagctatctcaaatcaa

SEQ ID NO: 69552 - DNA, 3116 bp, Cannabis sativa
atgtggcccaatgaacaccccttgtgaaggtgaaaaatgaaaagccatgtcttataccaagttagacagcaagcaaaggctgccaatgcttcctcccacgactgcatctccaagatgtctactaaggccatctacaatgcacacaacgacttgtgttgcctgctatggcccattttttgtttttctactgacagatatagcaattgcattggagatgccctaactcctcatcatgaagtagaagagactcaaatgaattcaacggcttgcaagagcctcattcatttgcatcaataccagtggccattaaacaaaaaagaaaataatgattgtgatgtgcataagaaaaatgtcatagacaacaggagcgaaatgagtatgcaggcaggggtaggacaagggaggaaaaaagaaaaataaaaatagacgaagagtgaaccactattctattggctgcattattttgaagaaaaaaaataggttttctgttccattttatgtaactatcaatatcttctcagcttagaagaaccacaggttaataatgccaagtcatagaatgtaaactacatgaatgaataaataggcaaatcagcaacccagagaaggttctctcaccgatgattgggttcttcttattgtttgtcacggaaagcatttcattctctgcaaaatgacagacacgggattaaacaatgttatcatggaatggcatgttttcagcctacaaaattatgtaaatgaaaatatgataaaatacctgtctctcaatttcaacagtagatgcagctaacctcctcttcaaaattgatttatccagttcacaactttccatctgcttatctgataacaaaataaatataaaacccacgagtagtacaatttgcaaattagacgcctattatgtagataaactatagaaaagaagttcacaacagttgaacctcggttatataaattccatacgacccttctcaagacttttcattaacctgtgatagaaatgtcctattttcaaatattacgtatctaatttctaagtaacagcagtaaaatacagcaaagaaagaaaattctcaccataatagtatgacgacagaattgtaatccgctctgttggctgcaaaaagtagaagaacattcaaggctaaggatacaatcacagaagatatatatctgtacataaatacatttgcatctatacatatcaatgtacaatccgtgatcctaacattgtctgagagatccaaacaaaaactagaacaaaagagaagaaaacactcaatccaaatatggttatatatctcatctgcataaaacagtttaattatatggtcatttaaaacaggatggtctagtaaaacatacataacaataaaactaaaatgggaaatgacaaatattgaactaaacaataatagaaagaccctgcatcaggatactaattaaacacgtgttataaaatcaacatcagggtgaaagaggacgagtaatctacaacataccaactcccacttaatcaaaagaaatgattaaacagaccgaaatcttggtcctggtagtttagtgttacaaaaatgagaaaactttctcatacagcaacacatacaaatacatgttaggaaggatccttgtaggaatggcaaagattgtgtcaacatgaaagcatgtagctttcaaaatcctctataacttacaaattcttcaacaaacatgagacgaatggttatttttatctatattacaaggataaaataagcacgtggagacttttatcactcaacctgatagtttggacaagaattactaatgcaaatcccataaatcacatgaaatacttgcagaacaagcaaccaaaactataataattttgaagagattgataattctggtacaacattctcaatcaaaagaaaaaaaaataccgactctaaaagttagtatccaactagatcatacaatataagcttaaaaaaataccatcacaaagatcccttcacgacgagtagggagttgctcaagctttttcagtgtttcgtcacctttagtaactttgccaaatattgcatactgcagaagatcacatcagatttctgataagtcagtatgtcacatgcaattctgatcaatggtgtctagctggtacaataatttgtatacctcgccatcaagatgaggagcatctcctagaagtattgaaaatgaagatccaccactattaggatcagcatgtctattcaaaagaaaagacaaaaagaactagagttagttcaccagttgaagaacagagttgtagatacctacataagttcaaactgaagtgtatgtacaaacagatagaagcttaaagaatatggagaatttccagtcaaatattttaaggacttctatggtgcacttttttgtatttttggcacctagatgattataattcaaatatgtttatatgatagagtatattattttattttggacctcttgcaaattttcgaattttgacattgtatattattcaaaatttacaagtgtctaaaataactgagactgttgtataaaaaaaattgcaattataactactcatatattgaaagcaggattgagatgcaccagtgcaccccttttggtggtgcacaatttaaagatttatatatataaatatagaattttatatcttacctatatatataattgcctatctaacctttttttgttgtgcatttaacttctgttatgtttttaacagaatatacttataaaattgttaactttaacggaatcaattattattaaaggtaacatcagaacagtcatatcattcacttttttataaaaaacttaaaattacatccattagctttgaatagacacctcactagaacgtaccgtatgatctacacaactattcactaaaaataagtgatagttaaaaacaaaataaaatcacctttgtatattacatttggcaattgatatattttttctaattgagccgtttgcccatggaagaaggagaaaataattttgtggcgccatcgttgcgactctagcgggagacgattggccagatcttccacgaccagtcggagaagttttagagagatcttggcatcagcggc

SEQ ID NO: 69553 - DNA, 1416 bp, Cannabis sativa
aaacaagagtttaatacatagttgttagtagctgacatgtccagcccttaccaacttcccaaataggaaggaactcaactgaaattaaacgattttccaactgatttggctatcaaagctggtttagtttagagtgaattatttaccacaataactcaaaaccaataatggagatagattaatttcaaaattcaggtatcaaaaatatgaaaaattgtatcgacacacctatttttaggggtgcatattggaccgtgcttagggcccactcattttgggagcgcaaaataaaaaaaaaaatattacgcttttattaaagtaaaattaagtgtattataaacaacaaatagtcatagtttagtcggttgagatgtatgatatattaatgtatgatatatagtgtatttttttaactttttctttaatttttctttaagatatatttttcaaaaaaagccatattcttgcacaaaaattataaaatcccataaaatttataattttatacttaaatttgtgtatgtacatatgaactttgtttccatatcactcagattaatctcaaataacaaagttcaagaatagtattgtttcgcttataatttgatataatatgagttatttaagatttataatttccattgctatagtttatttttgattaaccaaaagagaatcatgtggtgtaaattttttttctactttttagtaactttgacgattttagggaccacgtactaattataaagaccttataatactttactttaattgagttatcgataaaagttttatgtagtataatatacactattgttaaaaaaagaatcaaaataaattattgacaattattcggtcaatctaacattgaatgaacaacacaactttggaccctatatatcaaatatgtaattgataggataatgctaatttaattttcaatgtattaatatttttttcttttcaccaccatatagtaagtacagggccggccctgggcataggcggactaggcctatgcctagggcccacctagtccaggggtccaaaaataaaatttttccttttaaaattacacaattttttttgctgattttgaaaaataatatattttttttctaaataagggcccaaaaataatttttcgcttatggcctgcgtaagtatatatgaacactataagaaatataaatatcaatgagcacaaatttcgtcattgaattttattttgtcagtgatgattattattagtagtgatattttgtcattaaagaatcatcacttaaacgtaatttcaatatattattaattaatacaaaaaaattaccactatatatagtaaagaaggatattatatacttctaaaaaaattcattttgtttgttccatataattaataattgcttttggagtagc

SEQ ID NO: 69554 - DNA, 3200 bp, Cannabis sativa
ataaaaataaagcattatcacaatgatgtttactaataccttaataacaatgtccatcgctcatgtgagtgtgatttgtggggtttacacttagcagctcctaagtatattttgataattacttaaataaagactatgttaagtgtaattaaattattattaataataataaatattaactctttgcttagaaatcataaaaaagtcatctcatattaagggaagaacaaaaggccaagaaacagagtcacaaaagtcagattatcattcatcaaggcacaaattagtaacaacaatcaaccaattttagtgatggatatgacagtaatcttattgtgcaatctccatatatgcatggagtaaaaaaaaaaccttaaaaagcactagacttcttatgcttgaacttcatggcaaagactatataaaccaacaaattcaaaaagctaagagctgccaaaagccagaagaaataatcaagatgaccttcattcaaattctctggtatccaaccaactttcccaccctttgttgaaaagtaagttaccaaactaatgataaaagagctcaaatagtaacccaatgaaagggttaatagcaataatgcactgcatagactcctcatagtgcttggtgactcttcataaaagaactctatttgcccaattgaagtgaatacctgtgaagttccccccaaaacatattgaggtatttgccataagatacttattggtacaaccactttttggtgaactaaaccaacttctcttgcaacataaagtctgtacatttccacaaccgcggccgctgacatgcttagagcagaaatgaagaggccgatcccaattcgttgcagctctgtgacgcctttttcgttgcctgtaaatcttcgaacaaaggggactattactctgtcatagattggaacaatgaagagaataacaattatgccacatgttgcaagagcagctggaggaatggttaaagagccaatagttgagttcatcaccatgccttgttccaacattgttgtggaaatttgagcagcattaatagagaaggctattccagtagctaaaattggtaataaatggatcaaagtcttcaattcttcaacttgatttacagaacaaagtctccatggattgaaggggtttccactagtactaatctcatcatcagcagcagaaaacacagctgccttatcaagaaacctgttgtgtcaagtagtgtttgttagacttagtgggaattggaatgtcaaactcaatctatgtttggtaaattaaatgggatttaatgaccaacaaatctgtatttctaagtgagtttcactttttaagtttaatttatggtaatgctaaccttctctaacatttaagttttatattctcaatctaaacgcccattaactttactccctcgaaatctaactcacataacaaatacctcattagtaatgagtgtgttcgggttgtggtaacgaaatggatggaaataattaatttttatttcaaaacttcatttggttgcatttaaagtattaaaatgttattttaatggaatgaattttctattattttagtggaatgactataattttctactatttaaaaatgagaagaaaaaccattgtaatgcaagatgaaaaataatagtttttcttgagtgtgtgattgaaatctatcaaaaaaatgtacccttattttaggctaaatgagaattgtaatactcacttgagtgtgttagtgtgtttaagtttattgcagcctccttccatggaagaatttctttcttgtgtttcatcaaaaagatttgtgctttctttaggcacctcaagattccattttcgacacgacgcaaccaaaacttggcacattcttgtaattggacttccctttggcttttgaattctataatagggtgttccaaaaaggaaacaagcaatggcaatgcccataaaaagtgcaggaataccaaatcctagtccccaaccaacattattttgaatccatgcaagaaaagtacttgctatgaaaataccaatacatattgtaaagtaaaaccaaatgaacaaagatctcttctttgatctttcttttggatcagtgtcatcaaattgatccccaccaaatggtgacacacatggtttgataccaccagttcctaaagcaaccaaataaagtccacattcaaatatagcaaattggatagcattggctggaattgatgctgagaaagtcaaggaacataatccctgcaaaaacaaagttaaaatattggtcaagtttaacataccacactcacttctctttttctatgaaaaatgaaagcaagaatatgagaactttatactatgaagtagatggtggagaaagcaagaatggtccaatattttcccaagtaagcatctgcaacaatggctccaataagtggtgtgaggcaggtagtcccttgccaaaccgaaacagctttcgcagcagccacatttccttgatgcaattctttagtaaaataagtaacaagattactagaaataccaaagaaggacagcccttcacaacattcagcacctgtgttatgtaattacatatagtcaacaacattaatcaattcatcattatttaatacaaaataaaagtacctataatgaaccaacatgctctccaatttccactattttgcttcactgctggctttccttttgcatcaacagacccatcaccagtgtaaacctcactcacttcattctaataataacaataattaaattattaacaacaacatttttcttacttaattacttactagtaagaaaattaagagagactgagtaaaagagtgtactggaagttgaagaaggggattttgcaagagtgaggcttgatcatccaaattatccatttttactctactcttccttccttctacagctaatgactatttatgtactattgtctctagaattagaatgctctggtggtggtttctaagccctttctctcaccattaattattctttctgtataaggtttgatcaagatataactatagtactttcttttacataaaaattgaccagtactgtagtaacctttgtttgctcatgaagtttttattatacattagctcttaagattgctcttacttattaacataaatatatgggtgcactcttagtgggtattatccatgaatgggta

SEQ ID NO: 69555 - DNA, 4625 bp, Cannabis sativa
  modified_base (795)..(796): a, c, t, g, unknown or other
gggctatagccccacattaatacacttgggtccgtccctgattgtagctgtctttttgttgttttttagctgtcttagttgtttttttttttattttactgaaatatgctattttgtaattttgaaactttaagataatatttttgaaaacttaatacagtataaatgtaaaaaaaaaaaatatgacaataaaaatataaaaataacaaaaaaaaataatatttttgtaagaattcagttctttttcaatttttctaggcaaaagtagtttggtctattggtaggattaggttatgaaaattgcaccctatacttttttttttaatccatttcatttttacttttcttttctatatatttaatttataagttgttttatttgttatatcccgattatactcttatgtaatgaaaaaaaaataaaaaattctcacctccttgaacagtacccttatgtgagagggtataatcaataatggacttataaaagagtacatttcaattgaatttaaaataagactatttttggttaaatgatgaaaaaaaaaaagtatatttcaacttaccccgattatacgttcgaatcaagatgtgggactaccatttaaaaggatctactcaaattcgctatctttagtcttagttttagagggccagataatatatctaaacgaattgggggttatcttttctgttattagtttaattatctagttttcctgagatatcaataccaactttaatgttgaggctaagcattcctttaaataagcaatgaatttttttttttttttnnttttttttttttgaataaaaggaactccctattttaatttttgttacttttgttaattttttttaaatatattaaattacacgtgtaataatagaagacctttagttaggatgtgtcaatcaaagaggtaaggattaaggaatacaagggaaacatataacctagtccgagtgtgacgccattaacgaatctcaaacaacttttcatctctgatttccatttctttgcatacactaagtcagataatggaagtcgacggaagagaaagctcggcagtaccatactcggttactgattcagtaaatacaagtttggtccacttacaagatgttcaaacccactttctccatttcttgtccctctcagacccagatgtcctcgcccaaatgccacctcttcaacgtgcacactcactcctcttgcttgccaaagccaccacaacccttttcgcatgtaaaattataaacttttatttgattcacgttatcattcatcattatatatcgtttaattcattatgtttattttccagtgaagttgagatgtaatggagttgacccagatgaccatcctgtcaaatccgagcttgtacgtttattttttagttctgtgattctttttgtgtctaattttgtatgaactttgtgaattgaggttttgtaaaattaggtgggggtttgttttggtatttgctaaatttaatggattttggtgcaggagagattgagtttgtatcaaaacaaactagaacgattcatagacttgaacaaaggtaaatactttcatttcatgttattttaaatccaaagagcaatggaaatttgttctgctctgcaacattaattaagatttgagagtttgaactgttctgttctgttctgtttgcattcatttttttctatattatatattattgagagagtttgaatttggttcttgaagcacctattcgaccttccaccaccttaaactttcaggcagcaactcgtttcattgagcattctttgcctgatcttacctcaggttagtaatataatatagttttctactaagttcttgataaggctatatatagtcacatctgacatagtgattcatattgtaattgattttgaagattggaacacttttgttttgtacagaacagaagagaagtatgagatatattagtaaaggtgaaggaaaaaagataatttttgtagagaaaaatgttcaaaagaagagaaagtatgaatcaacagagaagaagtctgttaaaactgctgctaaggagtttttagaaaaagcagccattgagcttctgggcgacagtaaagaccgcgtcttgggacctctaccgatcaaggctgaagaagaagagactaaagattaattttttcttggggtaaagttttgacttacttttcctttcatcttttatatgaatttttatttggtgttatgatattacagaaacttcattgctcacaagacatttccaaaataccaaaaaaattgatcagttttgttgctaccaaatacatcattggtttattattctttgattggaacatcaaatgggatttttatacttgattttcggtcgtgtcttgtgtgtgagtcctgccacttgtttgaacaaatacacctctcttgtttgtagtatttgctcctgttttctgcagaagaacttagaatttctcatgttttggcgaggaaaagactcgaaagatgtagaaagtaattgacattttgcaaggcctttcatttgggtaaaaggtttaagccatttttgagatttcatgtccatgtcaatgtataaacttctgaagctgtttttcttttgttaactgagtaatattttgggatagagcaagacataaggttaggtagccatttgagtcatcaacaagaaagaatttgactggcattgtttctgtgaaatattttgtgtttagttcaagcaatgtgatttagaaactgttgttttgttcttctcactacaaaaatctgagtctctaccaacaacagatctacctaggggtaaggacttggctaagaagtgaagaccaaaaagaatttgtttcaaaaaggaaaatgaatatagtaattatgcttatttttagcttctattacacaacaacaacaacaacaaatgccatagaaattgggtgaagcagttgtaataaggttagctttcaataaaagagaaagcaaaagaaaaaacaaagccaacaaacaacttttaattaactaagcaaagcaaagtagagcagtctgagcgaagtaaagtagagcttaacatttctccacacttatttacataatagaaacaacaacatactaagctaatgtagtaaaattaagggtttgtaaaaaaaatactgattttgtgtaaaagtttacaattttactgttacatggaattttttacaaaaatgttgtctttttataaaataatcgtaaatcaacaaaataaaacaatagtggaacaactaaaaaaacaactgtgaaaacttaatactgtctttacacaatatttttgaaaaaaatttgcctcacaataaaaaaaattaaaaattttaatatgtagtgtaaaaattcctaaaattaacgactattaaattttatttgctataaaaaaacaacaaatttataatcaacaacaaacaaacaaacttcatcttttttcttgggaaaaagtttgtctcctcaaaagttatgatgggattaggttctatgaagggagaaaaaggaacacttcattgatggcaaagtttatttgggctgcctcaagtaaacaagacattttatgggttaactggatcagttcgatctatttaaagtgaaaagatctatggcaggctcccttaaaattggacgtcagctggtacttcttaaaattcatgaaacttacagataaaattgataaagaggatgtttatgctgctgtttagaagggtaagtttaaagccagaattttctatacttctctaattgctgctaataaaatagattatgcaaataatatttggcacagaatgtgtgttcccaaacaccatttcattgattggcaagcgctgaacaaccaactcttgactcgaaacaacttgtccaaaatcattgtgctcccctcgagcaactgtcccgtgtgtgatgctgaacccgaaacacaccaacaccttttctttgactgtgatttcaccaaaaaaaagttgttgctgagatcagaaagtggttcaacaaatttgtgtggcctgccactttggaggaatggagttgccggtgcaacaagaatcaaggacagttgatttactatgtacgatgtgccttgatttactatgtgtgatgtaaccgtaatcaatgcatctttgaattagcttgctattctgtcaagttggttaatttatctattaaactagtcattaaaactataaccagaatgctaaatccttgtaactttaaaaataaaaataaggacaaaagcagtttgtaatatgtaacttgtagttctggttgtttaggggttgtcttattttgttccgctgctttttatttgtattttggattgttaattttaatgaattcttccatctttcgaaaaaaaaaaaaaaacagaaaaataataaaatgtaatcatttaattatcttaattaataatttggattgcacattttaagatgtcaacactactccaaaagccagaacaataataaaatgaataaaataaataataaaaataattaaaaaaaaaacaaaaattatttcaaaacaatgccaacactactccaaaagccagaacaacaagaagaccacttcttcttccgaagctggaagtggcggcgctggt

SEQ ID NO: 69556 - DNA, 793 bp, Cannabis sativa
ctctctctctctctctcactttttgttacattatttcttcatatatgtttatgatataatatatggtggtacatacccaataccagcttttgcaaaagctttatcatgagtagtgtactatagctttagcgctattctctttcaccagatgaggttcaggaaactctcaagtgatctatgatctgtgatcctgaaaagaattttttagaagtggggttcctaaactttgcatatatatatatataatatatacataacattattagggtcgatacatccttattttattattgatcggggccctctgcttttgccttttttatgtttagtttaaacaattaaaataacagtgggacataggggaaagctggtacgctgttattttcagctagccacaaactaatgtttcattattaattcaaccctacttattccttattgttaattaagctaattaactaaaatactaaatataagagtcaaagagaatatatcaattttagtcatgtactcgagtgtgtgtgatcaattaattcatttagtagtaggggctgttcaaaatgttcctcaactcacacataaactgcccacaccaccgtacttaatatattagagtacaaagagaatatatcaattttgtcacgcggttttttaaaaaaaaaaaaataaataaattatgaacttcacagtctgatccagtttttaaggtttaaaatttctttaatatggtttcaattacagtactgcaccgtatccttcttcaactttgtaatatctaaattttagtttgaga

SEQ ID NO: 69557 - DNA, 5464 bp, Cannabis sativa
aaaaatactatataaattggtcaaacttaaaagtgcatatttaacgtaagaactttcaaaattctatagtatgtatatttttttctatatagaaagataaattaccaaatctataatcattaaaaatattaataaaaatgataaattggatttataatattttttttttgaatgaaaatggatgctttcattaaacggtaaaatcagtcattataagattctaaaaggcagaatgagtattgctctcaaaaaaaagataaaagttgcgagctaaacaatgtgctatctatatttatagatcttgaaataaaacaaatttgaaaattatgaaaagaagataagaaataagatttgtaatattcataaaaaaaaattgcaattactaattaataaaccaaaagaaaaggccatttggagagaactttgaaaactaccaccaaactatcagattaatagaccaaactaattagtagattggctttgcaatatttttgtttgttaattatgaaaatatatctactaatgtgtgtagcgtatttgggcataccgagccctttatagggacgtgggctttcataggcccatttgttagcccgcgagacagtgaaaaataaaggattttgacaccgaaattgaaaataccaaaacatctaacttctcactcatatagtcgtcttcctcctccgagttagggttttgttcgctgttggaaaattaaatctttcgctatcctcaattggttagggtttcctttttctttatttctatatttattttccggtaagatttcttttaggattttcctttatttttattttttatattttttaggaaaaattaggatttttgaaacttctgttattgaaaacctgattatgtggttcgtagttcctcaatttgtgattttcatacatatatatatgtatttgtattgtttcgtttcgcaggttttattataattattgcttcgtctatgtgaaagaaaaatgtattcttcaagagggagtaatgcgtacggtcaacaatcttatgctgggcaacctgcctatggccaaaacgtaaattgtcttttctctatgttagttttacaatctacaattctttccatatgggtatcaattaacctcattagaaaattagaaaaaaaccctcgagtgatggtttcagaggtggtaggtatactggtattgtttttgttgttgttgtttcgttgtaaaaaacaactctactttatcttctcgctgtttaatcccattgcaattgctattaattttttaaaattcaagagcacatagctatgttagttttgctttgattgtttttttgtttgttccattttttttttctatagtttcaccccatttttgcttatgttatagctgggctctgcttattccggaagtactgttggaggtccggacgggggctctcaactttccatatcttctcgtcatacctccatgttagcttcttcccaagaagccgacgctactgcatatagagctcatccttcagcaacggctcattacgggggacaatatggttctttgtatagctcgactgctttgactggtgtatctcaggtaggataaaaatatatgttaagatactttttagtattatctactgcgatatcttcgctaattactttcttctctatcagtttttatagcgtagttgcgaaatgttctttcgacgtggttttcatggtttattttaagaatatatgcttatcacaaaattatcctttttgttactgatgcataggaatgaattgtcttatttaaacaaatgcgaacttgtttaaacaattttattctaatctagatatagtatgcacacggagtgttttaattaatgataaccgggtcatatatatatatataagaaaatttttaggtaggggaattactttgcccttatcggaaggacattttttgttttcggtacatagaaaacctatatttttttttttcgtacaagagtaaattatagttatagtagcattttctctgtttaaggtgtcgaaaatgtgattcaaatattaaggtgcaagcgtgcctattttattttacgtgcaattaactgttttaaactttattttggatgccataaattattcaaaaattttcaaaattgtgtaggatactgactgtaacatggtgtacacatatatgatttctttttttgaatataatctctctaggtgcctaaaacagaaaatgtaggggcaaaattgaggccccacttgaaaagctagctccttgtgtatatatatatttttctgaattatctggtgcattgtagtacttgatgcacatgttaatgctgtacgctatttgagcaggttccatcaataactaccaaagcgggaacatctactttggaaagtcgtggggcttatacctcagctgttccagattcaccgaaattctcctctggtgactatgtctcctcttcaacccatgggtatgctcataaagggggtcaactatatggggaaaaggttcctgattatcctgttatagacagaagacaatatggggaaagacaaagttcatatatgggaagggacttgcaaaatgaatcaactggaagatatgctgattctgtcagtttcgcacatcaggtactgtattcacatcactttttagctatattttctgatttttactcttctcatattctcattcctttttggttattattttttttttcttttcatcgatttttgcttcttgccagattttaaatatttaatatttctatattttttctgctatatattgtgacagagtgagatttatgatcggattgatcaggcagttctgcttcggcaagaacaattattgaagtcacaatcattgcaatctgcttctcttgatgggaatgccaggtactctttttctctaatcttatgcgtttgactgcaaattagttgtttcttgacagaaacgtttgattaatctgagttaggttttcatcttaaatgaacatcccatttcgttattccctttccttggggaagttggccttttttttactggtgatagtctttggacagttagctatgttagatggtaatgtttttcttatagaactgagtagcaacacatttctggcagagaaactgactatcttgcagcaagagctgctgctagtcgtcatcccacccaagatctcatcacttatggaggaagagttgatgctgattctcgcaatatatcgttacttggtgcttcatcctacaacacacaacatgccccttcaatattaggggcagccccacggagaaatgctgatgaccttgtgtatgcacaaagctcttcaaatcctggttatggagtgagcctccctcctggtagggattacgccatggggaaagggctacatgcttcatcacttgagacagattatcctagtagtgtattgcctcgcagtggtcacgcaaggattgatgagctaaaggatgatagggctagttaccttcgagagtttgagctaagggaggaggaacgtcgtcgggagcgtttacgagatagagaaagagacagagaaagggagaaggaacgtgaccgagatcgagatcgagaacgggaacgagaacgagaaaaagaaagagatcgtgaaagggagcgcattttggaacgccgagaaaaggagagagagcgagagcgcaaacgtgcacttgaagtaaggcgtgatcgaagtctaccaagagtttctcgggatcgtcgaggcgcgtctttgttaaaggaggggagaccattgcgacgagagtcccctcaacgcgaagctttgcataggtggatctttttgttttattttgcgtcgactggttctgttatagctgcttgtgtatcttgcagcctttttcactaactgttggtgttctgttatcctgaaggcgtcgttcccctgttaaagagaaaaggagagagtatgtctgcaaggtaaaaagcataagttagccattaaaatgataatgagaatgctaaactgttcaaactgttgcaatctgcttttcacctcccttggggatcagcgtttgagctcttcattctggttgacttaaatttcctcaacctcagttacttttattagttcattgtgctggaaccatttttcattttatgtcctcttcctgtgggggcctggcttctcactgcaatgtttcctaatacattctccctgcaaggtgtctttctgtattcttgttgcaatgtttcttaccattctcaatttattgtcaattcttgctgcattctctcttaccacaatcttgctgctgtgtttctgtccacattctctctttctgtattcatgttgccatgcttattaccacgttctcagcattgtttctttctatattctcagtccagcatttcccaccacattctttccgcattattttttccgacattcctcctgggtttctttatctgttgtgcttgcctttggctccagcattttctttgtatcttcttgtgtcttacaatgcattttctttctttctctctctgtctctctcctttttaaacttcaattttttcttttatctccaacttgttatgctggtgtaagtatgtggaaattgattttttctgtactgctgctagcctctggtatatggattttttggggtatggagaatattttgaatgtaagcattttatttctttagctggtggtgggtggaaattggaacacggttacattcaggcaaatggaatacagatgaaagaaatattgagaatggaactctttgttgtatgcgtttactcttttttcttccttgagactaagatgtttatgaatgttattggcacatattttggtaaccaaattctcttctgcaggtttatacttccagtttggttgacgaggagagggactatctgtgcatagataagcgatatcccaggcttttcatatcccctgagttttccaaggtccatctttaatgttttatatccatttagattctggtgacagtattccaggcttttcatatcccctgaattttccaaggtccatcttttgattttgatatccatttatattctggtgacaatatcccaggcttttcatatcccctgagttttccaaggtccatctttagtgtcttatgtccatgtagattctggtgacaatctctaactattttttttatcaggcaattgtatattggccaaaggagaatcttcaactttctatccatactcccatcaggtacttgtgaaagttttccttctcttatttatttatttttttgtttttcatttattttgatgagggatgaggattgatgctaatgattttattttgaaattatttagttcgtctacttttttaattaatttgattataaaatttatgagaactctgagcagttgtggaacttttcatcaccccatacgagggggaatcctcagattttaggaaaataggctgtgtagcattt

SEQ ID NO: 69558 - DNA, 2319 bp, Cannabis sativa
acatgccagatgaaagtgtgggcaatcagactccaaatcaccgagacagggtgctgaggttgactaagagcttgtctccaaatgttgtaacccttgttgagcaagagctgaacaccaatacagctcccttttattctcgctttgtggagacatttaactattacatggctgttttcgagtctcttgatgtgactctgccaagggagcacaaggagcggatcaatgttgagcagcattgtctggcacgagacattgttaatgtgatagcatgtgacgggcctgaaagagtagaacgccatgagatgcttgggaagtggaggtcccgattcactatggcagggtttagaccttatccgttaagccccttggtaaattctactataaaggcgctgctacagaattacagtgagaagttcacacttgaagaaagggatggagctttatatcttggctggatggacaaagctatgatctcttcatgtgcatggaggtgaaaaactgattgtgatttagggttgtttctaagtctttaggtaaatttttgaggtagagctttactagtaacatgtattctgatatcagttgtactttcttttttccttacctccccccttttgtccaacatctttgtaatgtagttagagttggtgttaaaacttaaaagtatagaactagcctcaagtaatgttaagactttttctactaatactagttgaactaagaaatgaaacttgtacttttctgttatttttgtttttgctgggaacttgtacttttctgtcattgaatgaaatacgaaatctatatttctactactagcaccagttagggctgaatacaaaatgtattagttaatgcaaggaatcatatacaagcaagtaaatttcatgtaaaaattatgacaaaacatggaagtacagcactgggattccacactattgcattcccggacctattgtatcccttttcattcccagttgaattgcacacagtactctcgtcatcattggagatgctttcgtttcctgcaatgattctgcaaactatcactgctctttctgtgttcttcatcactttctccctgaactcatcactacttgaactcaaatgaattccattatttgttgtgtaatctatgtgaaaattcgattgaagtattctgcaaactctgcaattgggattcttgcaaagctctgaaactcgcttcgacctttccctgcgacaagacattgtcgtgccatagaatcggagttgctcatttccatctacaatgtttctgggattctttgtgcatctatggtccgcaatcatcttcaccttgtctctgtacttctcaaaactgtcaagtgtttgtgtagagttctttacctttagaatgctttttatccgggttgttgactttgagtgatccaaggatgctttttggaatattatctccacaattttccttgatggatctccaatctccaactctgagagtaaaatagaaacagaaacaaaaacataaacaaaagagaagaacaaaaaaatgtatgtgcttgagtacaccattctcagtgtcagacgaagaagaagtagaaaacattaaagcgaagaagactaaccatagagacgtgtttgggagtagtttttccggtaaataagttcgcgaataggatgaactaactgagaatctggaaccaagttcttgtttaatggtgtgaagctatgtttgttgctacatttttcagagctacaaagcacatcagtatgcttcccacactttacattctccttcaagtacaaccacataccatgcatctctctcccactctttctgtgctagtagctctaaaaacttggctggtgatatctctatctcatcgttcaaatctctttcgtacaaattgcaatgctacaaagccaaaccatgtattttgtcaaaactgtcaccccatttatagtgtggtctacttgtgtcgtttgtgttggagcgactagcgacatttttaattttatatatcacatctacgggtactactaattattattaggggattttttttcttttttttttttagactttcaaacagttttttttttttatttacatttttatgaagaatccacatagcatccaacggaacaatttaaattgcaattaaaattcacataacaactcatatagaaactaccagaataactaaaatcgtaaatttgaaaaaataaaaaaaataaaaaatagtatatggagtaattctcatttccccatagtagacttacctcatatattattttttaattcttttaataattggcaacatgttcaaattgagactg

SEQ ID NO: 69559 - DNA, 2758 bp, Cannabis sativa
atatatatatattatttatgttcttttttaattatcaaaaatataaagaacctaatagttaaaaaaaaaaaacacccttaatatttgtagttgtaatagtacatggaattctaaaaagacaaatggattaaatggtggatgtacatgttggttggatgaatcaacttgcaatatattaatgatatgatcaaatttttgatagtgatggcagtgtggtagtccaaatatctatgcccattagggccaatagcaggcaaaattttaacaagtagggttagattaattcataaaactggtctggtaagacattaaatacgggctgttatatatatcgatcgatatatagttgtataaatcaagataagatgatgatgatgatgataatgagttctacacgcccaatttcataaacccaatatatttgaccaaacagatattttgggtatatgttttcactatgtagccgccacaatagaattgcttatatatagatatttaggtagcctgggtttgtaatactaatgtgtacattggtatctggttagacttgtttttatcacatggaagtttattgaactattaaggctttataattctgaaaaaaaaaaaattaacaaagacttttttgattaatttgctgggtcaaggatggatacacatggcagttgtggtatgtgtaaaaagttttatgtaccataaataatattccatgtgttctttcaacaggatatattattatatattttattagttaggctatttaagctttgatgtgaatggcacgtgtaatttgaaataaaataataattttaaattcaagaatatatgttttattgaaaattataaactaaaaaataatattaatcattgttaaaaaattaatattaaatcaaaataatgtctttaaaaaaaagcaattaattataatataaaagcagttgcatatatataaaacatttatactaaaaaagtaattaaattaagaaaaaaaggaaatacattcttgactttttctttctgaaaaaaacattcttaaaatatatatatgtatccttttcaaaatatatatatataatatattgggcaatttataatattatatatatgttggtataaattattacaccaatacaagaacagaattcagaaacagaaaaacaataagacaatgagaattaagcacacactaaaattaagaatataattaagggaagaagaagagagctggaaattgatcagcaatgcagtctttagcaatgactgccttctttattgatattcaatgtatattacaatccaagacaagcatagtttaacacttgttacatttcatctcacttgagaatagttgcagaaagaattatagagaaaaaagaaatgaattagaatttgttattttttaactaatttgatacaaagctagagacaaagtaaagaaagagtaactaacttttaacaaacttaactaacaaccataactacttatttaacaaactcttcaatatcccccctcaagctcaaaggagggtactccagtgagagcttgtgccatagctaggaaattgaacttagaagagttaagggctttgtaagaatgccagctggttgttcttcggtcggtatgtagacaactgttattttgttctgagaaactaagtcaggaacatagtgaacatcaacttcgttgtgtttagttcgtgagtgaaaaatagggttagaggcaagttgttgggcacctgattatcacaccaaatgacaggagtggtaggaggtaatgccaagttcgtgtaaaatagaggagatccatactacttcagtggcagtaaaagacaaggatcggtattcagattctgtgctagaacgagcaacaaccgtttgcttttttgacccccacacgtgataagagttgagccaagcataacatagtaactagtgttagactttcgatcatccaaattacatgcccaatcggcatcagagaagccttccaaagtgagaagcttggttggtttcaagactaatccaagattgatagtgcctttaatgtatcgcaaaacccatttgcaagcaagccaacgtgcatttgttgggttttgcatatattgactgagtttgtttatggcatagctgagatcttaacgtgagatattgtagtgacccgatggtgcttctatacagtgtgggatcagaaaaaagatcattgtccatggtagagagcttggccatgtgtcattagagtggtgcaagtcttagcatcttccatttttgtttttcttaggatgtcttttgcatattgagcttgattaagatagagggttgactggtctcgaatggcttgaaatcccaagaagaaacttactaatcccatagcttttaaggcaaactgggagttgagaagagataagatgattgacagcagctgtgtcttcacccgtaattagcatatcatcgacatatattagaattaccagtagtttctcatttttgttggagaaaaatagagaattataagatacagaatttattaatccccaagacaccatagcagatttcagtttttcataccaggctctaggggtctgctttaggccatacaaggttttttgtaacttgcagacatgtgtagggtattgaggattcacaaagccctttggttgctgcatatagattgtctcattaagctccccattaagttcctaggcttcatcgttagccagagggggattgaggcaaacccagaaaaaatccaagctctcct

SEQ ID NO: 69560 - DNA, 3819 bp, Cannabis sativa
tctaagtatgatctctggaacttcagtaacaattccctgtaaacatgtcccccaaaaaaaaggatttaaataacaccctaatgcaaagttgataaatgtacaaagtcaaacaaaaagcataattacacataaaataataatataaaaaattaatgataaaaaggatgccatcacagaatcaaaacatgatatcgaaagatcataacacattgaatggaaccttcaaattaacattctttaccatatctgattaaaaaaattaaatacctgaatttctgcttctctagcttcattagttatcaaagattcaagctgaaacaatcaaaaaggaagtcagctactatgttatataaaatcctccgtggcagaatagaatccatttgcaagaaaaacaggttcatctttgcaccaggacccaagaatattgaaatgcaatgggtaaggccagaatgttacaaaagatcataacctttctcacagaaacgaaaataaaaattgaaagttgtggcaaattagaaaacacaatcccacatttcagaagaaaaacaagaaaaaaaatttcttatgtccaaagaccaacataaacattggcttgaatgtgaagcaaactaaacaaccttagataagtaatgggaccataaaataaaaaatagatggggacaaaaaagcatgcagaaccttttgtgaaacaatctggtatttatccaacgcgtccctcgtactaagtgaagggtctgataagctacttccaagacgctcaccagcagcaggtgaaggcaatggctgcgaagaagttccagattcctggtaataaatttaaagcttgaagtttaattttcagaaccataaacaagctcattttcaacatcaatatgtgagcatccaaccttagcagcatcagtgtactccactgaatgtaactcaggcagagaagaaacagtagcaaatgaaccaacgacaggatcactttcagaactatgttgggtaacagcttcagccacaccaacatgcaatgaggaagcactgaaaatcccaaaaaggtaagcaattaataagttgaaaaagaaacaaattctgctgaaataagaacagagtcaatcctcagtacagcctcctgatcttgtttcgcgcacaaagtctagtttgttcaaaaaaaaaattgaagatggtgaatattacaaacctaagatgcagagctgaattagtagaatcaatagcctcgtccactggacgggagacagcgtcaaaacccaagcttccagatgcagaagaatatgctggactaagttgtgttgaagctgtaccataagcaccagctagaccagcatttgcagttgaagcagaggcaccagcaggcacagcatgcgaactctgactagattgattttgcaaaggaagccggacaaagtcctaaaaacaataacagaatacaagatctgagtacattaaaaacaatttcctattaaaaggaatgcactaagtacaccaatcgacaagcactaacctcatatactctctgttgagaaagcgacaaatgaccaggtttaggacgaagagactctggcacaacacccattgatccttgagtgtacacgttagcatcaaaaaagttggcgccaacaccgtctctatggttcctcctcaatgaaagttgttgatttatttctccatcaatgctttgtatggcctacacatgcaggcacaatcagcataaagactacaaagccaccagtgggtgacattcaagttataaataaagagttatatgcttcttcataaatcaccaattactcagccaaaatatatatatatatataatagagagacacaaatggatgtttttggtcataggcatagcttgatgctatcacctcctctttaggtcctgagttcggatcccctcccccaatatcaaaaaaaaaacacaaaaaagcataggcttttaatttaaagtgaagttcagatactgcttcaactcagtgcaatggtaataagttggtttcaatgtagagcagcaggcacctacacatgagaaatgacaatgacaagatttgggatggattttatagttgaatgataaagatgctcatctatgatcaccagcttcacaagtgaatctctaatgtccagaaaataatgatcaccagcatctatcagcatcatttgtacacaaacgtaaggagctaaactgtcctcacattctcttcaacttattaaaataaatcttctgttgagtttttttttctttttttgtcaaatcatttttctttaagcaagagctgagcaaaatgttcccaaaggcaaatcgtcctatagtatcacatattggaacagaaaattgtctttagatatcttatatgatattacctaaatttattttatttccaatgtaatagcaataatagttccctaaggtggtgtttagttggaggtaatgaattggattagaatggaaaacgaaacaatttttattccattcctttgtttagttgaattttaaagtattggaatatcatttcaatggaatgactttcccatcattttggtggaataactattccatttcgaagtggaaggaaagaccattctaatgcaagatgagaaaaaatttaataatttttttatgaattttttatgcgatttaaatatgattcccttcaattcctattcccactcctattcctattcctattcccactcctattcctatgttttcattccttccaaccaaacgccacctaaatgtccaaatggcacatgaatcttcatcaaaagtaaacaatttgatactcggctctaaactctaaactcatgcaaacaaattaatatatttgtttagcaaaacaaaccttatcggttgcagcctgctcaatgactgcacagccaagatccaaattgtcattggtaacaatttgaactgcttgttccagaagttcactagcaagattcaaaccctgaagtgaattcctcagttgactcagtatagaagttcgcaagggttcctgcccatcaaacaacaaacatattactaaacacacgattaaggaagaagaagttgggaagaacaaacaaagaaagaacttcttggttaaaaaaatatacaaaaagaaacaagtatgtcccccacctagaaacaataaacattgaattggggtaaaaaaaaccaaatatctaaaaagaaacaagtattttccaaaatgcacaataagattaaaaaaaaccttgcacgtcacatgcgctagacttcctgccagacttgcaaccatcaagtgtgctgcattgaatatacgtgtttcatccgattccatggcataatcctacaaatgcaatcaattaattatagtgaaatataaaacgtggaaatcagaaggctacctaactgagaaacatatctaagatgatgtagctccattattatacagaagatggcattaggctaagcatctctagaaccgtcagacgtgagagaaaactcatttgaacaatgtttgccacaaactaaaaaaaacatagaataagccagtaaacaaagatgaaaccattcaacattgaaggtaccaaactacagaacaagtctgggctgtacccatttcttaattaatcatgtatgtcatcatataaagaagaatgaaccaacctttaaaacaagttccttagttgtctgggtagctatagaaacactacgttgaacaatactaggcactatctctttaatagctctatccattgcgatcggaacaactctacaaaatacaagagagattagtgttaacaacacccaagcagtttttacaccaaaaaagaaaaagaggggggggg

SEQ ID NO: 69561 - DNA, 5360 bp, Cannabis sativa
atatatatatctgtgtgtgtatatgtgtgtgagtgatgaacaatagtaaattagttctcttgtcttggaacactatacccacaaccatttacatcttcagtagttaaattgttgctgatgtaatgttaagaaaataaaaagtatgaaaatattgaaatttgatacaaaaagaaaagccaacaagatacggttttaattttacctctgacagatcaacccactcccatgtctcattattagaacccatatcataaactaaagcatgccttccctgacaaattcaaaaaaataaaacacaatagacatcaaatgcatatcttttctacttactgttgtccaagaaaatgccataacaaaaagtacctcggcagcattaaagtcagttataacagcttcataaaagttgttatcatcaggccaccttgttctcactttcttccctattaatgaatctattgccgccccttcagcatgttcacttgcaatgttaccagaagcaactctattaacaacttgaccccttccagtcggaccagaagaagggtattgcttcattgatgaaccaccaggcaatccctgatacaaaaaaaaaaagcatttttaagaaaactgtcataacacaaaattttccaaaataagaccatggttacgcccaacatcaatatcataaaaatcttaagactcacaggtttctgtttctttcccttggctcctggaacagatcctcgttttgcagtggatgaagatggttggtgggatccagctgcctgtgggtgaaatgatggagatggccccccaaaggattgggaggctactgactgagagacttttggcttcttgcgagatgcagagactgtggggctaggtattggatcatgagctgcttgacttgtactgggcataccagcttgagctccacctgcctgtctccactccctaatggaaacacaccataccaaatattaagataagatgtatcaaaaaaatatatatattaagatacgaagagggaaaaaaaacataataaatagtcctagtttctcatttaaacaaaaagaacttttctgaagtctttcagaccttattctctttatgatgtcatctgcattaactcgtcctaaaagctctctgtgttcctcattagataatctcaactcttttcttagctcagttattaaactttctttttcctgaagaaaatacatttcatgtagcagtcatttaaacctgataagaaaaacataaatattagatccatgacaacaaaatgacaaaatgtacccaagtaatgagatcagcttgagctttaaaggctcttagaaccgaactgtatgcttcttgctcaagctggtgaatctgagcctccatgtcagtttcaccatacatcctagagtatggaagagagcccatagcagatcttccattccctgcaacacgacctgctctagggattctgttttgatgtgatggaggaagatcatcatcagttcctgtaaaatttgtttgccaaaaataattaaataaatcatcaatagtgtgatgaggacgaaaatttaagaaaattaacaacagctcagagaatataaaaattaagagaatttaagaaagttaacaacggaacctacattgcagcatatgtattaggagacagttaagccaaataaagccttacaacaaacaaaagctcttttggaaagaaaaaaaaaaaccaccccttcctcctagctctcatgtgaaaataaaaaaaaaaatagcaatgaaatgccaaataattaagccaaatatacatgtaaagaaaaatttaattttcaagcacttttgaactttatcgaaatttaaaatgaataactacagtcctacttctgactaaatcatcaaaacattctccctatcatcaaaaaaatcccagttcacttatgtttacatattacaaaacaaaacagcttgaaacaaaagcataactaagataactagctgccctgccaatacactgacttattcacaaacttccttctttaaaagaaaaacaacatacttacatacatgtaatgtgagagtgtcaatattaacttacacactacgatgtgcatttcatctcaagtggttctcacttaaaaatactcacagtgaagaataaatatacatcatagtgtaattagaatgtgtcaattgagagtgtattaatcattatacttatgtgaataaaagaaaaataaataagccctctgaatacattaaagttcctctctagtattcaaaaacatatgaaacaaaagaaaagcacctgaatcccaagtcactccaaaagatacaccttgggaaactacaaatatataatggatttctattttctagagaggacttcttagcaacgttatagtttatacatgtacatattttcatatgcaactataacacgatctttgtttcttatccaaaaaaaaaagaataaggaaaatagataaaaaatattcatgtccaaagattatcatcttcccagtaaaacatcacgcttataacgaagtattctgaatttttcactctagtagttttaattgaaatagtaagcttctgtacccatcatagatttttgcgaagtaattagtaaatggaatttactttagcagaagagaaaatatgaaaatctaaccaagggaaaaagatgagcaaattcacaaatattcttatttttgtttgatacttatatgtcctccaaacaatgcaataaacgttttattcagtttatgccttatgtttctcctagaaacacttcaattctcttctgttcaaatccaaagtaggagaagataaattcttttcaacttcttttactacttcttatacttgcctcttaaaatctaagttccacacagtcaagcacaccataaaagaggaaaaaaattaggacttttccatccaaatggcatgatggtttctaactaatcagagaattttactttcttttctttaagtttcctgccatagaaaaagggttcttcaatagattcaatgtctttgataaaagtataaatttatcgcttttcgtttactttacagaaagttgaagaacattttgaagaaaaaataagggtaccagtatggccaaaagaaacaagagtgtaaattggccgagttgctgatattccataaaggaaattcaggctttgaattttttagaggttttgtttagattcaaccaaaaaactcaatgtcatcattaaattctgaatcatataaaaactaatactttctctcttcggcgccaatcacagaatcaaagaagggaaaagcaaaacaaaaccttaaccctaattcaacttaagggaaagaaaaaaaagagtaccaaactgaaaagacgcaaatcaacaatcgaaagagtgaactcaccactgctatcgtagggctcgtagtccatagccagctcgaactgtatagaagaactaaacagtggttgaagtaaaaaccctagtttggggaggcaaatcgaactgctcagagagtgttgaactccaattatgtgggcgagaaaatcccaagagaagattgaaacgacgtcgtatgtggagacaactttgtcgtttaacagtgagaaccaattagagagaaagaaaatatcaaacggagtagcgtgtgagtggcggtcggagggagacgatcactgctggatattcacactgtattggggcaaattctttattttttttttcttttttcaaaataataataataatatcagagaaataaataaataaataataatttaattaaagcagggtatttttttttttagataaaattacaatttattgagttataatacaaaaggcacaattggaggaggtaattcctcccaccatatacaattagaattcaccgagagggcatatttggctaacagatgagccgcattattaacagatttataaatgtgtgagatctgagccccaggaaaattggacactaaaagagaaatattatttaacagacaatgaaaatccgaagtatgtctttgagatgcttgcactcctttaaccactaataaagaatcagtttctatatagtagactggtatttgaaggactttgagccattgcaagctgtaaatcaaagccatagcttccataatttctggtttaaaacgtccttgaaaaggcatagccatgacagctacgatgtctcctgtgttgttgcgaaggacagccccgaaaccagatttattttccattgtgctaactgctgcatcagtgtttaacttcagccggcctgagggaggattcatccaaggagaatctgcagaaacagaagctgcagaagtagtagcattagctggtttaggccgagcagcttggtattcttccaaataatctattgcaaaatacaaagcaatttcaggtggctttgtttttgaaccatgtctttctttgttgctctcattccaaatggtccaaaggatggtagcaaactgctcgatttctttggaagaccatatggaagatatattctgcattagatccataagagatatattatgagacatgaattcatttattggaaaggaggaaagttgctagactttttgtggtctcttgcaaaaaaatagagcatgagtgatggactcattgccacggtgacataaagagcaggttgctgaatcacttatatgtctggtatgaaggattccagcaactgggagacactcgtgcattgcacgccatagaaaaatcttgatttttgaaggtaatgacaaagaccagaactttttccaccaaatgagagatttgtttgaactgacagtaggttgttgttcttcaagtttggtagccaatgtggatactgatttattgacatctgaaaccaggaacaattgctcaagaagagtatgattccattgtctattactggtaatcaaatcagaaactctcatcaaagtgtctgagtccttatacatcaaaggcttgaaagaggttatgtcaggtagccatggacctgaagcacataagatatgatttccattacctactttccatcgcaaacctttgcatagtaattctttcccccaaagaatacttctccacgtgagagatgggtaagagcccaattcagcttccaaaaaggcgttaaagttaaagtatcgggccttgagtatcttgtgaacgagagatgaaggattggagaagatcaaccatgcttgtttggccaataatgcttggttataatgaacaaaactcctaaatcccatgcctccttcaactttttcttgacaaagagcattccaagttttccaattaatcccagaagatgaggaattggatccccaccaaaatttattcatcattacttcaatttggtggattagagac

SEQ ID NO: 69562 - DNA, 1783 bp, Cannabis sativa
ataactggcagaacatcatcagtactcatgaaagaaattcctatgtttaactttatatagtaaaattgataaaacttgcccttatcacctgatactgtaccgatactctgagtgggtagtataaccctctacattttgcactcaaactttaagggttcatataagtacaattttcactctttgatatgccccgttggaacacagctcagaaattatagacaagtagcagcataaacaaaatagagaaccatagaaggagtatctgactttatattgcagcaaatagaagattacagtgaaagaccgtgggcattcaagaggcctaggctctccttgatgctgtgaagaattcacttaattcaagcatgcctttccaattcttcttagcctcctatataattatattgcctcccaaacactacccttagtacaaagacccgtgtacccttttgttgctaccttctcccaagctgtggcaatcttgcggtctaacacacttctactaatggattaaaatatgtacataaaaacaaataaacagaaatgcatgtattatgcacatacataattgtatgtgcatccacaaatatataagtagcaccattaaaaaacacttatccacgagagatgagtcctttctccatgtacacataagaaaaaaaaatataatgttacaaacctcttcataaaatgtcatggcagtgagccggtaacccgctataagcaaatattccttcacagcacagttaagatcctgacgctcattgtccttcaaatgccccaagtcagaaagtacattatttctcttctgtcgcataaattctgggccatggtttacagactcatttacatctgcccctgaatgcaagcccaaattggagaaatgtaaaatagaaattaccaattacctaatgggagaacaatttacatagcgcctaacatacaatgtgccagaaattgcaggatgccaggaacaacacaattttgaaaatgtgaaattaattccagagctacaatggagactacatttttagcatagtcatctaaccctgccattttactaatatactcatgctggagtacctaagagataagcatatctgtccatgactacttgattgagtcgaccttaacagttatagctttatacaacaaccttggtgttcagaaactcaaactattaaactagaaaactgaaatcaacacatacaaaaggtgtagtcttacgaaaattccaaacaatataaaggaaagcctcttcaaaacccaaacttttgctacctaccatttaaatcatttttaggaaaatcatttttcttctgtaactcggacttaagtttcaaaatgtcctcttgggccaagcggagctcatactcgctgattgctaatttttctactagtgcatctttctcctctagcaaactctggggatcagcgactgctttacaagaatgaacaagaaaataatcggtattagcaatttaaaagttagatgtaatgacaagattataaattttgaaagatgaaatgacaatcatttaaagccatgttttctatttaattaaactatatgttgtaaattgagagattataaggtaccatcccgaaaatacaaacagatatgttagacaaaagatagttaagaaattacaaactaaaaactcattaatgtttttttttttttttcagattagactctgaaagagaagccaattcaatattccaccaatcaaataccaagaaaatgcaaagaaagtgaagaaacgaatcaattttgagaaca

SEQ ID NO: 69563 - DNA, 3259 bp, Cannabis sativa
  modified_base (784)..(789): a, c, t, g, unknown or other
tttcttcacgatcttcctcactactctaatcactaagaatttcaaaattgaagaggaagagagagagagagaagggttggccaggtatgcgacaccggaagagacactaaaagagaaagaaaagaaaggtgcaagctagggttttctttaaagtgtgtttttaaatactttattcaaatggcccttatgtgttggtggaaaaccgacacaattgatagaccgattgccactactacaaaaaacagtattcctatctgtccttaaattagtttttttcgaggaccgtcattaataaaagtaagtgattgtttaaaactattggctatagttgagtatttccgacagttttaaacaatcatttagtactcctgatagtttaaaacaactatgagaccaaaattgaaatgaggtgttttaaaggaatcatcgacaattttaaaatgctaggtatactatacccgataggtatagtatagtatagtatagtagtactatactatactatacttgatgatttaaaattgctgtggattcccatgcacatttataaaacccccaatccaaaaaattagatctcatttattctctcgctctcttataaggcgatccacatcaggtgaccacgagccaccaccaccatctttcttgtccgctctcacttgttcagaaacagcgagccaccaccgcgcgaccacgagccaccaccaccttccctctcatttgctctctctcatccagaaacgacgagccaccaccaccgtcactcatctctctctctctctcnnnnnntatatatatatatatctctcttgtttgctctttctcgtacgtcccttccatcgtcgacgatggtccaccacaacgagaagacgagttcaacaatgatttttatcaggtccttttatatatatatatatatatcttttaaatgttctttgtgtatataatcatgattttaacatttgaaccttttttatatttctttttggtgtggctcagcaaagagaggcaactaaagattttgttgtgtactttttttatatatatatttcttgataattctccatatactgtaaataatttaaaatttattttttaaatcggcaggtagataacatggatgaaaatcattcccatattattcaaggttgcatctcatagtcattgaaatcacaaatcatcgttaatttatctgaaatgtataagcaatgtagggaaaaaatggcaaaaatttgcatcttttctctattctgtaatgtaatgtcgaaaaaaaaaactatcgacaataatagtatagccgacggtggaaagccgtcgataattctgcttagtattgccaacggtttttcagtgttgaaaaaatcttttaccgacattttcctaccgagtcctattctacaaagttatgcgacggttgaataagcatcgatctagaatactatacccgtttgttaaaaacagtcgggaaatcctaattttctagtagtgtgcgtcaattttttagtgacacaaacgttgaaccataatcgatagcgttagtcaacgacattaataataacgttgaccgacgcaaaaataggcagtggttagattaaaataaattagatgcaaaataatcattttttttagtcattgatgcatgcaaatcctcactaacatatagatctttaaatctgcaaaataaaagagaaaacaaattagtgatgtatagccttaaaaaaaatagtgatgtatagattttctaagccctgccctttttttttatggtgtttctaaaagaataaatatgagtagtaagtagggttgtctttagcttttatgggatctatgacaaatttaaaaaataagtcttttatttaagaaatcaaataaaatttaaataagtttttaaacaatttttttttttttggtcttaaggtttaatgttaagcgaaattcataaaacaaaaagaaattgggtggcctcttgagctgaggggccttaggcaacggcatgagccaccttaccctaaaatttttgttaataagtaaatagtaactttgatattaaatcaaataataaataaatttataattttaattaattgtgtatcgctgatattctattagttttttttttttgcttgatggtattttaagtgcagttatactagtatctttaaaatagctgtcttcaaaataatagctaattacattgtatactcactttattttatttgttttaatttttacttttatttctatattttttaagatatatccacttttatagataatgtgactattatatctcttaagttaatgtaaattatatactagactcaagtggagaatgagggtatactgaataacccattcacaaaaatgagtacattttattaaaatataatataaaaatatttttgattaatagatataaaaaagaagtattcctcaatttatctcgtaaaaaaaattataaatgacttttgtcatattctttaaaatgcatattcattgtttagttaatgttattagatttaagagttatagtttaattttaatttctttaattaataattatatactttaccataatattatcattgttatattatcatatatttattattattgatcctttattacattaaattataatactcactatttttactatttgtagttttatatttacttttatttatatttattattcataattttgaaatatttagattctttttttaatattaattttctttttatttttttaatgacagattataacttttaataatatctttattttgatttaatattttactagcattagattttttcatgatattagttattttgagcttttaaggcttgttctattatttagtatatttatataatatttaattgtaattatagcatatataatattagatatttttcttatttatagcatatatacaattagttgtgcggttttaattacaagactattaatattattatgtatttatttagtcttttatgtgataaaagtcaaattgtttaggttagtttgtgtaatatccttattttctaatttattgtttttaaatgatagttatatttagagattattagtattgtttttacaattcaaatttttaagattatttatatttacttcaaatatttattttgtttatacttttattagtactttattagtattatttttgcaccatttttttttatggtttggatgccttctatggcttttgtgctatctttatggctt

SEQ ID NO: 69564 - DNA, 3544 bp, Cannabis sativa
gagattccgtctgagtattttgcaagaatggattggcttaagaagttatggctttcaaataacgaattcacgggcaatttacccttttccttatctaatctcacaaaacttatcgaacttcatttggagcacaatcaatttagcggaaccattcctaatttcgacataccttctttattggaactcaatttatctaacaacgaattagaaggcgaaatcccagaaagcttatcgagattccaaccaagttcttttgccgacaacccgaatctttgtgggaaaatgcttagcaataaggagtgtagtagtcaagacaaaatcgatcttgggatagtaaggtatgaggaagattcaaagaagattatcgccaccgctgtaactttcgtggctgtgattgtttctctaatcatttttatcataattcgttcgaaacgtaaagggaaagaagattttgacaagcttggtgaagatagcacagagcataataatagtaataataataataacaataatgcccctgttgaggtgcatgttactacttcactaaacaagaaggaaatggattctgctccagagactgaatcgagcgcctcttcaaatcttaaaggagggtctgattctaaccagagaggtggccggggaggcgcaggcgcggctgctgttcctgcagcggcggagatagtgatggtgaatgaggaaaaaggggtgtttgggatgccggatttgatgaaagccacggctgaggtactagggaatggagggcttggatcgtcttacaaggctgtgatggctaatgggatagctgtggtggttaagagaatgagggaaatgaatgttaaaggaaaagatcagtttgatgcagagattaggcggttggggaagcttaatcattggaatgttttgactcctttggcttaccattatcgaaaagaggagaaattggtggtgtctgagtatgttcctcatgggagtttgctttatcttcttcatggtatgtatgtatgtatgtatgtatgaaatttttatgagtcttttctcttggttaaaatatcaaacataaaggttatttgaactttttgtaggtgatcatggatcttcacatgtggagcttaactggcatactcgtttgaaaattgtgttaggaatagccaaagggttaggctatcttcatacagaattgtcttcatttgatttacctcatggaaatttgaaatcaagcaatgtacttctgggacctgattacgagcctttgatagttgattatggatttattccactaatcaacccaacaagtgttagccaagcaatgtttgcgtacaagaccccagaagctacagaacacaaccatgtaaaccataaatcagacgtttactgtcttggcatcataatcttggaaatcctaactgggaaatttccttctcaatatctcaacacaggtaaaggaggggttgatgtagtccaatgtgtggcctcggctatatctgaagaaagagaaacagagttgttagaccccgaaatctcgaatattacttcgagaaattcgctgggacagatggtgaggctcctccatgttggtgcggcttgcaccatgagaagccccgaccaaaggccagacacagctgaggtcattcggagaatagaggagatacaaagtgagggaggccaagaaagtaatggcagtagtacaaatagagcaatgcaagtattgccatcactccgagatggttatgcagattccataccaaccccaccactatcatcatcactatcacttgctgaaaatcatgaactgagtttgagagatgattttggtgaggtttctgggagaaagagactaaaaaatggtgacagttttgccttcccaatctcataatttaactagtttgtgttgtattttcattagagggcaatgctgatttttggagttccttcttgttatataatattatagcaaatattctttgagatgagatggcttatggatcattatttttagatcgcttacaaaccaatttgaacctttgtacagtaaatttattctctgtgacaatgtatacttccttgcaaaagaaaacaaaaatttgttgacattaaattataatatagaatatcacattttctctacttccttgcaatatagatgactgaattgtatacatcatttcggtctttatattcgttgcattattgtcgttttaaaaggaaaaaatgtcgttttagtacaacatcattgtttcatttaaaatatcgtttacctgaaacgattgtcgtttcactaaacaatgtcgttttcagtcgtttaattaattcatttgatgacagctttaagtattttggcctatggtgttgtctttatattttcaaatattgaggggtctctctctctctctctttaaatgcttgcgtataagattaatgcctcgtctatgttcacactattcattctacaattcattttaggggtatttaaagattgtgtagtttcctcaaaatttgtccttttcaaaaagggaaattttgttagaagaaaacagagatagaaggcccattggttcagattggatcaggcctctccaaaatcccaagcgacatctctttgttttttttagaggaattttgtaagaggggaaatgttatttaatttgttatggagaaaaggaagaatttaatctattttgatttgggattttcattaagtcaactctgttgtgttctgttgtagatcgtatgcgtcagacagctggaaaacgccctcaaatgaaaacaacagcagtatcttgtttctttagaacaatattaatctaattaaaaaacttgttcatacagctggactttacttataatcaatttctttataactttttttaaattaaggctcactttcataggccgctaatctggcacggaacaaattttcaccaaagctctcaatcttaaactctcactaaaagacaagaatatttaaatttaataaaataagtaacgacttattatcattatactcttattatctttttaaccccttcaaaaacattgaaccaagacaatatttaaaccttattatattttaatattatgagcaatttcctttctactattaatataaacagaaaattaagaacatataaaataaaagaaaagaggaaaaaaaacactcaaaataatggacctagttatgaagcgtgagctttcatttcccaataatttatatgcatttataaagttatatattatatgagtttacaatgtcaatatgcttacagtgttttcaatatttataaggaaaaagttataaaatgtacactaagtttatgtatattgaattatatacaattgattaaacatttctttaaattgtattagctttgtttgatattttagacagattgaagttagattatttaaaaaacacaatggctagcttatgagccctaatctcaaaacataatgctgcatttttgtgtcaatatatatattgtacattaattaatatatatttatgaaaaacaccgtgtttttgcaaatgtcagttgtatatacgaaa

SEQ ID NO: 69565 - DNA, 1482 bp, Cannabis sativa
gtttgcattttgtaatcttacttgagattttgtggttgacacattaggtaacaaaatgatgatagaggagaccaagcgtagtatccatgatgcattgtgtgttgctaggaatcttattcgtaacaattctattgtctacggtggtggctcagctgagatatcttgctcagttgctgtagaggctgctgcagataaataccctggagttgagcaggttagaagaaaatttcttatatcttatttcaactgtacgatccattttatgtattcactatttttttttctttcattacagtatgctatcagaggatttgctgatgcccttgatgctgtacctatggctcttgcggagaatagtggtctccaacccattgaaacgctatctgctgttaaatctcagcaaatcaaggtaattcaggaaatcttacctgatttttacttttgcacgtttcttctcaattatgtatcaccttgtgatctcaacctggtacttgtgtgaaaaatttatatctttattctggtttttggttttcaggagaacaatccctactgcggaatcgattgcaatgatgttggcactaatgacatgcgtgagcagaatgtttttgagacgctcatcggaaagcagcagcagatcttgctggcaacacaagttgtgaagatgattttgaaaatagatgatgttatctcccctaatgagttctaagttttggggttttatgattaagctaaaaagaaaaagaaaaagaaaaaaagagtgccttgtattgtgattttcttgacagagtgactttttgataatttttaaattccatggatagttgttgcttgtattagctttttgaggtggcttttattgaaattttatggcatttgttactcctttcatggaattagactcatctcaattttattattatatgttaactcaactcatcactcttttccatacaagtgttcaaacatctttgtctgtcggttgatcatttacatttaccatgacaggagtaaaatatatggagggccccattgatcttaataaagattaccctttagatctgatctgattggctgtcttggattgtcataatattaattacaagttttgttgtctttcacatattttttcaaagggattcccagatcttttcattattatttatgatgctgctgcgacagtttttagattgcctcacccaattcaaatatcacttaactaattgagatcctgtctttttctacattgctattattattatattttctatctctctgaaagatgtgtttttttttgtttgtttcaataaaaaatagacctctcacttcctttgttctctttattcttcaaaaaagttcaagaaagggattgcatattttatactaatcgaaacaaagtagaacttaaattttttttcaggatccaaggattaaaacatatcttagtttgattttttaagattgatgatataatgaattatatat

SEQ ID NO: 69566 - DNA, 3014 bp, Cannabis sativa
ggacgttggttcggatactgaatgcgcagaagaagtggctggctcaagaagacacaacttacttagcggtccattgtatgaggattcgagagaatgaaactgggtttaaggtattactttggttgtcatgagtgtccatttccatgctctctttctgtcttatcttatggttagttaggattaccttcttcttttggttcttagcagaagccaaatgttagtcttgtggattcaagataaccatgtgtgtgttatactgttccttagttgcactcggatggtaggaaagcgtgtgtgtgtgtgtgtgttaggttgcaatttattctataatggcatgagtgtataaagaagggtgattgcgtttgtagggatcctggctttttctattaatgtttcaatgtttagggaacttctgttctgaattaatcattataacaggttaatcaatctcttttggttcatcaaaatggtttccctctatcatgtgatcacaacccgttttgtttgcttatcttgggttaacaagaatgactacatttcgaattaattgctgttttgtaattcagtttaatttttataggtgtacaaatggatgatgcaacaacactggtatagatttgattttgctcttgccaccaaactagctgattacatgggcaaggaacggaagttctcaaaatgtcgggagatatttgatgatataatcaagcaggggcgagttcctagtgagtctacatttcacatattggttgttgcttatcttagtgctcccgttcaaggttgcttagaagaagcatgtagcatctacaatcgaatgattcaattaggaggttaccagccgcgacttggcttacacaattctctattcaaatctattgttaacaaacctggaagctctgcaaaacattatttgaagcaagctgaatttatttttcacaatttggtaacaactggttttgaggtacataaggatatatatgctggcttaatttggctacatagttatcaggacaccatcgataaagaaaggataacagcgttaaggaaagagatgcatcaagcaggtattgaggagggaagagaagtgcttgtgtccatcttgagggcttgctcaaaggatggggatgtggaggaagcagaaaagacttggtccaaagttctcaatcttggtggtgctattccgtctcaggcttttgtgtatatgatggaaatttatggaaatattggagatcctacagaatcattgaatatattcagagagatgaaggagcatttgggttcaaacaatgtcgcaccatatcataaaatcatagagatcttatgtaaagctcaagaaattgaacttgcagaatccctcatgacggagttcatgggcagcggtttgaagcctgttgttccatctttcatttatataatgaatatgtactataatttaggcttccatgacaaagtagagttagccttcactcagtgccttgagagatgtcaacctagctgtactgtttatagtatatacctggattctttggtcaaagttggtaacctaggcaaagctgaggaaatcttttgtgagatgcagaatgatgttgctattggtgttaacgctcggtcgtgcaacaccatattatgcggatacctttcatccggtgatcatgtgaaggcagagaagatatatgatttgatgtgccaaaaaaaatatgacattgaatcatcgttgatggaaaagattgattttgtcctcagcttgaccagaaaaaatattaaaagaccagtaagcataaagctaagcaaagaacaacgagagatcttggtgggtctgctgctaggagggttgcaaattgattcagatgaagatagaaagaatcacataatccgctttgagttcagggagaattctggcccacattatcttttgaagaggcatattcattacctatatcacgagtggttgcatccttcgtgccagaccaataatggtaatgaggatgtaccatatagatttgtcaccatctcacactcttactttggtttttatgcggaccagttttggccaaaggggagacgaacaattccaaacttgatccatcggtggctgtctccatgtgttctggcatactggtatatgtatgggggacataggacctcatcaggagacattgtgttaaagctcaagggcaatgaggatggtgttgagaaggttattaaaagcttgaaagcaaggtccctggagtgtcgagtgaagaggaaggggagtgtttattggattggtttcctgggaagcaactcaacctggttctggaaactagtagaaccgtatattttagaagacttgaaagattctcttagaccaggtggtgaaacctcaagcaacactactacacatcaaattgaagacacgagcttccggagttcatgtgattctgatgaaaatggttctgatttcagtgatggtgggaacatttagtcttctgttggaagcttggaagtaaatttcaatgaattcaaatttggtctgtgtaggatgattatcaaagttcatattagcaggttcagaaagcttggcgcttctctactaattataatatcattcttctaggcaacttcgagaggtgtacatattaaatatacagggagaaaatttataatagcctattttttttttttttttgaaatgaaatagcaacttcaatagaaaatatcattcttctaggcaacttctatttttttgaaaatttataatagcctattttttttttttttttgaaaatttataatagcctattttcaatgaaatgaaaatttataatagcctattttaagcctacatgatggagatatcttattgctctttcagttttacttgtgagatgagtcaatgtgttataatatagttcattagcatttttaaaaattggagataattaaattttgattaatttgccttttattatatatattatttagtgtcttcatagatctaatggtgaaaataattagttctattgttttttttt

SEQ ID NO: 69567 - DNA, 4827 bp, Cannabis sativa
  modified_base (587)..(590): a, c, t, g, unknown or other
atagcaattatatttaataccatgcatgttaatgagaattattaatttatagctcacctatatatatattcaaggtccgccatacaaattagtaagtcataataaaaaaaaaaatatggtatttttcaaaatcaataaaaaaacatgtgtaattttcaaagaattttttttttcttggacctctaggcttggtgggctctaggcacaagcctagcccgcctatatctagggccagatctagggctaggcctgtatatattatacggtaaatacctatttggtaccttgtattttacttattactttatgtttctaataatgatcacttgttactttttatttagagattttacacatttggtaccctctctttaagtggacataaacttttagggaaattttacttacaccccaaaacttataaagacaccttattttaagaatttttattttatataaaatttatatctttaattgtattaagtttttttaacttttttctttcaatttatattcttaaaaaatatacatattaaaaaaattaaattatattttaaatatcatgacaaaaaaattaaaataaaaannnntataaaattttattagaaaaaaataaaaaaaaatatgaaactaaaatcaaaataagtattaaaattaacataaaataatgtgaggaaatttttttaaaaaaatattaaggataatttttaaaaaatatttaagtttttttttttttaataatagggtttattatcattttatggggtgaaaatagaactccccaacttttagtaattaatactaaattacccttcattttaatattttatttgaatttaaattattttaaaatattttttgattttatttaaacaaaataaaactttatgattcaatttctacaaccaagttttttgatatgtgggggcttaattatatattataaaaatatttatatttgctttgataaaaaaaaaaaattatagaagatataattttgtgggtttttttttactattttttttgtataattattttattaaatagaagatatataatttttttcttagatatagttctttttttactgagggctatagcacataaaatcgaagtttttttttttttcttaatagagataaaagtggaatttgaatagtatagagttttattttggtttattatatagctgtttttatatgtattaagcattaagtataactaaattaaataattgtgttttttattttagttttaagagcaatatatatatatatatattatttaaaagtatttaaaatataaaaattattaatctcatcataacgcaacattaaaggagaattaattaggaatgtttaacaaaaattaatagatttacttatgtaattatatatcatcatgataatatatgcacacatataaatattatacacatatgaaaagtgatttataacacatacatgcatgttatgtttgtgtctgaataagtattaattctataaaccgatactaaaagtataatttgtagtagtgaaaatgttaattaaattaaatagcttattaatgaaaaatattatcaaaatcttgcagtgaaaactatatatcaactataatggcaacaagggaagttatatttgaagagaacttgaaaattgatcaaggggtggctggcgaataccttcaacttattcgtagaatacgcgaaaaattgggaaaaataaatgaaaatggtagggattttcacaaaccgctgttgcactcgctgatgtggaagccttgttcgatttgatattaagtacgagtttagtagaaaattctgttaggtttcgatttcgaacagaagatgtctacttgattggttttaagatagaacaaaatggaaattggtttgcattcgaagataccaaagaactgattcgaggttcacaatccctagggtttaatagtagctaccaaaaattggacaaaatgccgattggatttcaaaacctccgacaatccataattaacctagcaactaccggaaatgatagaagcacatggtcacatgatttgacaagagtgatcatgtttacatccgaatcgttgagatttaaacctatagccgagctcatgcagagtgttctccaaaatcctcacgaagaacctcccgtaattatcgaaacttgggttaaagacctagttcataattgggaatatctttgtaaatttgtgcatttgagtaacagcaaaagtggagttaggaaggaagatatatacaaactcaaagtagggttacaagctaaacatttaaaagtaccatataatttcgatagggattggccgtgcgaagagagtaaacttattaagggaaaagaagtaccattagttgagttaaagattgttgttgatagaattgtaagcataatgggcatactggttaagtttaaagattattaatgcgttgatattattctaataatgttgtatgatataattttagtaaatttatttcaaacgtacgtctttaatttgtattgatcatattgttatgatgattaattcaaaaagattaataaaaaagcacacgttggctgtgttttcggtttttcagattgtgtattgttttcaaaaaagagaatagaaaataattttttgtcttaggttttttagactatgttaagagtttttttactaaaaaaagatttaatattctacaccataccatgacataaacccattctactctggactggaccatatgaacccaaacttggacccgatctagcactccggccagaccccagcctgaacccagactcggacccgaacccgaattcggatccactcagactaacacccggacctctaaccccaaaccctagactcgaatctaaactaagacccaggccctagacctcgaaaccagacccaggatctcgacccgaacccaaactagacttgaatccaaactgtggaccccaacctcaacttgaattcagacccccagacccacaccagagaacatgtagagtacttttattccagtcaaatcaccaatggtatttaatatgtgcatatataacaaattcagttacatatatgttattattagattaatttaactgatttttcttgattcaattacttactcagtttctaatataaggttactaataataattatttttatcgaaatagtaaaaaattaacttttttcatagtggtacttatttgtgaaatgtgatatcgacctattttaaaatatttgcaaactctcataaatcactcagtggaaacaccattatttttttttattattaaattaagtagaacaacaccaatacatacatgtacttgtaagtaaatataacatatatatgacccatcttatttaagtacaaattatttatttaacatgtagtaaatatatataaagtaaccactatatatgatcaaacaaagcattaattattcatctttaaacttaatcattatgcccattatttctataattttaggaggaataatcttcaagtcaacaagctgtgtctctttttcacctggccgatccctatcaaaattatatggtacttttagatgtttatcttctaaacgtttttgaatcttttttaattcttcattcttaactccacttttgctgttactcaaatgcacaaattcacaaagatcttcccaattatgaactagttgttcaacccaagattcgattacgagaggtttgtcgtgtttgtgcaaagcacactgcatgagctcagctacaggtttaaatctcactgactcggatgtcatcatgattgctatggtcaaatcatgtggcctagcgtttctatcatttccggtcgctaggttaattatggcttgtttgaggctttcaaatccaatcgacatgttcacgattttggctttgtaggtactatcaaacccaagggattgtgaaccttgaatcaattgtttggtatcatcgaaagcgtaccaaattccatttggttccatcttaaaaccaattaagtagatatcttctgttctaaaccgaaacctgactgattgactagttttgtctatacttaatatcaaatcgaacaaggctttcacatccgggagtgcaggagaggtgtgtgaagatcccttactattttcgttcatgtttcccaaattttgacgaactttattgataaattgtaggtattcaccggccaccccgatcttaatttggaacttttcttcaaatttaattttcctcattgccattattattcaaatttaactgccactgcaagatttggaagctatattaatttacatagaaatattaaaaggccttgtaaactatgttatgaaacaaatttcttttacaaaattcttaaaaagaatttgagtgatttggaaggtgtcttggattgaggagtcttgggcaagtgtcatgtcaatataggtgtgacataaattgataaatctcattaacatgcatgctatatttaagagttttgggggataaattttcttcatttttatttcacttgtacttaacttttgaaattcaaattttagcgaaaaaatctattaatttacataaaagcttgctgaggcttcgtttgatatatattgtattgtattagtattaatattcaatacaatattatgtttggtattaatttatattaataatataaaattatataaattctttataataaactcgactccaatttcgatcacggtctagactcggacctgaattcaagacccaaaccccgaacccggaacatgccccgaacacggaatctaaccttgtacctacacccaaaccctggatccgaatcc

SEQ ID NO: 69568 - DNA, 2958 bp, Cannabis sativa
taggaatggaatgtgacaacttttctttataataatgatttttttttttgtaaaatactaataatttaatactttctttttccttttaagtgtatgaaataatttttatttattatttttcatataattttataaaaaaattgacaataataaataattataaaaagttaatatagatatatatagtaatgtcaattgggtcgggtcgggctcaacccactaatgacctagcccgacaggatatctctttggcacgatctggccccactacttctttcagcctagtgggtcaggccctactggagataaaccggtcgggcttgacccgacccctttcttcttctttttaatggtagaatttttaaatttatatgaccgaagacccagcccgtaaaaaaagcctaaattgccattcctatatatatttgtcagaacaattaattgcaaaattaatttttaagtaatttttccaagattaaattatttaaacaacaataaaagctctttaacacataatagtatatattaaaaatgttggttaaaatcactttaaaaaaacaaatattgattaaaattttaaattcccaaagtttgcatattatctaatttataatccaaaatatgacatattattatattgtcaaaagtttcttccaaaagatgatattaaccaaccaaaagttttttaaaagtaaaacacttacgttacataaagtcaccccaatagtatttttcgaaataccataaactattaaatcctatattacttaaacaaaccaagaaccaatgccaacttcatcatccaaagtgaataaaaggtccttataagcttgattttggacaacaagttttctagcttcaattcgtgttcaaatgacagtgcatcgatttttttttcagttcatcgatcacttttagtcttctacttgcaccttttgtctcgaattggaaacaatcaacaattcttctaatactatcaccagtagcagcttgtattttatcgaatttgttcactctgggtagtcagtacctcaactaatgaatctacattcctagacatctttctctttcttgattgggctgaagttgttccagtacttgtctgactataggttgcattaccaacaagatcatctattggggaaaatggatcaaactcacattgttgatcattttctgtttctctatcaatctcatccattgtttcagaaaaacccacaccaccttgtccatttccacgatccttcccaaatatagtaagaaagtaatcataatgaggaaacggtttattccttaagaccaagacatggacttggacatggaccagtacctggagctcaggaccaggacgtggactgggacccgcacctagactcgggctgcgacctgagacctgagacttggactcgacccgtagttggtgtttggattagggatctagactcggactcagacctgaacgcagacctagaccaagaaatagacccaaacccatacccgtgacctaaaatcagaattggaaccggaaacggacacttaaatcctaaacaataaaacctaaaccttttacacttacccctaaaccttaaaccttaaacgctaaaaaactaaacactaaacccaaaaccctaatccttagaccctaaatcctaaaccattaaaccctaatcctaacctgaacatggaccaagagacccatatagagctcgtaacacgggcccgaacccggacctagacttggacctagacatgtcccccaaactcgagacctgaacttggactggaatctggacccaaaccaagatgcagacacaaacacgaacccgaactcaaactcagacctagactcggaccccaaccaaaacccgaacccaaaactagaccgagattatatgtcaccctgaaccagaatagggactaagacccgaacctgggaccaaaactggacccaaatcgggacttagaccccgacgagaacctggaacccaggacctcgacccaaactgacactcaaaccctaacccaaacctggacctgagacttgggacacgggacccgtactaggacccgaacccaaacccggatcgagacttgtactcagaccgagacctgaacacgaacacgaacccgcaccttgacctagaccgggacctaggacccaaacctaggacacgaactggacccaaactcaaaaccaaacccaaaccagaactcagaattggaaccgggacccaagactctaagctagacatggacctggacctaggacccgaaccaggatcacagacctgaacaggaaccggactgggcccggagactggtaaccaggtctggactcggggcttggacccgacccctagttggcgtctcgatctgggacacggacctggacccgaactcagacgcaaacctggacccaaactcgaacccagacccagatccgaacccgtacctcatgacccaaaattagaaccggaactggaacaggaagcggacccctaatccctgaaccctatgccctaagccctaaaacctttacaataacccataaagcctaaaccataaaacctaaaccctaactccctaaacactaaaccctaaaccctaaaccctaaaaaacactaaaccctaaaccctaactctatcatagacccaaacctggacctagacccacaccgggatcggaacccaggacccgaatccaaaccaagactaagacttggatcctcactcggtacgcgaacccgtacccagacccagacacagactgggattcttacccagccccatacctgtaaccagactcgtatcatgactcagacaccgaactcagacgcaaacctggacccaaactcgaacccagaccctgatccgaacgcgtacctcatgacccaaaattagaaccggaactggaacaagaagcggacccctaaaccctgaaccctatgccctaagccc

SEQ ID NO: 69569 - DNA, 3159 bp, Cannabis sativa
agactcatggactgtgtatcttacattttacatttctaagtcatgtaatttaggcagagtgactattcttaggtactttactccttttacttttccatgtttgttctgttttggtctgacgaagtatccaaataggagatgaccaaatctgctgccttgcatccagaggcgattgctttgccaacagagagtccacctttgtgatttcctaaccaaaataaattcataaaatatgataaaagctttacacagtaacagtactagtaggaaatggtgccaatgaacttcataatgcaatggacaaagtttctcaagtaatgtgtacttacctgcgtagaagaatccaggaaggtttttctccatggtttcaattgcttccataactaaatgatagttacgcccgtacaagggaaatgcttttttccaggtaaaacgactgtcattgagcacacttaatgtgtaaaagaattatccaataaacaaacataatccatgcagtttggtttctttcatattgagtaagataaggaaaagataattactttatgaaattaggctctccttcggctcctaataactgtttaaggtcagcgctaacaacttgcttcaactcatccctacagcattaaacaattgtaatttgaactaaaatgtatggaagcagaaaaagtaacaataaacttgtttgtgcagatgctaattccttacgttgatgcgtatgctaattccttgtttcttgtccccccaacaaaggttgtataaagatgcaagtcatttggtgcacgatcaggaaaaagcatcgaggaaaagagagtaccttcaaatcatatacaaatcaatagttggtgaccagcatatgaaacaaactaagattttcagtgaaaatgaacaccaaaccttatataagttccagaaggtcaaaaaaaaaaaacaatcatacacaagtattaccgagggtttttaaaccgttcttctgctctactgaaggaacaagaacaccaaatccctcaagaggcttcttaacattctccttcttgaaggtggttattacaacagttagtggcaaataagttacctgaaatgtacaaagatgatagtaacattagtaatttgttaacagacctttcgtctcaactcaagacacagaaatttaaagatgcaaactatggataaaattcatacatcttaatattatcttattaaaaagtccattttttcagaattgattatggaaagaaccacaagttttcatataatgcctacagctaaaaggaaagggaaatttcaagtaagatacaaaaatcagcaacaaatctagttggaaatatgccaactgctgaaagtaaaaaagaaaagcttccaaataatatggcagaacgatacctcaggaagaaaattaagagggaaaagggttcctctcttggtgatctccatctctttgacattgcataatggagcctgtggttgacaagtttgtactcaactactcattatatatagtacagaaagatgtaatatacattgagaacaagtgtacaaagtaagtgtgatatttgagcatgctttgtaatcctttacttttatgctgcttaatatcttctcaatattcagccattacattgagcagccatcatcttagatgctagctctttcatgttttataggagcctcaaagtactcaaacaattctatacaagttcaacattatcctaaaaatataatatatgatcctactaaccgtcatgattacggcatcaacagataaaccacgggaattcttatccgaattagtagcagaagaaactgtccaatttcctgtcagagacttaacattgtggtcataagataacgataatatctttgagctcagtttcagctcatctttgtcaagctctttgcacaatgtgtcagctagtgtctgcacaagattgaaagcagaaaacacagacaacctggtaaatgaggagcatggaagatcgtgtatgaaccacacaagtatataggaacaggcataagctaaattaagagacctgcattccaccctgaaaggaaaatgaaccacgtgggcgcttctttttttccacagaaccctttgttcccccactcttgtcctttttggaaaataactttgattgaatcaatcctcctacaactgaaccaaacctgatataaaagtgaaaacagagtgttcatagacaggaatatcatcacaataccaattatagcaattaagcaactccatttttaattataataagtggatggcatgactgcaagatatcaataaagaacataaatagactttctagtaacatcaatgcaagaaacaaaactacacccagattttctactcctaaaccgtgaaatgagaaacctaagtaatagaaaactgaatccccaacaatgaacgagaaaagattaaaatagaacaataaataaaaaattaaggcaagtgagggaagataataagtcagctagattttacctattctctaaagtccatagctctggaaaagaatgttgcatctgttcacaagaaccaatatgatagatgtaattgtggttagctttgtaaaagcataataaagctttttctcttccaaacctcaaccagtctaataaaaaaatagataacaagtagtgagaaacttcacgttgttaataagacatcactcacagatagagattcaggatctgcagcacttgtgcccccaagaaaagggtcaatgagataatcaacaaccttccagacataaacaacactaaagaatgagaatgagaataaataaaaattgatgataatgaagaaactgcacaaagaagttgattggctaatgatcagaattgtcatgtgcataatcaagttcaagaaatcaacaaactagctctagcaagcatataaatagcgtattatgtcaagctagtgaaactacctctttcccaaagtgtcgctgaaagaatccacccacactgtagaaaaccaagtaaatacataaggactactacttcctcaaaaaatatcaagaaaggaagtgggagcacaacgagccaattggataacatagagttagaacctatgagttaccaattatcacctttcttgggcctgatcatctgctatttttgaatttcttttcttccacataaatggctccagaa

SEQ ID NO: 69570 - DNA, 2148 bp, Cannabis sativa
  modified_base (1939)..(1944): a, c, t, g, unknown or other
atatatagatagatagatagattcgggctgacacgaagaaagcacggcacaaaaatacacagacatacaggctgtgttggggcctaccttttaaaatattagcacgacactgacacgacccaacccatctttttttgtgagacacaacttgttcatttaaacactaataaatatttgggccaacacgcaggaacttagagcactactactgttatagatatattgaagagtttggcttcgaattttaatttcaatgcaagagataggcattaggcagttttacttttgtttgtacgttatggtcagttatgagagttgagagtagagaaaataataagactagatgtaacaacaacaactttgtaataagttggaaatcgtaccgtaaatatttattattcctcgacaaatatcgacaaatatgccaagtactgtggacccaaaatttataattggttttcatttcctataacttttgtttgttttctttattacctcacctcaactcaaaaatatcagcacggcccactcataaaaaaaaaaaacaaattttacttgtaaattaaaaaattaactctacctttattatttttattttttatttttgaaaaattaaaaatctgactactctcacttgtgtatatatagacacacgtgatgaagacaattgatgtatactttggtggttgagaattattattcatatatatgttgagagatatttagtaaagatttctctttgtgatcttccacagctttcttgaactgtaaaaattaaagggcctcgcctagccggaatttcttacacagttcaagaaaactgtgaaaaattactgagagacatcgtcgtcgtcatcatcatcatcatcaatttctagatttctttcatcaaccaaacaagaagatcaagattgcatgagctgagtttatatataaattgattacttaaatcccactttttagctacttctatatcatcaccaggtttaattattcctcaatctttattatattatataattctaattaaatattaaaaaaacaccatatataaatattcatatatacacacatgtacaattcatctcttccaactgaataattcgctaattaactgcattaatttatattgatatatatatatataattactcttcttttcgttcagatctttgtagctcgtaattataattaactcaatttcctcttaattggcctcaattttacatttgataatcatatttttatataatctctaaacttccctccgattgcatatatctataactaattaattaaccttaattaattttgttatggatataaaatcaagatctaggtcttggtagctccaagaaaagatcacaaaaaccagactgtatacgtacatattgcagtatatatgtatagcattttgtgagggaattattgttatgtatatcgtctttaattagcaattaattaatagtactattaatgtccacttatatatatatattattatttataaattaaaacataattaaattaatagttgattgagtatatctgttaattagctatagggcctaagtacttggaagaagcttaatttgcttccaagattacagaactgacagatctgatgtgtggtgatgaatatatatttcgaattctatattagtacttgttgtaggtttgaaagtgatgcttcgtttcatacatatgctattatatattattgtttaataagtgatttagtcaacttaatataagtttccatcgatgatgatgatgatgattaattaattaattaattaattattatattatatatgatctttctttcgaattccattttaacaactcgtagatagttcgttgaaaataattcctcctttcagcattaatttactaaattttttcatccgtttgtttctttttttttttcaaaaaaaannnnnnttaatattattattatttttttgatgcttagaacaattgaagggctgtatttattatattatattatattgggatattagggacaatttagttacacttttaacacatgtttagaatagctaatctaggattagtgtgtttactgctcttactcttactctgcccttgcatctattttcccccacgtttctggtgtactatttt

SEQ ID NO: 69571 - DNA, 4569 bp, Cannabis sativa
attactaattatttaaaggggataccttataataacgaacacatgtcaaaatagttaagtttgtgagcagttcagactttatttcatcaaaattataataaaatatcttgatttgattacaggggtgtctatacattgaatgcaatcatcattattttgcttatattttgccaacatttttctttctacttattttttccatgaaagtatcaacaatgataactaaaatacaaaataataaaatgaaataaataaaatgactttgactagtacaacgattacatactctttcaactactctcgtctttattttccattgatgttgacaaacgacgtcgtttccctccaaaatttcttatagtttattccgttaaaactgccaatttcttcatattcttcatatccaacaccaacagacaagaaaaagacaaaaaagtcctcgaaagccagcttacaaatcactggaaaaacaaattttcacttcttctaaatttattatgattagctggattacttagatataatagcacaaaacgttgtcgttttactcaaatttcactgtcatttgtaacaaacaacaatgctccttctttgtaaccatcgttagctagccttagtctaatccaccaaagttaaaagggttcaatcttttgagcttttccaatgtttaaatccatctcaaaaccatttttgatcaagtggggttgtgtttgttttgactatatatagtatatagtacttcaacttatattgatttggttttttttgtaatgcaactatgcaaaactcacctagattacatggtgggagcagagtggcctttcattttcaaaacaattctaataataacgtgttgtccaagcaaaggcgtagcggttatgaaccgtctgataccgagacagatttcaatgaaagtccatggcgtgaacataataagccaaaagatgaagaagatcatttggagtttgttaagccaaggaacaacattagccctttaaagctaagccgaagacactcttcgaggtatgaattcggtgctgcagagaagagaagacaacacaacagtaagtcaccttataagccatcaagaagagaagaacaagtgttggatttagagcataatttggataaagatgatgatgatgatgagttgtttatgtatccatatagaaagcaaactaataaggttgttgaagttaataagaaaccaatttacatgagcaaaagatcagtaagtgctccaagagtaaggcagagagataaggagagaacaatctcaccattttcgaaaccaagacaagctcctcctatgcatcctcctcctcctgatcaagcgaaagtggtggtggcgccttcaataggcgaaatcaatgaaagagctggctatgcaaagcttcacactgcaaattttgagagtactgactcaatttcaccaggtgatatattcttttctagagaatggaatgtgttggcattgcctaaaaagaaaggtggttcaggaaaccatttttgtccaaaaccgaaaataatatctcaaagatcagattctgtgcctcacttgagaagagcaaataataatgttattgaccatcataataagtcatcatcaactacaatctttactacttcatctgcaagtaggccaggaggaaatggtaagtttagtagtgagagtagtaaactgagtgatgtgagtgagaaaacaactgagagcatgaaaaatttcactgctaataggaagaagaaacatcagaaggagaaggagacatggtttggttgtatgaagaaagggccttgtaggacttcaaagtcacctgacaaaactccaagaactactttcaatgagaccttattcattgagagagcttatgtggttgaaaatatcagacagttctgggctgataagtatcaacctgcttcattgaatggattcactttgcataaacaagaagctcaaattctcaaacaacttgtaagtcagttcattgatccactcaccatatctctacattttcccatgttttgtcaacccaacttttatttattgcaaaaattctcaatgaactatataaaaatcaatgcaaatagtcttatttagttacattctactcattttttaaatcaatttgcttaaatgttgtagttgaaatctagtttattagcattaaacctacaatcattagttctaagattacacatacatattatcataactcattaattgactcttatttatgtatatattttttgtttggactctttaattgaaccagattaacgtcatattaatattacatgaataaattattttaagaaaataagcagaatgtaattgcaggggttatttgcatcaatttataagagtcataatttagagggaaaaaaaatgatatttaccctttggcatattttatcaaaattacttatgaataacttttttcccttttgagattttaggtgtcagatcaaatatgtccccatattttgctgaaggggccatctggttctggaaaaaaagcattagcaatggctcttctgcgcgaattatatggcgatgagagttggaatgtatgttctttataatcaaatttccactgtttaacctttcaatggctaagatgagttcattttctaatcatgttttgcagatttcacatgatttaagatactttcagattcaggtaacacactaaaaacttcatatattgcttttttatgttgaactggtttgacattaaataaagtacatatgtctataggaaaacaggccaatgcaagtggctgttccaataacatcaagtcctcaccatttggaactcaatgtgaacttggaatcaaatgctaagtatgctctgatgggattagttaaagaaattgtcaaagattatacagttgcacccgaaatcagcattgctaatctcagctcaaattataaaggtctgatcttttgaagaagaaagaaaaatgatcaattcccttagaaaagttggccctttaacacaaatttttgttctaactgttaaataattatttaaggttattttagtcttttgcgcgtcatttaaattgctgataactcggttttctatgaatgtactaagcatattgaaattaattttcattttactcatcacaatctaaagttgggcactattattttgccttttgttccttcttcgttgcagcttactgatttttttactaagtcgcatacaattactcatttttcgttctcttgtaggcgaacttttgatgtttcttgctgcagcatcacagagtttaagaatgaatgttaaataattatttagggttattttagtctgtggtagtagtctttgttctctaatatttattattctcaagtaattattactaacatgtttttttttaccatttttgttctcagtaatagttctttatgatgttgacaaagcagcagataacaccatccaacatcttataaaatggatttttgactgttactcacattcatgtaaactcatcctttgctgtgaagatgatacagagataattgagtcagtcaaaagtcaatgcaaaactatcaaagtcaatgctcctgtaactcatgaggttaagtatcatatcagaacaactatgttgttgtctaataattaaggctaattgtgtgttatgttctttttgacttttctagatcatggaagtactgattcagatagcaagaaaggaagaatttgatctttctatggagtttgcagctaagattggtatcaaatcaaaacagaatcttagaaaagcaatcatggcccttgaagcatgcaaggctcacaagtactgtgactcatataattaaataataagattgttaaatttagccattaattttgattgattcaacttatatggggtaactatgttttcattgcagctatccttttttggaggatcaaccaattccacttggatgggaagaggttgtggttgaaatctcagcagaaattctagccaactcctcatctaacatgtaactaaatatgtacattcctattatgtattggtttgtaggggtgtttgacaaaaaaaaaaaaagcttcttttttataaccattttgcataatagtctctttttgataatttttttacaaaatgaccatctacacacactcaaaaacctatcttgaaatgtcatttacaaaagaaattattctgcaaagagatattaattggattttatggtttttgaggcaaggttgctcttttcctcaaaaaagttattttatgagaattttttcaaaaaaagttaaagctaattttttcctaatttttcccatatattttttttaaaaaaaaaaagttcatgttttttacacatattgtatagaaacatataaaatgtgtaatttcctcatatttaaaaaggggatatattgtcactagttagtcttagactgtgtgagtactgagtacatataacctctttttggaagtcattttgaactttgacccagtttgaataattctttacgaaaaaacctttgtcactaacaactaataaatttcaagtgaagtcgaacttttaccatttggtaa

SEQ ID NO: 69572 - DNA, 1883 bp, Cannabis sativa
aaaaaaaaaagagtgatggagattggaagtgctgcttgctcaaattggattacccttcgaaattcacatcattcttttccattctgccctttttaccgacaccttaggatggacgacaattcttttcactttcaatatattttttttattttcttcgttgaagtaagatctattcaaaaatttctttgtcgatggcccattgggcccacgggatcacgtcactacatccagtaccatacattaattatcttttaataattttttaatagagtcacattccaagtctaaggtctaatgaagaatgataataataattaattaaaaccatgcagaggtcaatgatgatagtccagtagtgttttttagatgtgattccgtctcttatctttgtctcctaatcctcatatttggctggctggattgccttggggtgggctctacatttggattcttctttcttaagagttgagcttgagacctaggttatatctatatttatatgtgggggcctggttgtgcatcacttccccttgtagaattccatccgggctaatgatattcaagtgatcttatcactactcactactgtatggaccaacccactcgtcagaaacttcttaccaaaatttcttaattttgttgatgtcctctcaattttttttttttttttggccttaacaaaatagaactggaatccatttcagtgcttatccttcttagtgtataaaaataacatatatttttaatttatagtaatggtagagacacacataaattaattaaattttcgaaattaattttgaatgttttaacatactaaataatttaatatattttaaaaacttgcaaaacatcttaaataactacagtcatataaaaaatattaagtaagaaaagaatgcatggattaatccttttttgtgttacatcacagaattttcatataagtattatatagagaaaataattatgatacactctcaagtcttatcatatatatataattgaaaaaggctaaaatatcttattgtttggttgaaaataaataaataataataatgcaagtaactgttgataccacctgcttaaacagacaacaggaaaggcattcggaatagttgtgtttcttattcatggggtcgtgagatttgtgtcgtttagtcataatagacatgataaaatatgatgttttccttgcgtagtatctaatagaaaaacactatttgtaaaagcgttccattttgatgatatataatgcatatagggtcgtaaatgataaactctataaaagagatcaagagatacaaacattgtcagagtaagggtttgtaatgtttttctctcttgttttgccttaaatgggtcgacaccaaaatctcatcttgctggatatggagagcctccacttgaggtttaagacagaaataacaacattggtcacgtgttatatgccacactgtctgccattgctaatattgcttacgttcaaaagtttcaaaagatcgtatataggtccacattcctatcagtaaacaaaaaataaataaataaatgtatgcttgcgtggttaatcataaacatcaactaacactaaatcttgtaaaccactcttttatgattgttcagtcattcacttagattcgacactttgaaactaatggtaaccattttgctacgtgtgttcgatgttaccatgtcaacagaatgattttaattttttttccttttccttttacctctcacctttttttgattctgtcttgctggatttgactatcgttctaattggttggccgatgaagatttttgtgaatattatattatggtctggtactataacgctaattctagaaacttaataaccttttcataaccaaaatatt

SEQ ID NO: 69573 - DNA, 3192 bp, Cannabis sativa
aaaaaataaagaagaaaatgagagtgacacggtaaacgcagatgttgaaaatctatctatttgtctttttttttttttgttttttttaataacctaaaaaaataatttggggtgtacaaataatacccttttgtaaatagagtggggtgtgattataaaaaataatatttaatgagataaacttagtaatggggtgtagttataatttttgaggtgtaaatataatcactttttatttcaattattctaccagttttacccttatcattttacgataattttcattcttctctaatcaaaattttaccccaagttttccacaaacctacacatccatctacaaagaacgcaaatctattatgtttgaaattatatcttagttatgtgagtgtgtgaggataatttgagtacaatactcataaaaagaagtatatttaaattaaattttatttggagattaatttagttaatgtataaaaaagtgggtatttttcaacttctcccctaaatatggttaagaattgtgttatatgaaagtatggatttgacttggataagagtgagtttgggtaggggtggcaattcgtgttcgcgagttgtgttcgtgttgtgtcgagactcatgtataataggtacatgctcgacccgaacatgacccgtttataaataaattaacacgacacgacccgtgtaacccttttataagcatattttgtttaacatgtcaatcaataacacgtttatgaagtattcaacatgtttataacacatttatgatacgttaaaatactaaaataacttttaataggtcattaacaggtcaatttcatattagtcgtgtcaatccgaacacaacccgtttattaatcgggttagacgaattaatccgaacacgacctgaatccatttaaggcaaacccaaatccgttaactctcgtgcgggtttcgagtcatattatcgacccgtttttccagccctaaatttgggtattagtgggcttatttcggaaaattttacaaaattaccattttttttctccatatattcatagtgtataaaatttttgggccctggactataccaggctcgccttagccaagactgggcctgtcactaatacgatcaatacattaggtacctccttcccaccaacccatagttttggaatgttggcaaatgtggattagtttccaaaaattttagtgtttgctcttaaggcccaattgtatttatacacttaaaagtgttttattattattatataaaaatctatataaattattatttttgataatttttttttacacttttacatacattgaaatgtcttatcatttctgtatatttcattttattcaattacctctaactattcaaatgcagtgtaattgtgtaaaagtatatcgatccaaccgaaaatcactaaagtaataacactatatagcaaagcatataccaaaatttaaaaaaaccttaataaaaattactcttaatgtcaagtactataaataaacaagtctcaccaaactttcactttcagtatatactttttaagaagtttcgaggatattatagaagctacctagcaagagtgagaattaagtttcttaattatatataaatataattaaccttattatttgtttctgcctacgtacgtacttgttgtgctgttaattaaattagaatattcaaattaacaatatatatatacttttcgaggaaaaccaatattattattattgttctatatatatatccattatctatataattaaaatatggattaattagtctaataattaattatagggtgttgcaattggtttctttcttctactttttttcaactctcatttttgttagtcttatctaaataatactggttgaaaaatgaaaaccctagccattttcttattctcgtttttatttgactagtatatacatatataaatatatatttatatatgatatcactcacttttaaaatacaaaaagaaaccttgagctaataaactaaccttaaaaattaccacgtactttaataaattctatatatcatattcatagttattacgttatttggtggatcgacaaaattaagagtaaatcacacgatttccattaattgtagttttgtctctaattacttcaattagttattcccataatataatataatataaactaaaataattagatgtacgtacgtaagtaaataacaaatcatattaattacagtattaatgtcaacgtgcatggattaagtgcaaacaaataattaataaaatacttgtgtatactaaaataattgttactttttgtgattttaattgtaatttttaagagaaatattgttttgatcattgttagttaattatagagttgatgtcattttagaacatttatgtttcgtaaaaattatcgattgacctatatattttgaatctgtattttttaaatagtactttgaacttaattttaatttttttttaaataactaatttaaagacattttttagcacactaagatgtaaaaaatgtacccaattttgttataatataactcggttattattaacttttattttaacaaaaaattagttcatataataccattttgttccattttgagaaatacttaatctaatttgtcatttaacaaaataaataatcgaattaataatttttacaaaatatgaaattgaaaataatatttattcttaattatatgtatgtaccccatataggtggcagagccggcataaaattctccagtttaacctaatgtatgtagaaaaatattaagtgtacactacacactattgagtaaataccaagtaagatattacattattgttattaatttcgtatataaactgatcagtgtagacaagtatatatatatatatatagggtttgaaaatgtacttatatattctccaactgctactattacaattagtatgaaaagtaataagatcgagtttggtatatatttggttaacacgatcattaatagttagagattattaattatcttggccggtcaatatatttgtgtgcctataggacatatataaggatctaattaaactataagtaccttaattaaggccgagcattgttattgggcaccaatgtgactagcacccttaagacgtgtcgttttgcgattgactagcgatact

SEQ ID NO: 69574 - DNA, 3948 bp, Cannabis sativa
atatgatgaaagtgtttatttctccctgtcaatccgatgacaaatttttggccttcttaccaaaattcctgaagaaatatcccaatgcaattttaattcaagattttaatcaagggtctcaactgaacaatactatatactcgtatgtgttacaatctcaactaataaaaaaagtcagaagatcatacttacattagcaaattcatctcaactgaactctgaccaatagttttgttaatggtgttttgctgcatcaactctcttgccatattcacttcttgccatttaccagccttggcatatatatttgaaagaagcacataaaccccactactaacttgagcttgaggttccaactttgttatctgatttcttactttatcagctaaatcaacattttcatatatctcacaaccattcaaaatagcaccccaaatgttaatgtttggttgtagtggcatttcctcaactagactcattgcctctttcaaacgcccagctctgctcaaaagatcaaccaagcaaccgtagtgctcgagagttggaacaatgccatgaacactcctcatttcgttaaaatgtctctggccttcgtcggctagacctacatggctgcaagcaaacaaaacaccgatataagttatctcgtcgggaactacattattaccatcttcttgcatagtttcgaaagttttaagagcttcaatgccctttccatgaatggcaaagcctaagatcatactagtccatgccttcacatccttcttttgcaaattgtcgaaaatcttccaagcactgttgggatctccaactttcgcatacatgtctacaaaagcagtcccaacagcgaggtcattgatccatttggtttttgatatgtaagcatgaagacattgtcccaaaatcaaaccccccaaatgagcacatgcactaaggacacccagaaaggtagcttggtcaggaagaacaagctcagcaatttgcatactcaagaaaagatcaaggctatccttagcttggccgtactgattatatgcagcaatcatggaattccaagcaaccgagttcttttgaggcattttgttgaacaagtcctttgctgttttcaagttcccacattttgcatacatatctactatggcagttgctagaatcacattgaaattttgatttgacatgaaaggatcataacccagatggcgaatgcgattgtgaacccatttaccattctctagatccttacttcgagcacaagcaaccaaaacattcaccaatgtaatctcatttggctttacatctctatcttccatatctctaaaagcctttatagcctcaccaaatcgattgttgtttactaacccggaaatcaaactggtccaggccaccacattccacttaggcaccatatcaaaggctttcaaaccagcttccatgtcagaacaacaagcatacatatggagtaaagcagtagaagcataaacatctaactcaaacccggttttcacaatgcgattgtgaacagatcttccataacaatgatgtccaattactgagcaaactttcaacacaaatgggaatgtaaaattgtctggcgaaatgcccatttgcagcatacgtttgtacatgatcaaaccctcaattggagtgtcactaaaagaataacctctaatcattgagttacaaatgtagttattaggctgagcaatttgattaaacactgaccttgcatagtggacatctccagtttcgggggaaacacaaaagtccataatcctactcaatggaatgatgtttttgataactgatgtagttatcatcaccccatgtagctgtttcaactcagccatggttttgcatttttccaagagagagagaattgtgtcataggattttttcataattctcttttggagcaaaactcaaggatccaaatttggactgaaacagaagtgtggcacttagccatgcctgcagaaaaaaagaacataacttataatagattagataccaatgataaaacagaacaataagtaatatcaagtttaggacagtttagttgaactacattaaaggttgaacctttaacttggtttgttcccatacagtagccctcttaagcactctcttaaaacactagaggttgatcaaatcagattagtcctatgaagtatgagccacatcatttccttctacaattattatttgcatggtgtttcataattctcagtgtactttaacctacattctacttcaggcaataaaaataggaagatcatctaagacattataactataaggtaattttataatacactagggatgtttcggtaggcctatctgtttcgatatttatgagagttttttagtctaatatttttcatgacataattatttaggaccacttgtagatttacgagtagtttacaatatcaaaaataagatttgaatattttgtggcacgtacgactgtttactcttatacatttgataagcaattgtttgaattttattttcgacaatgtaactatttagaattttctgacaacttatataggctcctaaataattataacattcgcaattaaaaaaaaaaaaaagaactaagaatttaccataatatccgtaaaggtgtactacagaaatttccttaactataatatagttctatattagtgtgtattaccttagttatatgatttaatttcagagggggagaaaaaagtagctaaacaaataatagattatagctaaagttgcttgaattaattttctactagtaatattttcaaacaccttgagtgcattaatatttgaaacgaaaaactaagcaaaatatgaatttaaatgaatcttctttctcacaattgacaattgtaaacaaacacattaattaatcaatctctgctacattatatataaacacaattacaggggagatgatgaagatagatacctcctaaatttgaagagatggagaaacaaaagcatttagatgatctgacggctcaggtttctcagcttgaaagaaagaatcaccagatcatgacgcgtgtcaaaacactacctggctcaacgttttgagttgagccatcccaaatgtatgaactcattcgttggatgagattattaacttccaaacgcgactaataatgctgtcgtttaggtgggaagtggatgtgggatccaacggtggagattattccatggctagtgggagttagttcagtacggttgagcctatgaaaagatttccatgggtgagaactttagaaaagaaaaaaatatatttttttttattttaacactttaagaatcaaaacagttttttttttctttcaaaagaaaccattttttttttatatttttatagaattctacataaaaatttacataataattaatggagcaacctaaatcgcaaccgaaatccatatataaaaactatcggagcaatccaaactgtaaatttaaaaaaaaaaaatatatgagataatttttcctaaaaaaaattaagtttaataatctatgtagcatcttgtatgagtttttgtttattattatttgttttttaaaattttatttaatttttaattagtatttttatttaataaaatttttcatttcttcattctcattctatatttaattaacaatatttatgaattgagtataaataattaattaaaagataaaaatgaagaaaaagcaatcacaaaattaaaaataaaataattaaattaataaaaacgctttataattaaaaataaaaatataattattcaaatatcatattcaattataataataatatgtctcttcacatataattataggttatatgacacaaatctcaagtttgtaaatttatgtaatttgggtcaatgaacactatatcaacatctcaaatgacagagttaggcatggcattggaagccagtggcaaaagct

SEQ ID NO: 69575 - DNA, 3809 bp, Cannabis sativa
caaacttgctcagccttaattcgcaacactaagaaatgtatattatacattttatctttctacagtgaatacagagaaaggatagtcatcaacttcatttctccaagtatttttacaatcttgtgtgaccaagactccgctcatcctccgatagtcacccactcccatcaattgttgtccaactcaatttgtcgtccccaaacaaaaatccaccgtcaatctattagagtaatcggttcaaacttcccacggtgaaccaccattaacaccaaaaataaactcttatagcaccacattacgaaccacaaacactcccccacataaccttcttctatgtactcgcaagatgatcatattaccccaatcaagaggtagcaagattctcatatcccaaatctccattcgagcagagagctattcctctacctccggcaaactgcagttcaaccttgggagtgttttgctacaatctcagatgacacctgtatcaacagcaatgtctaaagcctcgtcaggattatccatctcccttctcacagattcaacagggccatgatgcaattattgacctctaaagaagtggattaagaagagaaatctggtagtgccttcgatggtcagcaaagctcaaacatgacaggaattcagtttttttgagtattatagaattgatccatacacaactcaactgatttcaaagtggatctcacaaagctcttcatcattttgcagagctcttaatgaaaacacatacaatactaattgtattcagttacactctttgaatcagtgtcaaactccaacaaaaataatcttaattttttctcatttattcattaattatacatttgtgtaatagtattacatgttaataatactaattatccattgtgaggaactggaaaggctcttttatttcatgtaacaaacaatactaattagtctatatcctttcaagtaagattgcgtggaactggaaaaagactcttttagtgagcaacacacgtatataatcatagtgacacacataacaattaaatatagaagtactgaagaacaaataaaccaattgtgaagatatctggtaaagggatcagagatttgctaattgtgttcaaagaagagtatcgaattcttctcatacaagaggtgtcagaaattaagcactcatcatcatcgcccaatttttttaaaaagaacaaactaaaaacatatgcaacaataattaattaactagaaaaagtccaaatacaaacacaacaataatcacgatatcaaagaaaccacattaattgataaaacaaaattgttttcaataagtaaacacatgaataaacatataacaggaacaaaatatttcgaatgatgggttcaaaaacaagaatttcagaaaaatatattattcacatagcaaaagaagaatcactatggaaacatagaataccagaaaacaattccctcagaaacaaagtacgaatcaatcactacttcaatgatcagaattagcatggtaagttatagcatcacagggaattgttctatttaacgaaaataacaaacaaatagcaataaaaaggtatagtacttaaaatataagaaagtaaaaaatttagaataaatagctcagaaacgtgtgaacaaattctaatctcagacctacaaaaggtctcatagagctgggattacacttgtcatcagagcaacatacataacaattgactgaagaaaaagtaaagcaaataaaaagatttttggaggatatcgatcaaagggctcagagagttgctaattgtgctcaaagaagagtatcgaattcttctcatacaagaggtgtcagaaatttaagcactcatcatcgtcgccccatattttattcagttaaaagaaactaaaaatatgaaatgctaattaactaaaaaaaaagtccaattacaaacacgacaacaattactaaatcaacaaccacttcagaaactattcaaatagaaatcaaggaaaaccagaaagtaattctctccgaataaactttaccaaaaataaatctcacaggaaacatttcgattttacaaataacataaaaaacgatgaaaagctatgacatttaatataaagaaaaataagaaatcttagaataaatagctcagaaatatgtgaactaactctaatctcagacctacaaaaggtctcatagagctgggattacacgtgtcatcatagcaatatgcacaataattaaatgaataaaaagtaaacaaaataaaaaagtttgttaagagaccaatctaagggctcagaaagttgctaattatgttcaacgaagagtatcgaattcttctcatacaagaggtgtcagaaatttaagcactcatcttcctagccttattttactaaaacgctgaaatgataactatgtaaaaaaaacacccaattacgaaggcaacaataattgctaaaacaaccactacaaaaggtataatcaacttgaaatcataaaaaccagaatgaaattctctcagaaatagagcgattcaatcacttcaatggtcagtataagcatggtgaatagaggatcacagggaatttttttactattttataaagatcacacgcaaaaaacaataaaaacccttagtattttaaataaaataaacataagagatttatattagaggcctcagaattatgtgtaggaaaattctactctcagacctacaaaaggtctcataatgagctgggatacacatatcatcatagcaatataccaacatacgtaaaaactgaatatgaagtaaaagtaaagcaaatagaaaagaaagtccaagattctatcccggggttcagggaaatactatgttaaaaaaacaccagtccagatgatctatcctgggactcagaaattctaagtgttaaaaaagcagtaaatctagatgataaagaacggagaaacacggcaatttgaacagcaccattagaagggataacttcaactaaagaaaattgcattcaaaaataaattaaattcaaatcatggaaaacgtaagactcaatgtcaattacctcgtaaccagagtacgaatcaatcacttaaatgatcaataatagcaaggtttctatattttaagaatatcacttgcaataaacaataaaaaaactcaaatcgtacacagtaagaagaaaaaataagagaacttgtttcgatggctcagatttatgtgtggaaaaattctactctcagacctacaaaaggtctcataatgagctgggatacacgtgtatcatcgtagcaacatccataaaaattgaatatgaagtaaagtaagcaaagtgtttaaaaaacaataatgtagatggtagaaagcggagaaacaccaacaatttgaacagctaatggattgactcaacataaagagcaatatcattcatattaaaagaatgaaattgaaattatgaaaagccaaacagcgattcaaaagaaattacgtcataaacatagtatgaatctatcacttcaatgatcaatataatcttttcaaaacacttaattttttaaaacaacatgaaaatagcactaaattgattaaattaaaatactcattaagtaacccattataataaaattcaatttttttttaacgaaaacataataataacaaggcaatttcacaatcacaagcataaaatagctatcatacaaacaaatgcccaaaattttcgtaccatgtgccaggaaataaaaatgaaaatggggtgtgggactgatttggtgtcacgatccgtaagggagcttgttgccgagtcccaaacgagag

SEQ ID NO: 69576 - DNA, 2549 bp, Cannabis sativa
  modified_base (2273)..(2280): a, c, t, g, unknown or other
attgcttggattacagagctacaaaaattctattttgtcaacattaataaaatgttagaaaggctgcaaaatacagaaaaacgagagcgttccattggatatctggtttcatcccactcgaaactcgcaacactacatcatcaacaacgggaccacaaagaataccatcttttgtttgactctcagcaaaactcagaaaactgattgttgtcacacttgaatctgccttgaacttcattgagaatttcttggctgagcctgtgcctttgctgggaagagtgaaattttgaactgttgaccctgcttgggcagccacaaaaaaatcttccacacatgagttgttagcatctccaagtgtgaatcccaagctataactcgatccctctttaaggcttgctgatgtttgtattccggttgaaacaatctcgattgcagcattgccttgtgggacgaaaaagtgctttgaatctatgtagtttacagttcctaacacagaccactcttgcaacggggattgaacaacacttggtgctggttcaatcaatattccctcggtagagctgctaagaaattctggaccatattcaaatcctccatttagcagtaagttttctgcaagtccaagtcaaattttgaaataagcttgcatgattaattactataatatgttatgaattgtagttaaatttatagaattgtaccatttccttgaactagttttggcatgctcttaataagaagctcatcaattacaggccagcagatggagctggtattggagtcatctgcttggctatgaatcacaagattgattgactctccatcaccccagcttcccaagtaatggccatagctttcccaagtctccttcccataaggctgcttcaaagaaaagacccctttactatctggtgctgagattactatatcagcattatctgaacaattctgattctgatctggtggtgcaattgtgaaggtaagcacatagcgcaagtgatctgcactggcaaggaatgtctggttgattatgccatcttcccccagttgcacagcatgtccattatttggtaatgaaatggtctcatcagctgtgacatacaagactgtgccttcgaatgtccatccgggaattgtgttgtttttgttaagtaaaacaaatggggatttcgaatcttttgggaggtttgatggtggagattcaaagctcggattctgcagaagatctgaaaatgaaaacaagatatgttattactactactacatgttgcaaaaacttaaaaagagttggtcaataatatcagttaatcaatccagcaaatggttcttgttggagactggaaatatggaactgagtttacctgcagatgctaatgtcaataagagaagaggcaaaatgaagacttggagttggagtagcattttttctggtagaaatttggtaaggaagaaaaacccacctaaaacttcttcctagtggcctgagttttggtcatgattatgactttttaggttcatattttattatgacacctgaagtggtcaaccgttcaaaaatcaaaatggggtgtcagcacatgggctcacaataaaagctattcacaacccaaataacagtgtttttttaatagcataaccccacaaaaatgttataccaagcttacaccacttttcctttaagctcctctgtttcatcacagcagttattcattttcattttgaataataataaagttattcatcaattcaatctatgaaagataaaaaatgaagtcttgatcttttattttctaatacagatcaatcaaagttatggttattcccagaaatcttcaaaatgctgttgggtacaaatcatcaaacagttagtggacatcacccttaactacctaatacatagtaacaaaactaacatgtaaaaaccacaccaacacaacccaacccaacctgggtctgtactcgtttgaaaatttgaagccactgattttggcgttgcctggaacccaagcaaactaataacaaaagaaaaagatcaaattttgttacaaaaatagaaaagacaaaataagtttttagtaaattgaaaactacaacgaaaaagtttgtctttttgtggattttttttgataaaggaaaaaaaaaagaaagacgaagagaccgattccgtacctcgagttgagagagtcactcatcactgatttcgtcataataccactgcgcttggtggtaacaacaatcgaagattttgataattggttttttttttttttttnnnnnnnntattcctattaccaccaccaccacctctctctctcttactctctttctctctgcgcagactgagcggtcgaaaaatgccgggcgttacaggtccatccgattattcgaaagagccaccacgacatccatgcctccaaatcaattccaaggtcaagtcttttcccgatttcattatgtgtgtttatatgactatctgcgattctgggtaattggatgaaagtgaaattggtatgcttggtgtgagatgaactctgaattagaaccaaaaa

SEQ ID NO: 69577 - DNA, 2481 bp, Cannabis sativa
aattaaataattaaagaaattgtaataatgagaatagctgctatcaaaattgatggagaaaagcttcctggttgttctgtatcattttgaactaacacacactttcgagaagaaaatgggtaataagtttaatgactgttattcatgcaaaatggggagaagtgttctataatttagcattttttggtcatgtttatgttagaaatattttattcttaatcacaatgtctcgtatgttatgggttagttccatgctaacacaaacatcttcatcaagccttcaccgtcagttttggttgtagttttctcattaaccatggattaaaattagcttcttaacctgtcataaaatatgatgacttgcaggcacaggatacaattgctgctatggatgcctcaaaaaagtcacaggtagcttttacagctgcaagcttggcagaggccaaatctgaggaggttatctcttccattaagagggctcttgattttaatttccaagacgtcgatggattgctacggttggtacggcttgcaatggaggccattagccgttaaagactcaaaagtggttgtggactttttaactccgggattcaagataaacaggtggagcaagtagcaagaggctgacctgatctatgcaatgacagctctctctgtccatgtttataattttttttttatttgctgaagatcagcttattggcatgcactgcagtgccctgaggttgtttgtggtatattgattcaaggcttctgcataaaagattctgagatcatcccgattggctgatctgtttcatccagaaggagctaaagattttcaagaaaataaataataataatgaaaaaaaaaaagtggagaattttattataggtgtttttttttttgatccatactggtggcgacaacccaaggattgggagctgcctgatgcataaaccatctagctttacttactgcgaagagaatttcaaaaactgccctactaacatcacttgaagaaggtaagagatggcaatttttttgtggacttgtcctttagtttttctctttcaaactactatttttctaattttctttcagttatgagaattttttcacttcatgcctttctatttctgagttaatatatatttactgtgcaggttattgagtttctgttattgcagtagcgagatttgttactctatttttatagatacagttagtaaataagtccacatgatatagcggggaaataatgtccgagtgtgtagctcccatcacaggtgcctgctttacatattaagattaaggtttgttgtactgtaatcatgaaagtttgcctctctatattattctattaaacatctcttaactttctttttttgcctctgcagttgtatcatgtacatacagaatatattgaatcagattagtctaagttcagcataagcttctcttcaaggggaccaagagaacttcaccaatgtctataagaaaaaaatctgaaaaactgtttctgaccccattcttattatttatttttttaatcccactttctgcgcacaaaaacgccttctgaacagaccccccctatctctctctctcttatccctacccttgtttcaccttgactgccattccttgaaagagttggaatggccatttagcaatggaccttggcagagggctgactgataacagaaatgagagggtagagggcactgcatgttgaaagaaagagcttttgtcactggaatattctctctagttctgagtctctgacctcacttttcactttttgatgtcaagaagagctggtgataagcctatttgatgcagaggtacttgtagttgtacaagtattttgttaatttctcttcatctttccatctaggggttgtttgattgattagttctcagtttttgtctttggaaaactcagtattttgtttgaatgactttcaggtagacacttttgagacaggctgagaatcagtataagagttttttcagaggataatgaagattgaagaagtgctttaatgggataaggaacatgtatcaaattaatgcttcaacttgtttaaaaaagaaaaattaataacattaaatgaataaagcaattagaaatgtactatacccttttgtttagttagtttttatttcatcaattttaaaatgactagtagtcatcttttagtgacttgcagtcaattttctgtgtaatgtgtcaaatattttcacacaaaagttattgaaaatagtaaagctcacgagctcatgctgtctaaaagatcattatgtcgtgttatcttatttcattaatttgaccaagatgatacgtggctatagttgttaggagagtggtggtatatcacaatattttacatgtttatttatttagtaagtttttgagtgaaagagttgaataagtctttagttagtttagctttgtgtatttgggttagttgttaaatggaaggctgtagaga

SEQ ID NO: 69578 - DNA, 6934 bp, Cannabis sativa
tttaaaattaaaaaacaaaagtggttattacacatttttattttttaaaaatataaattttacttatatttgtaattaaaaaattaaaaaacaaaaatattaccgaacgcctctaatacatatcacattttatataacatgtcacatacattttatatagcatgtcacatatgtcatagtagtatgacatttccgttttgagtttaagtcttcgttattttgtttttgagcaccttcccgaaaagtctcatactaatagaataagtaaaatacttatatcaaaaataactctcacttattcttttgatgtaagatatacccaacatattttaatataaaacatgacatatatatcacatttattttagtttaatatcatattatttgttaaacaacaaataatatagcaataatatatattctatcacttaaaagaagtaatacattctccattcaagaacttatacattaaaacggatattataaatattatatatatatatatatatatatataaatcagtctcaaattattaaacaaaatcattgcgacccattattttataaatttgtttatatatataaaacatcacaaacatatttatggactaattaaatatttatatatataaaggtggtataattaaattatattatccaaataaatgtataaaaatagatcgtgcatgcattgatatatacaagtttatagtgaagtaattggatacctctattctactttatgcaaacaaatcaaaagaatcttctcatcttattttgatcccttctatcaacatctcccattttaacatcataactactctttaatatcctcatctactcccaatttgtatttatttatttatattctagaatatcaaaaacaaaatgaaattaattatatatgcttttaaaacgaaaagaaaaatttcttttttcaaagagaatttcattgaatagacctccaccattatattcacatgcttgctttgagaataacttgaaacaaaatgctatctactatggtatggcttctcggtgcaccaaaaaatacttgactttaaaaccatgatatttagcatagaattagaaaaccaaacagaattttgttttacttttttcatgatgccttttatctatttggagtgccttgtagagagagagtaccattggaattgaaccctagaactagaagccgaaatcctccgtcaacctacccaaagttactcatataatgaattttaataaggtagcgcattgtcattacttaataatattctataaaattattatataaagttatattgatacttaatttcttcaataataatatgacatcgtaaagaatattaagcaccactgatatcttttagcattttccataaatttaagtattgcgatctagaagtgttagtgtcatgaagcatgtttgtaaggcccaattttgaagttaggacgctagttaggcctagatactaatcctaattgcaccaaatatcgatataacacctaaaagagtgctaaacactagtagtgcctttaatatttctcttaaattatataaagacactgtcactacaagtgttgtttagaatttatcaaaattttagctattgcaatctggaaagcaacactaatgcttagtaaattttgtaaatccaattgttaattattttcattcttgtggtgtggggttgtgaagaagagcattcatgggatttgatagattatataggagaattttacttgttcattctttgtgttctttgtgttttaaacatcacttatattattaatatttctcaaaaaaatctaagctcactcactaagtgaaattatgacctcataatcttttaatatcaacaatgatggaatcaaagaccttcattcaatccttttattctaatagtataatgcaaataataataaaataacaataatgaattccttaatgaaaacaaagaagagtttcactcttctagtatcacaacaaaacaaatcatgcctacacaacactttcacattccaacaaatatatactaataaataaataataataataataacaaaacaaaaaagaacattaaaacattacaaaacacaaatttaacttgtataataataagaaaaaagactaagatgactcaaaaacaaactgcccgagctggacatttaattaaaaaacaacacaccttcaacactttttcttctacttcttgtttttgttgtagacaaaagaactaatgaataaatgcacttaataaatactaagaccgatgactcaattaaagaagaccaaccaaatgaataaataccatttaagttttttttttatctttttttttttcgaacatccttaacttgactcggtttttgaggttccgttaccaatctgagactgcgacgaggcttgctgttgatgttgatgttgctggttgttgaattgattcgaatgagcctgctgctgctgctgctgcatttggtacatttgggggttcattgagagctgtgacatgcacttagaagggatagaatctgcaccgagctcagttgtggcgattttcaatcgttgaacttcggccgttaaggcttcgttgagagctgtcatattcaagcacaaacatcaaatttaggtaagaaaaagttagcagtactagaaaattcattctcaatcagggctaaaagcaagagctcagcgaatacctgatcgaaaaactaaccagagaagaacttatataatattaacttctctcataatcttacacactttctctaaacataatacttctccaactgaaaatcttggtaaaagttggtatgaaaattttaaaaatttatcaaaattaggtatttacttaaagaatactattaagaatcttcatcgacacgaatgcaaatgtagaaaatcatgattacctattatttttttttcctttaattttcttcttttgagtgtagcgtaacggtataacctatttactaatagcttagaaatcttaggttcgaacccgtgtcctccccctttttctcactccaccctaaccactaagctagacttattaggggctatatcaacttaattaatttaatatcactaagcatcatttagaataaagctaaaatttgtaatgtcaaggtaaaagttaatgagcatataaaaaagaaagcattttttacacaaaaacaacatgtgaatgtattttgattccaaacaacatatgggtaacaaaagaaaaagattacttctccatgaactagagagcaaattagagatttctgtagacatgtttcccatataaccgattactgtctcgtcgatcaagttataacgagcaaaaataattgaatttatagaaagaaaaatctacgaggaagcaacataccatctcggagttgtgcctgctgttccatagcttgaagacgaaacttcaactcattattctggttagtgagcccaacagaatctctctaagaaagacaaagacaacaattaaaaaaattagtgatatgggaattgagaaaggggtatgtatcaaatcaataatctctttgagacaactctctggtacctgcagcagtgtaagttgtgcagacaatgtggtagcttccgtttgcagagtctgaactttgtgctccaactccgaaatgtacctcatcttcctttcttttgaacgggcagccgattgtcgattagccaaaatcctataatgtgattaatatatcaacaaacaataacaaacatgttgaaaataccgaaatgaagaactaagtagaaaaatgtataaccttttggcacgctttggatcggtcaatgcaatctcagcgagtttatcattagccattattttctttagctcagcgccactaaactccccattcccgaactccaagctgaaagcattggagtttccatccatggagtcgcttggggaatgttgtccactgcgatttccttgtgaaacttccactttcggggattcctccccaaagctcaacttatccatgaaactatccatggaaacgctcctgtaatgccttgaggttggagcaatatctccaccagcactccttttattcgaacttgatccagttctcccatttgcactgctttcagcttcattatcgctactatcaccaccattagtcttagtcccgctcgctctactatccaaatcttcgcgattctcagtcccgccattcttgtcatcattcccagaagaattcaatgcatcaatactttccaagttcatgtaagccgaaaacaagtcatcaaccacttcaccctcagatttcctctctcccattccttcagcattgctttcaccacctctttcccaactcatttccttcttcaccaactgagccgggggctgcttcattacaaacccggagctctctcggctcgacatagaccgctcaaagccactggaaactcccagaggagtaaaagggggtgatgaaaacccaaatgggatatcactgttcgaccgccggtgagatttccggggaggcaaactctccccaaccctcggtgaactacctttgctgccaaagggcgaagaaggcggcaatagcgcatgggaattagagtccctgtcctccatggccacgtcagccgataattggtcggaaattgaagtcgacggcgagtcccggtacggcgaaggactcaaaggagggagtgaatcgagagagaaaaaggctggttgagacaaagatcgagaatgagttggtcctggattgaaattctgagaacccatttgttggttggtcggacgggagactgggatctgagaatacggtgaaatgggtgggatctggtgaggatgtgagggtggtatacccactctcttaccactatcaccaccattattaaagctttgaggaaaatgccgagaacgaaactgtgaagggtttaattgaggtatgcttagttggtctacggctaaaggttgtttcataattgatgaagacgaagttccaaacgaagattgaagcctttgaatcctttcactatgaacttcttcagtgtcacccatttcaacttactcaaacaaaaccaatatcaccgactcctataaatatatctctgtatatatatatatatatttatatatatgatcgatactcaatataacaaaaaacccacctcagaaaatacttcaatatccacttcaagcataacccacttccctcttttcccaaataaaccagatcaaattccaaaactctgcacaaaaatcaataaacccaagaacaacaaaagctcagcatttcaccatttacacatacacaacacaactatcttataatacccagtcaaagaaataagctataaacaacaatggcgaaggagagagagagagaaataggagttaccttaagcaacacaagagctgactattgttgtttgtctgccataattggcggaagctcctccaaatctaaagccgacccttttaaccttttatatataattatattatacaataacaataattgtaacaatataaataaattttttcttttggcggaaatgccaaagatctctctctctcttctctcttctctctattcactctatctgaaactagcttttttttttttttttgtttggtttggtttttctggtcaggggtttctgagagaagaggattagcactaatcactgtattagtaattagtattagtattaatattagtattagtattttgccacggatttcatgactactactacttctactatcacaacgacgcgtgaaagtgaatttaatttaaataataaaataaattttcatttcatttgcatttcaatttcattccgacctcattttaatttgaatttattcaacaatgcaaattcctaattaagacaattttatattttttaaataaataaaggaaaataaaatgggaaaatcctttctgtaatacgcgctttttaaacgcgtgtttttttaatatggaaaatatataatatattagttgtattttttttttcacattttggtaaacaaaagaaaaataataattaagatatgatattaatttcttccgacaaaatttgatttgatatctaatttttattggagggacataaatttgaatgagaaaaaaaaaatagatttttttttcattacaatatttgtcaagttttttaaacggtttttttttttttaaaaaaaaatggcttgttgttattatttattacttttttgttattagatatgaaatctttttagtcaacaaaataaatcgaattgcagatcttatgccttatggatattatttatagtaaatttcctaaaatattaaaaataaattgtgaatttcgttatggtattatatcataaatcaaaatagtctaattttttttattaattatagtatttatatttaattttttaaaaaaaaaaatcactttatattaggttttaatgataattcctaattatgtaattttaatttgcgtgtttgttaattaagttttttcgaatattaaaaagatctagaaacaagacaaattagatttattaaaatactgatagaaggaaataaaaaataaatattaattttttttaacaataaataatattgatatattttttttaatgaaaaatcaaactttataaaaaaaaataatattgatatttgggacaaagaataacgataaatatagaactagtactcaattattatattttaaagacaaatgtcatattattagtataaataaaagagttttgtagggtataaataaaagaatattccatgtgttttagacaaaatactattttctctctcaataattaatgtgtataaatttcatttcttgctaaataattttttggttgattattatggtaaggagacaaatatggattcaaagtgagatatattatcaatattcttatatggtaatgttccatatt

SEQ ID NO: 69579 - DNA, 3921 bp, Cannabis sativa
ttggaacttgttttgactcacaaatcccacctaaccaaagaaacgtttttgatatgttgtcgttgatttctaggatatattcaatttaattttcctgtaaatactctattgagcggggcatatattttgttactaaagaaccatgcacccgaaaaacctcaacttctgtggaacagatatgagtacctgccagaagtgtttgatgcagctcctcaatccttttaactaaattaagatatgccactatagtttgagggagacccttcaatcaaaagagaagaagcatcaagagatgtagtatccggctgggacccccaaccattctaaattgaagatcccaaagctgggcagtgaagaacgaacccacagggaagtgcagaagcaataaagcaatgaagagcagaaccagacgacacctcaacacagaaaaaagaaaaagcatagacttttagcagtattcttcaaaacaatctctcaaacaaagttatggtaattaccttaaaattcttttacctacaaactattttgcatttgaaaaattaaaccagctcaaaataagaaaggaaggaacttaaccaaatcagacagtagatgctgagggcgttccccaatttaaacagagttgtgcgaagccaaatacactacatacactcaatggaagtaccacttaagaaagccaaaagttaatacatacgcaaccttcaacttctgcttcgtcgcctatccctgaggccattgctgcatggcggaaatgcataaatgaataagcaatgtaaccataaacagtaatcaacgcaggacacagatttctatttatgatgaaaccactttcaaaatccccctaaaaaaatactaaagaagaagattatgtaagtcttcagaatctagaaaataaataaaattaaactgctcaaaaacttacccattggcatatggcacctcttctcgtccacggtacggtggtggtggtgacctgctaaagctgcgtccacgaggagaaacactacgacgtctaggtgaacgtccacgaggactatagctcctggatcaaaatcatgagcaatgtcaaaaagcacgagactctaacctatgttagtattgacagttttcaggtttacaatcttttgcaagcaaaagaaatattaacaagacatgaaaaaatacaagtatcaacataaaaatatgaaaagaagatgacaacacctgcgaccgtaactaggacttctgcgatatctgggagggctgcgactgcggcgtcttcctgaaccaccacgcatacggcattctcgagcaaaatgaccaggctcaccacattcatagcacttcaaatctgaaccaccagaccgaccaccacgacctcctcctcgtccaccgccgccacctcctcctctagagttatgagaaagctcaactctccagccattcttacctgcttaaaaaaatataaaacgaaaaaacataatcatgaagtgctataatataatatcaaaacccaaatggttcaatagcaacattgcaacaagttccacagaagaaaagggaaaacgtggtcagcaatacagggtactgaaaaaaatttgaaatgattaaatttggatatacacaattaagcttgccagagtatattaaaggatacgtgcacccaaaatatgcacaagcattacagagggatgtagcaatttttctaaccaaacacatttatttaaactgggaccgactattataaacagtggcatcacatcaagcctttttctaaccaaacacatttttaaactgggaccgactattttaaacagtggcatcacatcaagtttccaaacaagtaatagatattaaacataaatgcctgttctataatgatcatttaaatttggttgtaacaatattttttaacaataatagctcaggtcatatttgaattctaaagaaagaattgaaaggaagcaaagagtgaaagagatgaactggagatacttcattcactttacaaggactttttaattgaactgtgaaccttgtgcaatttcacaaactgacaaaacatattcatttaaatctactaacataaaagacaaagaaacgtaataaatcataattaagcatgaaaatatttaaatttgtagaactaaaagaagaaaaaattgttaaaaaccatttaacctaataggcaaggtcttgcaaatatatacatggcacgcttcatatacagtagatataaattcattttggattttaaagcaataacctgatgagaacaccattaaggaacataacaaatagcataaaaaagtatataaaacctcctcataccatccaattcacgtatagcatcctctgcatccctactgtcatcaaagtcaatgaaagcataaccaggaggcctccgggcaacccacacactgcaagtttatcaacgagaatcagcgtacaaggcttacaataaccatcgaaagatagtgtattagtctcataactaataatcgatatcatacattcacagtacaacagttgcatacccctccaagaccaacaaagtgtatgaaactataaccattatgatgcataatgaaagtatctccttgggtatcataacataactttccaacacttgaaaatttcttaaaattaaaactagttttaaactctcaagtgccacaatttagtgaaaaacttctttgtttaacaattacaaatcacttgtattacagaaaatacacaaaaggtgaaaaaacttaaaagtaataatagtgaataatttagataccttctaatcactccaaaagcacggaactcatcttcaagatcacgctcagttacccgtggacttaggtttcccacatacacacgagacatagttcaaacttcaacgggatctgtcaacacaagtaaaaagacaatgaaaattcatatcgagtataaagctatacaaaaggaatatgacattagttgaagttcaaatacagtaagccaaattaacaaatgtatacatataagagaaacagattaataacagcattaacatcctattaaatgagggctctttcaaataaaaaatgatgggaaggcttaaaataatcaaatttttaggtcttactcttcgttatgaaaagagtaaagtgcaataccaagttcaggatgcaaattaagaacaaaaccctgcgatttttatacagacaaaaattcggagaagaggagcaaaatacagtacaagtaaaacaatatggagacaaagaactacaaagccctaaacatctcagagaattttcgatggagaaaaaatttaggcaaaactaccgcacgtaaatgttgaagaaggaaagaggaagcagttgccaaaacaatggaaaagatataaattaaagttctttacctgatgatatggagaggcgaagaattgagaaaaccctagcagatttcaacggaggcagactgtcccgagtttttcacaaccgagctttggggcttggattttgggttttataggagagaccaaattacccaaccagcccttaaatactggtatattgatttcacccactaggtcaagttttcttttatttttgggctttttttcaattttaaccaaacaagttactaatattacaaaaactagtaaacaaccgcactttgggacaatatatttaaaaaaatttaaatataaatataaaataaattgtgtcttttaatttatgataactcaatggttatttataatttttagtcctgaaattttgacctatgtattagtgtgctcctaattttttcagtacattaaaaatagttcctaaatgttatagtgtgaattttttcacctagaaactcgagaccaggctcccataagtatgacatgtggactcactctcctcgagaagggctgagatgtcagaaggagacctattgagtgtaaacctcgcctgaacc

SEQ ID NO: 69580 - DNA, 2353 bp, Cannabis sativa
ccactaacttggacttattacatttttggaaagtttgactagtaaaatatgaaccatcatcaacatgtaataaaccaaagcaaagcaagaaatgtcaactttgattgagttatttgcctataaaaagttcaggctgccattttgaaacatactcaaataacatgtgcaaccatagagtatttccacccatatagtccaaaatccttatacaataaataaatttaagggtttagttagtcttctgaaaatttcccttttaagtttcaaaaatcagtgatttgtttgtctaaaatgtacataaaattttcaatgaaaaccaaaccaggtgtcattgttgaatttgcttagcgtaacaggacaatggtgtaaggaacaccggttcagcaggcataattctagctcaaaattgccttgagatctagttttatataatctcaatgtactttaacattaggcaaatatgaaatcaagaataataattaccttcacatggaaacttcattgtgaaaccatgatttttgctttctttgttagtttcagattcttggaacagggaaaactaacagcttcttgttctgtcagaaagagaaaataatgaataaaaaactatcacaatagaagtatatgcatatatcatttcccaccataaccatctttgttacatgtgatttcagaagtattcagttcaagatcattttagatttttagtgtctctaacaatggctacatagcttacatatttgaatccgatacagttcattaaatctttactgatgccttaggctaaccaactcaatgtcgaataggagtgtcccaagagtagagccttctccatttgcgagacgagttggattgaagatggtggtgaacaatctctgcctgtcaaaaaactggaaaagtaattggatgaaaagctgttataggaaggtaagaaatctggaaaacattgggattggatcactgatcagtataaacaagtgtaaatgcaataacccctcatgttaattttctaagacaacttgaaaaaaaccatgttttcactgcaattctttgtagtttgtagtcatcaaaccattcctaaagctgtctttatcatggtaagacaagagagaaaataacagcaaaataggaaataggaaataggaaataaaaagaaaagcaagttcattgatgatatggtttcaatggctaaaatttgaagactaatagaaagaatgaaaggatataaaaacaagtacattaggtggtagaggttcttgtgtagtgctttgatatccttgagatggtggaatgataaccctacgaataccacctattttcattgatttcacagctgcttcaatccctgaaataacctacaaaaagattttgagatatatagagaagattgagtatttactttcataattccaacaacacaatgaattgtataccattcaaccatgactatatttgttatcttactagccttattcaatctttttttctcaagtaaacaatcaccattatcataagtgtgagtgaatgtgtgtagtgaaatcactttgcttcaatatcagaactgagaaataaacaatcaaaaatacacaatgacacaacaaaatctgttggtgataatttcttcagaaagcttgggattccttatacaagaaatcaacatcccactttcttattaatcgaaaagggaaagatgtacaggattatttggactacaagatcaaataagattatagaacacgatttactaactaatagtaaataaactgaaattcatttccataattcttttagttggtttgatagacgcaactgtctatattgaactcataattgattaaagctagactttttatgaactcattgcctaaacacaccattgaagaagatattcttacaaaatcaacatcccacttttgtatagtcaccaaaatcaattttggataaacatggttcccatcaaattaataattaatgtacaagaattgcatacaatattgggtggcaatgtacattaatgaaattaaataattcaagaacttacttttccagacccaaggatgaatacaaaaggacttggttcaccattttgatctttatgttcatatgttgaatcaaaacgccatccttgtttagctgccaatcttccatagtaatgaattgcaacctttcaaaatcaaagtccacattctaaattcagatgggaaacttccatataatcaccaaaaacaaaagaataattaagatttttgtttcccgaattttgacatgtaacaaatcatgctcttaaacttttaaactgttaaaaattttccccaaactaatcaaatgattcgatttaaggacttctgtataa

SEQ ID NO: 69581 - DNA, 2225 bp, Cannabis sativa
  modified_base (2196)..(2199): a, c, t, g, unknown or other
gacttttaaattattaattatatattattgtaatcttaaaattttcacttcattaaaaatggttttcaaaccgaactattcacaatcttaaaatagttattgagaatgataacgagataatttaggctattgttatatcagtgttacataatttttttaaaaaaataatttaaatttaattattttagttttgtttaaatattttttaattattaattaatttttagcttaatggttccttaaaaatacatatttttttaaaaaaaattagattattacacctgtaaacactgctagtaatataaacatatacgtcattattttgtttacactaaaaatacataagttgatgttatttgtaaccactactatttcaaaaagtagcaagttatatattgtgtcaccgaaaacgactgttaagtcgttgagattttgaatgtcgacattgcattgctcattaaagatataaaaactatgtaattggattcttctccaaatttccccttaagtttgggaacagaatattatgacaatcttgggatgttgtaatgtaaataaacaaagacttaggaatggaagaaataaaccaattaattatatacattaaataagaaagacttgacttgagctaaaatatattaatcaagtcaacgttatcgttatcgatttttcaaactttacacgtatagacggtataagatctatagcaacaccaacatgtctaatgttcctttttcacatagtcatatcaagaattaataattaatgataagacacatatccactcatgatgataattatgtagtaatttaattaaggtcaccatataaatataccattctatgggtgctgctatcactcttttctactgtatttcgtagatagatattagcaatttccctaagtgagaatgctaagaaatttcccacaattagtattttatacgtataaaataaatgacaacttggaaaagtactataaactatgatgtctaagccgtgacagttctgtgtattatgtcatattagaaaataaaaatatataacctaacctaactttcttaggaaacttccatataacaatatatttatacacatacatttacatgtacctcttttaaattgttggctattagtgcatatactctgaaacgctctgtttagaaataaagcatgaagaagaaaatcttattagcaatctcaaataatattcatgtacatgcactatgtaatattttgaatcttcttctcataatgaccatatgtattagcttcttatctatgttatcacaccttcaaattagtatcaactctacttacaacctcgttgtggcggtcagatctagtcacgttgcaattttcttcatctttaatgtaatttttatcgcaattttattcggaagttttaagcgttttaaagattgtgatcatgtttcaactttaccactcaaagattatcatgattatcatctagtggcagcaaaagcagacaaggattatatttatggtcttgatgataaagattattatagcgatgatgtgtactttcatggttttgatgatgatggctatgatgaagatattgatgaagatgataaaagtagtgatgatgatgatgatgatgaagaatggctattgggttgcaaagagaaagatggtaatgatgatattgaattgcagaagagaagtgaagaattcattgccaggactaacttaaggtggagagaagagttgaagaatgagaggcttcttctatgtatggtaccatttactgccactgagatactaacttcatcaagctcttcctagcttcagttccaaataataaattaattcctatattagtatagtttataattctatatgcagatatatattggacattgttgtggtagtgatagtatagtaatggtagtagagtgtacatatgtgtgtattaatctagctttgtatgtcgactctacccgttttttgtttcccctccctaaaagatttttttttttttttaaaaaaaaaaatatatcaagctggggaagttttttaatggagtttgatattctagtcttgtaactgggaatgcacagaagtttttttttttttcctgaaagggaaagcacagaaatgtgtggaatctaaggaggagtttggttggaggaatgaaaatatgggaataggaatgagaataggaataggaatnnnntggaataaaatttaaaatgaataaaa

SEQ ID NO: 69582 - DNA, 5804 bp, Cannabis sativa
  modified_base (29)..(38): a, c, t, g, unknown or other
tgtgtttttacttttatgcactgtttgtnnnnnnnnnnttctctggagttacagagttgtattctgtaattaggaaaaaactgttttcagtttcattattccgcatttagttaatcatttaattgaataattaaattgggaatattaaaatacggaatttcacaatttttataagatggtttttccaaatgggtgtatataagacgattcaatttaattataaccgattgattaaattacaactgaccatcaaatattggatatctaattaaaatcgaattggattagatgttatttttgaatattcaattgggacgaatgtttgtattttcatttagtttgagagaataattaattttatgttaatatagttaatatatatatatatatttatatgaaaattaagattaaaagtttactgattggatggatctaatttaataaatattagatcaaaaatattgaataaatctgatctaattcaaaatattaaataattctgaatcaatacaatatatacataaaatatatttagtggatagaatcaatctaattcaacatctgatcgaataattaaaattaattggatcagatcaaattgtaaattttaacatatagtatataatagattagataagaatgcgatacaaatacaataaacatttcaatgtgccttttttattactaagaattaagatacacaaaaacaagaaaatatacatatatatatagatacttatattatatatatagtaactcctcaaaacatttccctcaagaagaaagatatatgaagaaaattacattacaaacatgagctacacaaaactcaaaacaaaaatgatgtaaaaataaactacacaaaactcatacaatataacaaaagtctccaatattgagcgtgacacaaatggataatatttatataattatagttacatgtaaagctatatatttatgctgcaaatggtactctaagaaaacgccaaggtccagtcccagttcccatcctgcaaaagtaacgaaattctgttatttttcactcataagtgaagtaactcataatcttataatatttttatgtcgacttttctgtcctccgatgtggaacacactcttaggtacgtacctccaaattccggcgaacattcgtagtcccatgtagatggttagggcaatccaaattccaacaaaaccatggctttttgacaaagtaaataaggctgtaatacttgctactgccaccaatgcctaatcaaaataaatagaactatttcattagctcttagtacaattcttattctactatgaaaaatgtccaaaatctttaaaatttattagctaataatagtataaatttattagctaataatagtataaaagtatatgtcaagtttgttttaatttgtgtgtgcagatataattacttggaattgttttttatttttatacttcattttttttgtttgtatatttttacaaaaatttacgtagaaacgcatatagcaattaacatagcaacttaaatcgtaatcaaaatctacataacaacctacgtaaaaattaccggagcaattaccagaacaactcaaaccataaatttgtgaaaaaaaaaattaaaaaatagtatacaaaataattcctctaattactcgtataaaaatagttcaatattataaattttaccactcaaatgtccatgcaaaatgtctaccaaatatatactattttatcactaattaatattatttatattaatttattcagcatcttattattaaataattctgttaatttttttttgtaaattaatctaacaaaatatattaaaacacaattataaaaattataggctaaatttggagatagtgttaccaaggaatatgcagagtatgcaaagtcagaggcaccaaagttgacaccatcaaacacaaatgacaatgaatttaggggctgagtggctgcaacaaactgtatacatacaacacaaaattacaaaatgacacttttcattaccaaaatattttgtattagattcaacttcaacatatatatatatatatatttgtatgtatatgtgtatatatatatataccggaagtccaattcttatgaggtgcaaaacattaacatctctagtgaaaattcctgctccaaagtacaaaccaattccaacaaggaatgtgagtcccacacctagaacaaaactcatctgcaataacaaacaactcttataatatcatcatcatcatcataataattgtgttaactaactcattttgggtattgggcaaatgttaaattttttttggaagaaaatttcgtgccaaatgggttacggccccactcgccttactctaataaaaccgagtttgagtagtagtagtacctgcagtacacggttcgctgctgctgtggcttttgcgtagtctttttcggcaaatgcacaagctagaatagcctatagaataaaaaaaatagtagtgaaaataattagtagtactaatataaaagaaaaaatgttttaagtgttatacactaattaatttaataatgtaatgatgctcttactttgtacactcaaattacaaaactgtgttttaagaacaatttgagatttcgagtcaccatcttgaagggacatataagagtcttacatcgaatataaaaagtgtttgtttaagtagttaaagaaatggtgagaccttcaattaggcctcctatcaaactacaatttgatcaaagttggaaaacttataaatttataagactacagactatttcgtttgatgtcaattggttttgagttggaactccatgtatcttaacaaaaaaaaaaagtaatgtttacctgaatggagacggccaaaccatcggcaagaagagaagatgtcaaccaaacttgtaagcaagtttggaatgcagccataggtgtcgcgccaagccttgcagccaaagatgcagctaaggtgacacaaaatgtcacagctattactcttgctaacaagaaaccacctattgtttatacattccaacaaaatttgagtgagtactaataatcaagggcaattcaaggtgatgattgttcattagggatggggaaaatggcgattttcggttaccatttttaagaaatcgaccgaattgcaaatccttaagacttggaggtaaaaggttaacttttctcatcaaaatcaagaatagtaccaaagccatcaagtacctaaaaaataagatcattcaaaaatcattatatgataacggctaggcatgtatctagggcccactccgtccagaagcccaaaaaaactcaacatatccttaagggcccaataattaacattttttgatatgatgatatttttaggaacaaatgagaaaatgaattcaagaaagatgactttgacttactgagaaagaacatgagcaatggctgcacctctaattcccaaatgacaaacaaagataagaagtggatcaagtgcaacattcaatgaatatcccaacactgtcaacatcatcaaaatgaaataaaaatcataactttttagtaacccatcttagtatattaactaaaaaaccagaataagaagaaaaaaaggtcaaaagagatatatacatatgacatataatggagtagttgtatccttaaaccctctaaagataccctgcatagccaaagttaaaagaacagctggtgcaccaaatgatcttgttactaagtacttctctgctggtcctaacataggagaatcctacataaaattaatcaaaaagacagtaactaatttgtgcttaaagattggatttttattaagggaataaaaaattaatacacacacagacacttacatgtttgactcccattacacccaatagtgttcttgctccaaacataagaaaaattgcttgaacaagtcctaatattatcccaaatatcagagctgttgatgctgaagcaatctgtcttttccctttttttactttggtaattttctccaactttgacacaactgcaatttcatacaactaacttaactaccataacagttaattcaaaactagaaaaaagaaagagcaatactatattctataccattattatcattattattattctctgtttctgaatcatcatcatcattttctttatgttgttctagtttggttggaacacctttttccatgtcatcattaacatgattagcagctttcaatttcatgtttgcaacagtatcttcctcagcaacaaatgaggttgttatgctaaccaatgggaaaatggtaatcctcgacgcttgattaaacaaggcgatcgatacaccggctgcagccagctccaccggtcctaataaaacacgaaaaatactaattaagtcctatcctgtttagaccgatatgaatagattattctgttagtagaaaaccgaaataactagttatagtagacatctcttaccgatatggccaatgaaggctgtgtcgattagagatgcaatgggatcggctgctacagctaaggctgcaggcaaagccatccctaatatttcttttccaagtgaatcccacttgaaaacatgcctaattaaacataaagattgaaactttgattaagagatataataaagattgaaactttaattgataaagattgaaactttgatagtaaagattgaaactttgagtaattatttgcattattattaattaccttgcatctttgaagaaaacaccaataggcaaattaaaattccacttagtagtagtaatcttttttggtatggtatgggaattgttattatctccattattctcagccataattatgtgaagcttattagtaagactgcaaagagagtagtactatatatatagtatataaaaataatattagtaataacagaaccagagatatataaagtatatatactatatgtataatgttattatttttcatgaccatgttcaaatattatttattattaataatattaattgtgaaggttttgtttgtgagagtaaaaccttcctcagttatgttatttaattaactaaacaaaaaaatggccgacccattagagatcaatgatgatgaaacttagtacttggaaactatgccttgaaatgctgatttattttataaaattgaaaatatttggtataatgcacaataatattttaagatgtaaattaattaatataaaaagtacagtattattaatgatcattaataatttaaatatttaaaaataattaataacattattataaatcaaaaaatttgtattaaagcgatcaatatgtgatacaaaaaatttatatttattgatttgttaaatttgatgcaacactatttatatatatttttcaaatttagcacatacataaaagttaattaactacacaatgttagagatcatcacacttaaactgcacacaacacaataatgtgtattttttaactagaattttttttttttttttaaaagtggccacttttatatggttgaattacatcttataaaattatctagaataagacttttaagtcctatatatatatatatatgtgtgtgtgtgagaagttggtcaaagtaggaataaaatcagtgtttaatatataatataaatgtgatgagtgtagtaatgatatataagttatcataagagatttggcaacaaatggctgtattatttatgatcatgcttaaatttttatgcatggttacaaaaacctgttagtaatcatggtctggccaaacacatatatacattatattattaatagttatatatatatatat

SEQ ID NO: 69583 - DNA, 2091 bp, Cannabis sativa
cttcccatgaattgtgaatcctattgatcaataggttgtattttggacttctttcaaaataaataaataaataatattgtattttggagtgagcataaattattctttttcgaacattttaggtaaattaaaagaacgctggtaggaatcacctcccagaaatccaaaaagccatagcgaaagcatgagcagggacattgtctttcctaggaggaaggtatagggttataataatggaggaaggttgggccgctgttttgtaaagtttccttacgatgatagtattgcagaggcagcagaggttaaggttttgccatttacaacccattttttctttcggacctttgaattctttaacacaaaggagatggaaaaaggcagtagattctgcgcaaacccgcttagaacaagacaggacaagagacacccagctggacaaagttgccacccaaatcagaaagctcaacgtcatcctcaagctccaccatctcatcacgcagcggaagcgtggtccttttgtgtccgtacagattatgtctcgatggaggcatcttgtggggatcaacgttgggattggggagtttcttcataaggtcccccatgtgttcgacgtatttactcacccggtaaggcgaaacttgtgctgcaaatttactcataaaatgcttaatttggtaaatgaggaggaaaatgttgtgagaaaaggggaaatggaggctgtacgtcgtgtgaaaaagcttttgatgatgtctgtgagtggaaaattgcgtcttcatgctttgagattggttaggagagaattgggtttgcctgaagatttcagggaatcaatcctttctaaatactcaaaagagttcaaactggttgacttggaggttgtccaattagttggtgatgtagatgaagagttgggtttggctgaaattgagaaatggagagagaaagagtatagagagaagtggttgagtgagtttgagacaaagtatgccttccccatcaatttccctacaggatataagattgagagtggctatagagacaggttgaagaattggcaaaggcttccttttgtgaagccttacgagacgaaagaagtggttagaatccgctcttgtggtggcattgagcggtatgagaaaagagccgttggcattcttcacgagttcttgtgtctgacagtggagaaaatggttgaggttgaaagattagcacattttcaaagggatttctctttgggtgttaatgtccgggaactgcttttaaagcaccctggaatattctacatatcaaccaaagggaatggacaaagagtttttcttagagaagcatatagtaaggggtgtttgattgaacccaatccaatctatgttgctcgcagaaacatattgcaccttatattggtaggttttcgctatacaagagaactgagagctcctgatgttagggtgaacaatgacaaggaagtatgtgaagtaaagagcgatgctaaaggagatgaagattggattgtaccaatgttagagagattaaatcatgggaataccaatgttatagactaagaaggccttgcagaactgttggattaagattcgtatggagttgatactaatgcaaagaatgaaaataacaattatgtacaagacaggagataaaaatttgagagttgataattctggttgaagtttgttgtttgtttcaacagcgatattcctagtggaaataatttgaactaatgatgtatagttgctaagagagacattttcggaaaatatggcctgagaaaacataaatggtaagaaacctcaataaactacgtcatattccgctgttttgatacgatttctttatgctgtaagtatttaatttgccaatctaattccaataggctggatgagatttatcatgtaactgtgatgctacgataagaagctgaggcttctagagatgactttgtttttcaagctgagtctcaagccaaaactaatgagggtgaagctctcatgatttcagaggtagattcagtgctgccatctggggaagttctagaattggtacaggtcttgctctgtctttctttcttttttttttttt

SEQ ID NO: 69584 - DNA, 2653 bp, Cannabis sativa
ttttatttttattttttaaaatagagataataataattctaatagtgaaaattattattattattattatttaaaaaaagggaaactttataataattataattattaataggaccacttctgcaaaatcctgcaacagatataaaacagccaacaaagctataaaggatcaaaaccaaccaactaatagtaccttggtcctggagagagaaagagttaccaattaacaagtagggacatttttctttctttccacatacacatttatttatttattttaatcttttaacgaaagggaacaagaaaaaaagaaagtaataataatacaaaggaggtagtgactgatagatatgtacacgtacatatgatgtataccattattagagagaataagaggaacagacagatttgcagtggaaaaagtcagtggtgaaactttgttgccttattacatgctctttaaaatctaccattctccaaagtagataaaagtatgttcaaaactttttcttttgtaagtattcccccaaatacaatattaaggtatatgtatggatgtatttggtacagtagacattattatatgaatgtatacttttggaatgtgtatgagttaccaaaaatttatattacactctccaaatcggtatttcataaatctttaggtagccttggttggaggtaataaaatggaataaaaaggaatggaaataatctttattttattcgtttgtttggttggatattaaagtattgaaatgtcatttcaataatagaatagcctttccactattttggtgaaataattattccattttaaaatggaaagaaagactattacaatacatgatgaaaaaaatttaataattttttttatacaattttaaattttattctattacattcttatttttattcccattctcattttcattcctatattttcatttctttcaacccaacgccaccttaatttgttagcatccagttcttagtccatttatgaattgtgtacattgtaattataatcattaaatttttttaaaaaatcttaataattataaataatactcaatattttattgtgggtattattttttttttttgcacattaagtaattatttaatttatttttgacattgtaaacgattcaaaattttttaaaaatttgtaggtgattctaaataactacaacatacacgattagaaaaaataaaaataaaaatctatcaaagatttcaaacaagataggaagtgtcccttttaaaatgtattatagacttaccctattataattttaatttttctattattatcattatagtatttattgtagttatatatagtaaattatccacaagttttcaaataaactcccacaaatctacaaaagtattttagtacaataaaatatctttatttttatcctaactttgttgaaaattgatcaattaaaaaattagaacttagttacacattggaaataagattgtgttgcactacaaaaaatattgacacttcgatcaatgcttttgtgggatagtaaaacatagccatatgcgctactaaaatccatggacgtagtttggcggacaaaagtatttttttccaacaagaaaatgatagtgtgaggaaaaagggttgccaacaaagaaagtctctagggtatcagagccataactcatactatcttatagacgagtctctattttacactatggctaatattattgacgaatcctcaagctcactcactgctcctctttcagcccctcttgcacttacaccatctcctacatctagaaaatagacttcaaataaaattagactttttttatgacctttcttatgttcctgatgaaaataaaatttatctcagattctcctcctctcttaaatccatatcaacttttcactaagatctccttcatcttttactagaaccatttaaagcacttattacaccatccttcaaggctccaaaagaatatattcaagcctcagaattcaaccaatgccaacttgcaccaacatcagaagtccaatttgtgactcttgaaatacccctgaactccctccacaatggatggcacagggttacacccacatgcacttttgtactattcacattactctaaattataatagcaggaagagacttccaattagctcttgtattgctattcttgatactcgaatgaaaaaatatcaacatgcaagtatagctactattgaaactactttaaatgcaagaacattgatcgtactctatttcctaatttcaacatgtctcttagagataattggctcactgatgctttcaaagtagaagtgtagacaatgggtgccacactctaatatcagatggcatatcaactccaagaccatgctcttgatcttaacatcccttaaacacaaggcgctttactcatctcagttgattgtgagcaaatactgacctatacacatgtcttaaagcaaatgaccactgaagaactcacaaagcatttacccaaatcgtgtgtcaccaactatgaaaagcttcatgagcaacaactcgtacttcaaaccacaattgagccttcctactacaaaagaagatggatctattgaaattatttttgacataataagtcaaataaaacaacctag

SEQ ID NO: 69585 - DNA, 7925 bp, Cannabis sativa
gcgtgcatgatttggattctttcccttggttggactaatgaatctttgtttgctttattcagcatgtttcctaaatcaacacacgaaacatttgctcagaaattgtaccagacattcaaaagcaacaagcgtttcattaaacctaagctttctcgtacgagttttactatatctcactatgctggggaggtaaggatttttttgttttgtgggttggtggggggatattaaggtcatcttggaagaccaactactggtatttatcctgaagttttgttgctttgtcaggtaacttatcaggctgatcactttcttgataaaaacaaggattatgtggtggcagagcatcaggatctcttgacagcatcaagatgctcgtttgtggcaggtctatttccagcgtcagcggaggaatcatcaaagtcatccaagttctcttccattgggtcacgctttaaggtactaccagtctaccttaatgaaaagttattatattggatgggataagctttagtgattctggccttattatactgcatctgttaaaatgcccattagaggatgcagctatagagtatataaactactgaaatggtaatttggaaacattgaaaaagaaatcatgaagtaatgatatatatgtggtgttatatgtgatggaccttaacttaatttcagagataaattccaaagcaggcaaaaataatctttcaatttaggtccgcacagtagcgtgtggaagttaaatgagatcaaaagacagcataacctgacttattctcacaaaaaataagggtaaactcaactttaattggacagaatgtcgaaatccaatctgaattgatatactggaggagatgagattattttagtttatacatatatattataattagataaaaatgaaaatctttgatcttggtcaaaattttgtcactttttgatttgggaaagaaaattacatgaccttataattcatcttgcatgatgtaaaaggtgcatttgacatgactatgataagctgtgctatttatttttcctttacattgagaatagtctgtacatgatgttgaaattaagtttagcataattgcaaaacatgttattctttaaggtggattgtatatacgtttgctagcttagtggtatcaacttatcaatatctgtatttatgatggttgatagaaaccatagttttgatccaaaactgtatttattaaattaattatgcggccacagtgaatagacttgtccaaaaagaaaaaaatctgactttggactttgtaacattccaaaagtatgccttagttatagtcatcactttttatcatctgagtcaatagttaaaatgatatcatactgctaatcaggcatgaagttgttgtttttctttccttttagatttcttgtcattatatgttcttggacaagtgggtatgatgatatttcaaaaatgcagttacaacttcaatctttgatggagaccttgaattcaacagaacctcactatatcagatgtgtgaagccaaataatgtcctgaagcctgctatttttgagaacatcaatataatccaacaattgcggtgtggtgtgagtatattctaacgataaacccgctttatatcagaaagttttagcattatccttggaatgttgtgcttcagagtaagctttatgtttgccaattctgtttcttgtagggtgttcttgaagctatcaggatcagctgtgctggatatcctactaggcgaacattttatgagtttcttcatcggtttggggttcttgctcctgaagttttggatggaaagtaagtacaggatttttaggttctagttcattccatgatgaagatgaatatacatgttcaatataacgcagagtccattttatttatggaagtcatgatcagccattgctatgccttgtacagttatgatgacaagaccgcctgcgaaatgattttggacaaaatgggactacaaggatatcaggtgattcaatttcttgcgttctgtcttattattttaaatatcaagctgctcaggaggatgatatagttgtgggaagatcccttcatgacccatatgtatgacaacatattttgcatatatcagactgaaggccactccaagtctgaataaatagcttattcaaaaattccaatctcattatcatccttgatgagatttataaacttaaacaagctccattgtttggcaactatgctggttctcatctatgtctcttaatggattgctgtaaggaacttggtatgagtggattctcaggcaaatggggaattgtgggtggggatgatggctataagtggaaattgagaaactagtactttaatattttatcttgaaataagtggaaattttaaattacatccaacactatccttaattgatgataatggcagagattctaacctctattcactttgcgagccttacaatcacatcggcattctaacaagattttttaaggatacagtgatgacaaggtctgttggaatatctgatgcagcttattcaagaaactcagaggaattaatgattgtttctgaatatttgctcttactgtgtgcaagtaactgctaaatgtaatattcaccaaaagttttttagaacgaaaatcccataaaatttatcctgctagttaacttccacacatttgtattttgtgataatttgtctcaggtttccctgatccctaacgtcgtactttgtttaactatcatttggcagataggaaagacaaaagtttttcttagggctggccagatggccgagttggatgcaaaaagagcagaggtgcttggaaatgcagccaggatcatacaaaggcaaattcgaacatatattgctcgcaaagagttcattgaatttcgtcaagctgccattaaattgcaatcatacctgcgaggtattatcttaatttgtagctaaaacactgctgcgctctaagtgcacttgctatttagcctgtttatttttactgtatactgatgcagtttgtctgatttggaactttaagaatacagaactgcattagtgagtcatttttgtttctttgcatataaaactccattagtgtactgtttgctttagtcttttgcgcctcaatttgtttgaccatataaaaattgtttagtagttgacaacaatattcaatggtacttcaagtgttcatgattttcaataatttctttttagcatttggaggtgcctaccggggcagggaaaagcttaaatttttttgtacacttgactacctagatcatgatattcggtgttcttgtttcttttacaatactttgtgggggtatgcgaattgaactttgttccaatggagattgtaattggcttctctttttcattgtaactaggtatttttgctcgtgaactttatgagaagttgcgaagagaagctggagctattcagatacagaagaatttccgactatacacaagcagaaaatcatacttagcggtccgcttggctgcaatcacattacagacaggattaagggcaatgactgctcgcaacgaattcagatttagaaaacaaacaaaggccgcaatcctcatccaggtttaattttagaaaacctagcaacttctagatgaatgtttctcttttgttttagaaagtaataaataacataaaagcaagagctttataatgcattaaactcatgctgtgcttatttctatgaaagttgtgaatatgaagtgattcattgtttatttggtattgtgcaggcgcatttgcgttgcttcatagcgtactcttattataagaggcttcaaaaagcaattatttttactcagtgtggttggaggcgaagagttgcaaggagggagctcagaaatcttaaaatggtctgtcgcaactggttagtgcgccttttgtttgtgtagtaacataaggtgtctcattatatttctctggtgtaaatcttttcaggctgcgagagaaacaggggcccttaaagaagcaaaggacaaacttgaaaagcgtgtggaagaacttacatggcgcttgcaacttgaaaagcgattacgggtaaataactttgtatcacctattggttattgccatgctcttgaaggattgtcaattagacatgaatctgataagccataaaaatcattgactttcatctgagttgcagactgatttagaagaagaaaaagcccaggaaataaccaagttacaggaagctttgcatgcaatgcaaattcaagtagaagaatcaaatgctgcaattgttaaagaacgagagatagctagaaaagccattgaagaagcaccacctgtcatcaaggagacacctgttctagttcaagacactgaaaaaattgattcgttgactgctgaggtggagagtttgaaggtaggcaatgttgtcattgactctaatctctatattatgagtttaataggattgcttttcagtctgattaatcctttgttttttgactgctaagaacataaacatgcttcaggattttagtctacgatcgaggttgggatgttgggttgattctggatacatataatttttgcaatcttataaaataccatttgtcaattttctaaatgttattttatgaactccattaataattacttcttgcatcaattggcttatgctgaattcatgaaccttcgtactgagcaggctatgctactatcagaaagacaagcagcagaagaggccaggaaggctagttcagatgctgaggcgagaactgtagagctgaccaaaaaccttgaagatgcagggaaaaaagtggatcaacttcaggaatctgtgcagaggtttgttaaatttagtaataattgaaccactgatatgttgtgtttgctgtcatgaaattcactgattgttttgaaaacaaatgaaaatactctacctagaaggctatttacattttcgcaactgatgatcgaagtagacctgcaattgttttggcctcatttgtcatatcatacttacagatattatgggtctggtcttgttaaggtttttatataaattaaccatattcatcttttgaaataacctcttacctacagtctcaatatttgcatttctcttctcatattcatacggaaatgtatgcaaacattcacaaatgcacactctggcatagcagttagtttcctatgaactctccaagttggttaactttgactcattgtttatcacaggctggaggagaaactttccaactcagagtccgagaatcaagtacttcgtcaacaagcattgactatgtctccaactggaaaaactttatctgcaagaccaaagatggttattgttcaggtaccaatggatataaagctgatactgtcgtttttctaatttatagaaatgcaggtaacttattttttttcttttttgtttgatttatctttttaaaaccaattgcagaggacaccagaaaatgggaatgttcttcatggtgaacccaggcttgcatcagtaagaacacttattttgtttatcttttttgtgaaaaaaattaccacaactttatctcttaattattattgtattacaggatatggctcttacgacatcaaatgcacgtgagcctgaatcagaggaaaaaccacagaaatctctcaatgagaaacaacaggtgagtgccctttgacttgggaatagttttcagggctgaacatttgggcctggtggaaccgaaagcccgactacccgccccgccccgccccactccgctgctgaaaaggctgaaaaaaaaaacgggactgtaaacctgcaccagtttaaaagttttccaagcacccaaaaaatccgaccagagtgcagcccctaatagtttcttccctggaatttagtttccactctcttttaaattattttatttcatttctgtttcaggagaaccaggacctactgatcaagtgtatatcacaagatttgggattctctgggggcagaccagtggcggcttgtgtcatatataaatgccttcttcactggaggtcatttgaagttgagaggactagcatttttgatcgaattattcaaaccatagcttcatctattgaggttagtatcttatcaacgaaaaaaaaaacaaaaaattaaaaaaccaaacctatggtagtataaattacaacatcttggcagtataaattacttatgccaagttccaaaacccattaaatgatactgatgctttttctttgttttgtttaaggtccaggataataatgataggttagcttattggttagcaaatacatcaactttattgttgctgcttcaacatactctaaaagctagtggagcagctagcttgacaccacagcgtcgaaggacagcatcggcatcactctttggaaggatgtctcaagtacgccatagtttggataaataaaaaaaaatatatcattttgtgaagttagttatcttatgatattgtctttcttctccttccaatatttccttactgtgaaccccagggcttacgagcatctcctcaaactgctggactctcatttcttaatggtcgggggggacttggtagactggacgacttacggcaagttgaggccaagtatccagcattgctgtttaagcagcagcttactgcgttccttgagaagatatatggaatgattagagacaatttaaagaaagagatttccccattacttgggctgtgtatccaggtgattggctgttaagagttattctaatatctatgcagcaattaacctaatttttcttagaaagagaaagactatttttttaattagttggtaatcagtaatcacaaaatttacgggtttgacagagttaatctagccacaaaaataatttgtagataaaaaacccgtttatgatcacataagaattatatcatgctagatgtagataaaaaaaaaactagtttatgatcacattagcgtgacaggtaacttagattgctacaagtgtttaaatttgtggttaattctgcttaaagctgagattttgaaactgaattactgcaaataaaaattcaggccccaaggacatcgcgggcaagtttagtgaaagggcgttctcaagctaatgctgtagcacagcaggcgttgattgctcactggcaaagcattgttaaaagtttaaacaactatttaaagatgatgaaagggaactatgtgagttttaagtttattctgatgttctgattttgtatgtgaaaaaagtacgatcacttaatgccttttggcttttacaggttccggccttcttggttcgtaaagtgttcactcagatattctctttcatcaatgttcaattattcaataggtataccttatatccttttaacatgcctttgtttgactccaaaccttcaaggcttcaactgtatcctgcattggcttaaaatgtttcaatttcaaggatgtttccacttttttcaaagatcacatcacatccataatattttttgcagtcttcttttgcgtcgtgagtgttgttcattcagtaacggagagtatgtaaaagcgggtttggctgaattagaacaatggtgttgcctggcctctgaagaagtgagtatcgttcaatgctgcatgaatttttcgctgcattccatgtttcttagacctgaaatctttttgtgtccagtatgcaggcacagcgtgggatgaattgaagcatattagacaggccgttggttttctggtatgtttgatgcatataaccttttcactactgatatttaccattgcttatagactcagtttattttttgtcaatttcttaacatttcaggtcatacaccaaaagccaaaaaagaccttgaatgaaataacgaaagaactttgtcctgttagtgcttcatctttactaaatctctcattattatttgtctaacattaa

SEQ ID NO: 69586 - DNA, 9772 bp, Cannabis sativa
gcctctaaagggtgtttttgtagtagtgttagcaactgagaaaatgggatccacagggggaaatccctcccctttacaacaaagagtatcgctctcagaatagcgagcacttttagccaatgagtctacaaaggctagataagtgtgattgaaatgaaacaaagaaacattcgagaaactgtgtttaagtttagaggcagccgcaaaccaagaaacacacttccagctgggggatctttcatttgaaaaggctttgaggacaactgaggaatcggatatcagcgcgaagtcatcccaattattcttttttgcccactggaacgctgagagccaggcaaaaacttcagcagctacctcagtcaaaccatccgtagctttagcttcatagaaccaatccatagttgcacggtcccaagccaacattccagcaccaattttgccctccttgaaggacccgtcgacaaagattagacgattagccgtgggcagattctgcaagttcagagagggggaagcagagaccgtttgcaccgtatctcctttctcagaactctgagagaattcccaaaatttcctatggacggagtccaacatttccttgacgttagtatccttctcatcagaattatgccacagagcattccttttactccaaatagtgtctataataactaccaagcaaagaagaaatctggttctttgtgcacagtcaagattcgaacccatctcaatgataaacgtcttcaaagaatcacagtggacaacgtttgtacagagaggaacaggggatccgaaccatacgccagcagcaagagtgcacttcacaaacagatgcagggaattttcttcatagttcgaacaaaagcaacagttaatagaaggaagacccgccttacctcccatcggaagagcacctgacaaggctctccaaagagtcattctcattctcgggtgaagtttgccatgccaaatccacttccatagggggtcaactgagccaaatctccctccctggtgcaacaagtaggcttctttaacagagaagttcccattgttagcttgcttccagataaggaggtcctcattaaggtcagtagcaattttgatagtactgatcttaattcccaattcatctccaaaaagatagcaaagatattcggaattccactgtctggttcttcgaaaaaggaggtcggccactgaccgaaggcccggggccttctcacgaatccactccatcagatcaagaaattcagaataagtcaaccatgggatccaaggttggaaccagatatcgatcaactcccccgaagcaatgatagtacaggaacccgaaagaatgatttttctcgcattgaggattcctttccacacgaaggagtcagatattctttgctgcacagaccagaaagattcccggggatggctttataagcttcagtccagggtcttctaatacccgacgccaaattccaggctagtttggccaaataagcattgttaatatcctccattcttctaaagcccaaaccccctgtgcatttaggccgacacaaagcatcccaagagatagtggccaaaaaccgttgtttatccaaacgcccgttccaccaaaacttcctgataatagcatccaactcccggcaagaagacaacgggagttggtaaggactttatctttaacaaagtgcaaattcagctcaatgtgctttgtccttgcatgacaaattgaatttgaggccaacacacttacactcatattatcacaccatacaatcgagactaatgacggagaaaattacatttctttaagtagagagtactccacccaagctatttctactgagacatgtgctagagaaatgtaaagactttttattgttagaattgttgagaatattattataggatcgcaattaattcacatatctttattatttaaatatcaaataaaataagaaaaacttaaaacatatttctaatgaaaataatgaataaattgagattagatattatactagatgtgtagcaaattaatgtgatctcattctatcaattctttgatcctggttgttgcaaaacaataacaagtgattgaccaggatcttcaaattcagactatgtacttgacttggatacaacttgcttcttagagtaccgagatacaagagtctctccaaaataaacaaagtagcctccaatcaatttcctatcatctggacaacaagcctatatagcatctgagtacgtaaccaaccaaactcattgtcttcagcgagtgtccttggtccatgagtctggaagctcgttcattctcccgaaggctctggtacttaagctgacatgaagacttcacttaatgaggagttggttaagctagttatttctaactaacttaaaaacctcgcttcttgtagccaccgactttaatcttgttcctaagcctataaataccaccttgacttattatttgaaagagacacaacatgaggttcagaactcaattcacaacaagatttacaaagttaaatgtgtaaattgtacacaaactagaagcataaatgtttacaaagttttttggagcaattacaaagaaagaattaaaagtgaggagttagtctgaaccactttatttatttatttattctttgttacaacaaaatcagaactcaatccctctatccaagtaatattttcttattaatgtgtaatattttaatttttatgtagtttaatatttttatatatttaaataaagattgatgattgaaaacagagctaagaagttgagtgcactatttgataactaaataaagatggcagaaactgcagttggttttgtcataaacaacttgattccattactagctgaagaagcatacttgttaagtggtgtgcataatgatatagaacaaatcaaatgtgatctagactacaatatggctaccctaaaagatgcagatgaaagagcccaaatacatcaaagaatcgacaacaatcatggtgttaaaatgtgggttgaaaaacttaggagagcatcatttgaagtggaagacattattaatgagtacacaacttgtggcccaacaacacggtcgtcacaagcatacatttattatatttctttgaaaaaattcttgtttggtaataaagctaagagaacgccatgacatcgcctccaaaatacaagatataaaacaaaaaattcgaaatattaatgaaaaaagtaaagattttgttttatgtccacattcagagaaaaatctacatcagtgtgtggtatgatcctcgtaaacattcttgcttcctcaaagaaataaagattatgggtattgaggattcaagagatgagttgattcaaaaggtcaatgctggttcatcagggtttattgtgatctctttggttgggatggggggacttggtaagaccactcttgcaaactaagtatatattcgttcgaaagatagcttcgattgtcatgtatggattgtcgcagtcatacaagaaggtgaagctactacaaaagttaatgaagaaattttgtgaggcaagaaaagaagcatgtcttgatggaattgatgtagcagatgaaactgctatgagtacaaaattaagagaccacttacaaggtaaaagttatctagttatttttaatgatgtttggaatactttttaatgggatgacatgcaaagtgctttatctagcgataatgaaagatatgggagagtaattatatatcacaactaaaaatgtggaagttgcaaatttttgcaaaacatcatcaaatgttcatgtccataatttgcaaccacttccacgagaggaagcatgagaaatcttttgcaataaggcttttcgaaatgagtttaatgggcattgtccacgtcacttggagaagttgtctcgtgagattgtagtggtagtcaaagcatgtcttttatcgactaaacctaaggttgctgatgaatggaagaaactacttacatgccctaagctcaaagttggaaagtaatgaacacctcacaagcatagactaaaatcttgtctctaagctataatgatctaccttatattctcaaatgttgcttcttgtatgtcggttatttcccagaggaccactctattagaagcggaagactcattcagcaatggattcctgaaggcttcgtgaaatcaaagagggataagacattaaagggaacaactcctaaagaatacttgatagaactaataaatagaaatcttattcaagtgtcgaagacaactattattggaaaagctaagacttttcgtattcatgatcttctgtgtgacattatcctaaaaaatatggtagaattagacttttgtcaaatttttgctggaatgatttgaatagcaagatcttaagttgatgcatgtcagttgtcaatggcagatcttatgaatgtattcaaagcagtgctccagaacttgcccaagtgcgatctctttttattttcgttgaagaaggattgcctcataattttgtaagtgatatccccatcaattttaagctcctaaaagttcttgactttgaagatgcaccaaatttagatcaccttcccaaaaatatcggaaccctttttcacttgaaatacttaagctttcgtaaaacaaaggtcaagaatttaccgaagttaattggaaggttggaacatttagagactttggttttgaagagatcactagtggttgagctaccaattgagattaagaagcttaaaaaagttgtgacatctttttgtttataaatttcagtacaatagtgatggcctcatgtcttttgattcattgaatggagcaaaagtaaagaaaggaattggatagctaaaagctttgcaaaagttaaattttattgaggaatgttgtgggatataacatatttgaagagttgaaaaagttggtagagttgagaacatttcaagtcactatgctgagaagtgaagataacaaagaattttgtgactgtattcaaaagatgagtcatcttgaaagcctttcagtaagttcaataagtgaaaatgagataattgatttggaatccctttcttcccaacctcaatatcttgaaaacctctacttacaaggacctttatttgatgaagtttcccaattggattacaaaacttaataatattgtcaagatttcacttcgttggttgaaactagaagatgatccactgaatgtgcttcaaagtcatcacaatcttttggaattggaactttcattttgttgggaaaaactattgcaattaataataaaaaattatcaaatatcaaccaaagcaccataaataatataaaatacacaaatcaagcataaaagtgagacaccaagatttttacatggaaactcaatgcgcgaaaaaccacaggaccgtagtctgctcaaataatccactatcactaaagtttaataatgggattacaaagttcttctctagtaaaactagaggctcacaacaacatcaagattaaacaatcttggataaccaatacaatcatcatcatcatctcaaaagatggatacacaaatagaaaaagtttgggtcacaccaagtgggtattgtagaaaagcaccttagagaggacaatctccaaatcgaaaccggtagattggtcgaacgcctttcaaggattcaccacccaaaatttgagctaaaatggatgagaatcaaccacttgatcttcaataaaaaataccaaaacccttttctctctctagctttctttctcttctttccctctctttttctttctctcttggctgctggtttctcccccgcctcagttggtggactctactaagcctgctcttcacctacaagctttaagcttctctttacgcaaagtctttatcacatatcggaaccattctcactggtttgcaccttttctaagtgcaactcttttatctcaattacatcatgaatccaatgatatctaacatcaaaattcttggatcttgaatggaatgttgaattcttggagaggtgaatggcactctgactgtcacagtagacaatgtatctttcttgttgtaagcccaactcttgtaggaactttttcatccataaagcttctttacaagcttcagttacaactatgtactcagcttctgtagtagacaaagcgacacacttttgtaacctcgattgctatgaaacagctccccctgcaaatgtcatcaagaatcttgaagtcgattttcctagaatcacaatcaccacccatgtctgcatctgtgtacccatcaagcataggtttaccactgccaaagcataagcacaacccgaaagtacctcgtagatatctcaatatccatttcactgcttccaaatgatccttaccaggattaaagaggaatcggctaacaactccaactgcatgagcaatatttggcctcgtataatatgcaatttggtcatgtgaggaaacatatcgacatccagaagaattttttagtctttgtttttatggtcgtgtacgttattgttattttaagacattctacaaaattttaaaaaattcaataaaatttaacccgtcaaaaacaaggttcaaatagtctgttgcacatggagatggagatttttacatggtttagatgttaattaaccttagtccatgagtcaattgtattaagtcgaatggcttgatgtattacaatgggatcttacaagctcaagaaccctagcttcttgctatgctgttcacactctaatttttcgccttaggtttttctaacttctctaagaagagaacctaaaatgaagtgaagtgaattgtccccccttacatgaaagtataaagtggtatttataggccggctaggatctagatctggttatactcgtgatccactagggtttttatgtaagctagctccaatattgtggtaaattcgtgaaataaatattgggcccaatggtagaattctagctcgtggggcgaaggcgtctatacatctggagaccatgcggtttgggaccatacagtctaggatagatgtcttgtaagcgtcgcacatgtgtattgtggtgttagatacatgttgttggacaaaaagaaggtctttcttttaatggtgcgcgcactatcatgctctaacacaggggacaaatcatgattcggtgagaccaggagttagaggacagccacctcaccatatactaaacttccaaggtgcttcttggagtaccctctgcagatgcatcccaatgttcatctagagggcgtcatttattttgtctcgagaaggctggcgacctttcctagatctagactagcctcaatccagaggcgagtcttctaggctttggttaggctcaggcccatcttctctctaggctggacctatcctcatggaaaagctctagtctagaccattttaggctaatcctactttagaaatgccacgtgtcccttttttggaaacacgaacaatatttaccccaaagtttttgggacttgagagtgacggaggcttgcaatcttctttctggattgccatggacacgtggacaatcttgaatatgaagagaccttttcaccttctatgttttcgaatgcggaaggttggagacttttggattacaactaatgtcatgcatgtgtcattagcctcttgatctgtgaaactcatgcgcattgggaaagagcgtgatgctctggatgccgtgatgatggctaattcatgttagcgcaggtatcgatgcgaatatcattatgaaaaatgccccggttccaataaagagaattaaatgcaaactttctagctccccgattattgatcatttcgttacgttcttattcttagatgatatgagccgttgatggttaaagcactaaaattgccttcctccacttataaataggaggaagaaacacacttcaccatttttgttcactttgtaccttgattttaaactgagagaaagcataaaccttcagttcgtcactggtgaatgtccaatacctttgacgatatcttaaatcgtcttctctggattcgagcgagggagaatccagaagcatcaccactagatctgtctacaaattgttcaagttcattgaagccattgaacgttcaagtagggatctaagaaatacttgcttgggcatatcacttttaggccagacgttgctgggccttaccacccctacacccttctccttcaaataagtaccctccttcttttgaactattgatttctctagttttaaactgcatcttcatattttgagtaggattgattgtttgcatgtagggtaggaggcataaatgtgcactatttagtctttttaggagttgtgaagccaactttatgtagcttactgtttggattgaaatttggagattttacttgtaattatttttctgcatcggtcgagttcaaattgcttttgaatagaatcgaccttaaattcctctgcctggtgctcttagggctttgaatgaaatttggacttggaccttgaaccgaacctgaattctgtctgggtccgggccaggatctggggtccgagtgtggggtctgggtccagggtccaagtctgtagttgggtttgaggtgggattggttcatgtcttggtatggtatagaatattgatttttttttagtaaaaaaatcaaaaagtattttctactatcacttcttccccatatatatatatatgtatgtatatgatgggatcatcaatgctttgctcctaaattttcaaatataagccatgagaaaggagtactcattgtgtatcattgatgaatgaatagaaaagttcatgcatttttcttaatacacaataactcaaaatttgactctatcaagattagaaaaagaaaaagaaaatattattatcttcaaaatgatagtcaccatttaacaaaaatttattttacaagctcacaaatttgataattgtcacatacataagtagtgttattctactggttgacatctacagaatactcatccatagaaattgttgatgagaaagatgtctcattattatttttctcttgattttgaggatataggtgaagatttggaggtacttgtaggctttcaaggttaccttcaagcatttctatgacttcactcattgtaggacgatcacaaggttttagttgtatacaccacaacgcaactataaccatcttctttattgtcttcaaatcttcttttgttgcatattcatctatttgtatatcttttccttcgttgaattgcttgtgtatccataagggaaaaaagatgcggcttgagttttcagtagctgcattcacattttttcgttgatttgccatttccattaatagcattccaaaactatacacatcggatttggcagatactcttccaatatttttatagaataattctggagctatatatcccaaggttcctcttgcagcagttaaagaggctaaattattttctagagaacatgatcttgctagcccgaaatcagaaacttttggaataaaattttcatctaaaagaatgttgtgaggtttaatatcaaaatgaagaatatgcatgtcacaaccttgatgaagatactcaataccacgagctattccaactgaaatctcaaatactttggcataacataaagagatgttcattttttctcgtgaaaaaatgtacttatctagggatccgttagacatgaaatcatatataagagcccacttcttcccttcaacacaaaaaccaaccaatctcacgatattgacatggtg

SEQ ID NO: 69587 - DNA, 7474 bp, Cannabis sativa
cccccccaaacccttccccccgcccccccaaaaatgatgaacaataaaactatgaaagcccaaaaataccttcttaaccagagctttcgacactagttgtttcttcttattagcatttgcaatgtcctgcttaagttgctctaactcagacttatcatgagtccgcttcgcatcaattttctgctgctcagttacaagttctgtaattttcttgtctatctgtgggaaaatttagcaaaacaaaagcacagagcatgcaaataataatgaacaccaaccaaagggttatttgtatgaccatacttttaactgtttaaccaaaaactacaagttgaggcatcatcttatattacagtataactgagtggatacaacaccaaaaaaaaaaaattaggacttctcgtgtgtgggtgtgtgcgtgggagggagggaccagaccacgggcattgtaatattccaaagcctatcaaagttgtaaattggcaagtttctatcccaaccataaacctataactcaaaaaagtgtttaccaaatatcacagctaacaccacaaaactccagattatctttccatgaactacataactggttttcccacaaatgcactatggtattaccaatcattaaccactatagagcagttttattattccttcgtgctcttactccagattatcccagcaataaacttaatcctcaaaagcatttccaaatagcacagctaacaccaaaaaactcaagatatcttttgcatgagctgctgacaaaaaatcgccacaaaataagcactggtattatcaatcgtaaactactatagagaagttttattattcttttttccagttttggccacatatctagagaggagaagatatctcgctgcgctattgtttgtgtttccccgtcttatacttccttcttggaatacatggcaatgaaacttaaaacccacaaacatgatgaataataataaataaacatttacatgcagcaagtccttagaaatagctagccaaaaggatatcttgaagctcaaatctgactttttccaattcatcttcctttgcttttatagaattggtgttctgcatgacaatattcataaacttcaattttgatctccggtgatcataaaatccaccagtcataccacctttcttgctcacttgatcacctgtcaaaagatattataagccatcaaacatccaccaaaaaaatccacattcattacaaaaaataataataaaaataaaaatgaccacctaccttccaaagttatacagtctagcccatccttacgagcaacctttgtagccacatctagatctcgacaaatcactgttctagcaaaaacctacaaaagagaaaatgtacatttacaaagaaaagatatgtcagaactgaaacatatattctaactattctacagtaataaaatctatgtcccactttccctaaaagaaaatatcctatttcattagaatccaaccaagaaaaaatgaactccctctattttattttattttcatttctccttaaaatttgagttctgaggagagccttgaactaaacagatttattcttcccagccaaattgccaatacccaaaccgccttctctctaggtcgagaaataaaatcctaaacccaccaaactgacagatttctcctcgtcactaactccccaccatcaaaaataataagagaaataatccatagaatccacaccttcagctcatcccttagaaattgtttgcccacagagcctagaaaatcaaccactacaaccaagaagagggggggggagatctctttccaaaaactttaatagcataaatttcagtaactctaaaaccaattttaaaacaatataatatatcaattgtttcaaacatttaatcatggattgcactgatatttctatttgaaacaaattccagttagcagcaaacctgtttaaaagcatctccatatttcttatcaaactccaacttgtccacaagtggtataacatcagaactctttggatagttaacatgtggtggtttcaccctgttcagtggtataaatgtaactcgtccccctttcaatgcgttcaggtgcttaattatctgggttgatatatcatcagttttaaccaccacatggaataagctgttcatgagatgactaaacgtcactgaaaaagaaaatataatatctactttgtagaagcaggaagaaaagaatttatgacacttttttttttttgaaaaagagaaagggaccacttgtcttagactgggccccactcgaatttattgaaacccctcacttgtggcggaggaaaacaggggtaacaaaagctatggacaaaacaaacagagaaaaaaaaatcacaatgcaactacatcggtgttttcaactgtttagtatgcttcttgagcagatgtctacaaagtctacaataaaaaagcatcactgaagaaaaagccttagaataatcgttacaaacctgtttccagcagtaacttcaacagcagtgaaaaacctttcatcacaatgaaggagctctataattggaccatatacgtcaggaattttatactctctgcagatccttctaacagaatttagccctcttctgacttcctgaaaacattaaacaagagaaatgcaaatgactaaattgcattaaaatagaaaacagaaaaggctgcagtcccacaatgggatgccagattccacaatccagctgtcagctacatcaaacaaaaaatgtagataaaaggaaataagaaaacaaaaggaagacaaaaaatggagtaaatatttcaatataggaccctagtatgaatgtagttctataagtactatcaagtctacaaattggcggaagtcctcttagcctgggaatcttctctattattaatgagccatgtaaagtgttgttctttaaggatatatattactgacataaatcaataaacttcacaatttttttaaaaaataataattaaaaagaaaaacctttaaggtagagtgtggcaatcacttgtattgctccaataatttaaaagaagaagatttggctcagcattgaaatgggtaagtacttatagacgtaagctaaataagtaaacgacattaattagtgattctcttttgttatgttctggcagtagtatctcattttggatagtatttatcaactgagagggacttttcttctgcaacctatatggcacagttttcttgtataattgtcaattgtcatgttaaaaagtgacaaagattggtgttcgtcgtcatattaaacacaaaaacaaagatcagtcaaagccaatgttaatatagaaagaaaaaataaatgataagttgcatttcacttggccagggatatcaaatcacgttaacatatcaactcacacattgcaaaaatggcaaacacccttttttgctgaacttgaagattaccaattacaacgcctcactcttttcaattctttcactttttattattattattttttaaaagagacaaaggtcacatgtccatgagtgacctcttcccaaatttatttaggaggcctaacttatggcggaggaaaaccatggtaacaccctctaattctcaatctttaattttataataagaaactaaaatatatatagatagataaaaccgaaatgtttacatcagatgacaatacatcatctactaattaaaatgataaggaatcatctacaatcacccccaaaaattccaatctctacgtaaataagaagaaaaaactatatgaaatttttaagaaaacttaatattatcccaaagatggaacccatgcaagtcagtgtcctgaaatatcctactgtttctttctagccaaagtgcccaaccatcccctgtatagtgatattctaaaaaaaaattaaaccaaacagttctcaatttacaaacaagaaaaattttaatagcacaacaaactacaaggatacttaccccaggagttgcatgatcgagattcttttctgccttctcaacctctgttctcagtttatcaatttcagcagaaagttcagtttcttttccccacaaggacctatggaaataaaaattagtcccactggcatatccacagcaaatgcacaaataatgtaattgcaaaatcactcatacttccgctcatcttgcaacttgtctctcagtgatttttgatgattgaaaccttcacgagactgagaaataaaggactccagattagcaatttcagttctgcgaccctcaatgtagacatcctgctcattcaactcggagctaaggcgatgaatctcatcctgaagctttttctcctgaatcatacaaaagtaaagagatgttatataaaactaaattatagtgtgaaaatgttgcattaagagaaaatatgagccgcaaaaaatcacgagaacgacacatgacacggtcatattgcccaagcatactagtaattaaatatttacaataaattatacttattaaatgacttaaaatttattacaaaactaaaaagtaacaaaaaatctgatttttgaaaaatatacttataagtactatttttaatctaatcaagaataattgatgcaaatgtaatttctgaagttatattttttcacataatttttcttcacaattttttcatgattttaagagttaaaaaatctgatttttttttttgtttaaattttagatttttttaatgatttagttgataattaaaatatttccctctgaattcagtaatagagtcgtgtgtttgcctctataattttcctgttttggtgtttctctgggtttgattcccaacatttatccactgaaaactcagatatggtctggtcacattttcttaaacattagctagacagtaaaaaactacacaaggaacccataacatgaacaacactgataaatttctcaaatgtgaaccacgtcattcattaacatatagacaacactgtatttcaaccaatatattgaccttttatatgtatatacaaaatacaaggaacctaacaagagaaactctgacgaaaagtgtaccaatgagaatactgtaactttttatcaatgaacatcttagagcataccaatgagaatacttacttgattcaggtttgaagtcagaacaacattaagatccttaatttcctttttaagccatttgtcacgagcagctttattcgagaattgggtggcacgaccttgcttttgatataagatgctaagttgcttctcacgctccattatactacaggacatcagcaccaatcatgtcgaaaaggtatcagcaaatggggaaatttatgtgaggccaaatatttagtaattgaatactgccacatgttataagaacaaaattcaatgtgaaaagaagcacacgtataaaaagaataagcctttgccaatagagtgaaataaagcatatacttaataatgaatgccatcaaagctgaacaaaggctaccagtgtcaatatgaagcattagccaataaatgcactcagcataaacccaatatgaattctagtacagctcgaaatgattcatctaacagctaaagactgtgaatttaatttttgcctaccaagctgaagtttggcaaaaagttgttggaataaaaaacccaactaatcctggcttctttagaaaagtattaaaactaaacatactttgcatatttacaggatgggaacagatggaaaatcaatttatgcataccaagctgcagaaatgtatgtttaaaatgcatatagatttaactgacgtacccttttgttatctccttttccttcatgatttgactatcatacaaagggcttatttcttcaagctcattcattgagtcctgaatttcattttgcagaagttgaagttgcctcacagcatcattctacagggatatatacataagtagatattagccacaatcattggcctctcattaccaagacaaaattcacaaattttatgaacaagaaaaacaaatgaaatgaaaaacatgctgggcattatcaacacatactttggctcgagtatttccaaacatcttctcctcaagatccttcacatcaagctcaacctctgtctgcttctttattgcttctgttttttggatttctgctgcttctttctccttgcttaaaccattaagttctttcgttaaatctttcattgccttatccaggtccttcgatttttcatgggcatccagcacactattatacatttttgtagatgtttcagaaacccttgttcgtgcctcttccacctggataaaattaattgacacaaccttagacacagagccattgcttcatacacaatcacattatgatagtcatcatttcagcccatggcgatcattttatttctaacaatatggttaaaaatatggatgcattctgcactaagatactattattttggctcaatatctatgcagctattattcgctttatgtattgagagtcacaggctttatgtaatatcttgtagcattctaatgtttttacttgttttgttaccacgttttcctcggccattagagaggttccctaataaatttgggtggaagtcaatcttagacacatgacctcagtctcttttcagaaaggaaaagattacaatatggtttgaaaatatagcataaagtatggaacagcacactaaaacacagaattcatgatactagtaaagagaattcttcaaaatgcaaacaattagaatcacatgacaattttcatcatatggtgaattcctgaaatatttccatcaagtcatttttcaacatgttaagctctcctattcagattgtaccatgacaaaaaagaaaaagaaatacgcagttataactatagagtatttgggtgcttactagccttcagacgtttacatatacatgagggatgagtacatacaaaagatcttttcagcacatatctccttaggctggagtgtacaatgcaaagaaagtggagatcatctatccttcattataaattctctatgcaggtgtagttctagatacttgttgaatcaacttttggagtgctgccgatcacactaccgtgtacagtttctaaattttgaggtcatgggtggcatacagaaacaattactttggtaggtagattatttaggttgcatgactgaaaagatgaagatatattatggaaaaaaatcagattctggattgcaatttggcaacatgatgtcatgaacgccaatgaatctaagggcattttgctttctgatttcattagagaatgccattttctgtctctgttttgctctttatttaggttactctgtcacacttggtattgagtacacgccagtcactgtttcttgcattattgcttatcttttttttgaaaaaagaggagagatcagagttaaagactgatcaccctctaacatagattaatgccctcacttaaggcggaggaaagcc

SEQ ID NO: 69588 - DNA, 2863 bp, Cannabis sativa
agccatgttcaacacagagcggccagctaactcagccaaaaaataaaatgagaagagataaaaggtacagccagctaaaatataaataaccgtacagatcaatgaagtagctatgaataaatatgtattgaaaacgggtaataaataccccttcagcataaggcagaagatctaacaatcacaatctcacgttttcagatgacttttcattggaatagcacataataagtataaatataaagaacaatcacaatctcacgttttcagataacttttcatgataagattagcagtaacaaactaagtcttggagtaacacataataaatataaataacaatcacaatctcacgttttcagataacttttcataacaagattagcagtaacaaactatgtcttggagtaacatataacccttccacataaagcagaagaactaacaaacacaatcttttgttttcagataacagattataattgaggcagtaacactactactggctactattgtgtcttcaggtggtgtaagactacatgtagcaacttgctattgctgacttaaaaaccatgaatcttgatatgctccttcttcacaatgccagcctgttcagaagaaaaaaaataagatgagataggccatacacagaggtacatatagaggaattttaatctaaagacatgcactttcattatcattacctgcacaaggaaggtagaaacattctttctctggtcaccctgaagctgaatgacctgtgaacaaatgcaacaagaaaattcaatggtttgtttccaacactaaaatatcaaaaacaaagttcaaagtttcacatagcttctattgtatttaggttctaggacaacccaaaacaaaaccttgtttcctattttatttcatcttattttaaatttcgatattgaagcagaacctatacaatgaacatggaccataaagatgtatccaatttgctcggtgttagaaacgtacctggcctaactccgggtcctggacaacagtaccattacagcagaactctttcttaaggtccttaagtatcttgttatagctgtagtccttcttcaaaccttgaacagttgttagactcttccgaccattacgctgctggacacgcacatgcacgtactctttagacccagcacccgagtcatcagcactagcatcagcaaaggggtctgcccaaccacaaacaaaataagaaaaattgattgctctgggtaaatacatataatcaatatcacaaaaaaagagaaaaaaaaaaagctatggagaagtagaacctaccaaatgcagatggaacctggtgttctaattcagacatgaaagttgactgttgaatgtagaagagcaagtaaccaacaaaattgctttggtatttaagcaaatgaaatctgctcaacaaatgacaaagctaaaaagtgaacaatacagctattattttacatttataacttaaaaattagtgatcctttcttataaaacattgcagataagcaatatgaaattcatcaacgctaaaagtaagataattgaggtggactactttcacttcatgttcttatacatacactatcaattataagaaagatccattcataaaattcctcaccttattaaataaaataaaggcaatataaataatctcataaacctaagatatttctttttcatatacttgttttcgcaaccaaaaattaacctttacctatagaaggcaggaaatcctacataggaatcgaacaccagacacttcgcgaaaagcaaaaggaagagtggaatcttaatagattctaataactcagataaataaatgcaaataaataattaagaattttagtattatattttttttttgaaagcaagaattttagtatttagttcatttagccacacttcaattgtggatcatttaaagttacaccattgaaaacctagtttttgtttccattaaaaaaagaagcccaacatattcaacccatcttgctcatgttccccaaaattgcataagacatttatttatttatttatcaaaaagaaaaatatttatgttaaccgtaaatttcgatctgcaatccaattcttagattcataatctgaacgaatataatcaaacacctaaagagtcctaaaagaaaagaaaagaacaaccaacaccgacagaaaaaaaaaaaaccctaaagatggtatccaaaacacagattgaaagagtgaaaatcaaattaataaaaaataaagaacattaatattatagcaaaatccgatcttacgacgaaagagtaagaagagaacaatacctaatacgatgcagaaaatagagaatctaagcgaggaagggagcgagcgagcgagggagcgaacgagcgagagagagaatgaagaagggataaaaattaggggagactttatatagcgagttaccaaaaataaaagatattcctattcccaaccacataaaacacctatcttttgttaaaaaaaaaattaattaggcctttcattattattttttttttcttttaattgatttattttattagaaataattttatttatttcttttttattttttaaaaaaacagaatttattttattaaatatcggttgattagcataaattttaatttctcatgcacttatgcataggttgattagtacaaattctttttactcttttttttttaaaaaaaaaaacattttttttgtataaatttagtaaaattgttcagattttgtagaaacatcacgaatttattcaatatcatactgagtcaaaatcttattggaaaattgtaaaaaaaaaaaaaaaaattaatctaattatatgtcggtttgaaaagaaaaa

SEQ ID NO: 69589 - DNA, 1597 bp, Cannabis sativa
acacacttcacttttctatttttacatatttcatacaaagttccaacatacatcatttgatttctacaacattatatatatatatttaaacttgtaacatacattccgaaaaattacatgatcaaactaataaggccagtatgttaatcctagaaattaagaaagtttctcacgcgggaaagcgattcctcgtcgagggaatattacatctattttgctgaacaaaacatttattaacatatacatatctatatatgtaaatgtaagaaagcttggtcaagggaacaaaaagagccctaaacatttatatatgatatatatatatatttatacgctcctacaagcgctacacagatcgatattcgataatatactgtatatatatatatatatatatgtattagctctacgatatgctgttctacgtccctatatatatatagtacttcatcatcagtattattgtggcgtcgtactaattagtattatacggagaccattcctagctgcaaacacaaagtcatattccgatttaattagaaatgataatccggcaaataattttttagtggtacttattattataattttgtttgtataattgtttgttacctagttacaggtggtgagtcacgtgttacccttaggtgtcagtaataaagagaccctgaaaaagaaattattaggagaagataattaataatcttgctatggtcgtcgtatatataacaaattatgaaagaaaaaaaaaagaaagaagaaagtatatattccttctaacataattaatctcaagtatatcttaccctgccaccaatttcctctagaaacactattggaattatttccatttgagtcatcgtcagatccatctttcttgtactgatcattaagaaagcaatcataacactattaataccagatttaatattattttatatataccctatgtaataattaaaaaaagaacaatatatatgatcataagagaataagaaatacaagtgtctatattcatatacttacgggatgttgagattcatgagtagtggtcctagtattagtagaagtcttgggagaataattttcttgaccaccatagtagatggatgaattgaaataacagggctcaactgtttcattttgatagatggaactggaatctttgcttgtcacgccactactttcaccttttctactttgatgagccacattatctgaaaaaaaaaatgtcaaattgtaatattgggaaactaaatttatattcatgaatcggaatatataatacaattaatccagattctgtatattttgaccaaaagagtccgttcatatataaaagtattgccatttgagctaaattcatcaataatattcatggaagtatgaatggaatgatttttaaaaaggtagaaaaagtggattaaataatatgataattcatttttaattattttatttttatatacaaacctgatctttcgtacttcccacctccaccttgatttccataatgatcccgcttcttctcttttgcaagaacctattttttcaaagtcaaaagaacagtgttagaaagacgagatcgaaatgaatt

SEQ ID NO: 69590 - DNA, 4185 bp, Cannabis sativa
atatatatataaaaaaaaaacacacacacgaaaattgtgtcattgtcattttcaggaagacgatttttttttttgaagtgcgcaaaacgaaatcgaactgtgattcagaggagggagagagagagagcactactataaatagaaccctaacaaaaccttttaccgccactctcattccctattccaccgcctctctctctctccatctctatatatctcatcctcattctcctctctcagattccagattccagattccggaatctccattcccctgtttcctgatttcccatcatttgaattatcaaactccatttttggaatccctcagccatggttgggacctccgagctaatggaatcgccatttctcgatctaaacaatggctcatcagtggtggaaaagatcttggccgagggtttcaatcctgcatccgtggttccggagcctctgcctccggttgttatgaccaatggggaagatcacggagatggggaggaggaggtagtagtgggtggtaatattaagattaagaagagagagatcgttcttggtcggaacgtgcataccacttgccttgccgtgacggagccagatgctaatgacgaggttaccggtgataaagatgctttcatggctagcgttttggctcggtatcgaaaaacactcttggagaagacaaagtaccatttaggtaatgacataaataaagagcttgtttatttgataatttgagaaaataacaattggtaatttgtttttttgttgaacagggtatccttataatttggactttgattatggagcacttgggcaattacaacatttctccattaacaatcttggggatccattcattgagagcaattatggtgttcattcaagggagtttgaagttggtgttttggattggtttgctcgtttgtgggagattgagaaggaagagtattggggttacattacaaattgcggcacagaaggaaatctccacgggattttagttgggttagtatatttattgctatatatattaatatgtgtttttgaaatttttggtcgtgggatgtgttgtttttatacatttcttttataaaaaatattactttttttatgcaggagagaagttttccctgatgggattctgtatgcatcaaaagagtctcattattctgtgttcaaagcagctagaatgtataggatggattgtgtgaagattgctaccctcgtctcgggtgagattgattgttcggattttaaggataaactccttgttaacaaggataagccagctataatcaatgttaacataggtataactctcatttttttcttggatattcaactaggataagcttcttcatgttgtctttcctttttacttgattgaaagtcttaactcaatactgcaggaacaactgttaagggagctgttgatgatcttgatctagtaattcaaacccttgaagaaagcggcttttcacacgatcggttctacattcattgcgatggagcacttttcggacttatgatgccttttgtcaagcgtgtaagtaatttctgtaccaataggaatgcaaactacagtgtttgctttaatctggacttgctttctatagtttgctattttacaagcagattatatcatgttcctttcataatagaagattatatttaagcagatgatttatcatgataattttgttctcttaaagattcccctgctttttctggaactgttaacatgtttatttatggcagatttttgttgcttttctttttcggacttaaatgatttggaattaagaattctaacatgttatgttgtgtcacaccataaaatataatctacctttaaaagtaacttttggatgttcttgtcctgttcactatggtaagcaggcaccaaaggtttctttcaagaagcccattggaagtgtgagcgtctccggccacaagtttgtggggtgtccgatgccctgtggtgttcagataacaaggctggagcacattaatgcactttcaagaaatgttgagtaccttgcctcacgggatgccacgattatgggaagccgaaatggccatgctccaattttcctatggtacacccttaacagaaaaggttacaagggattccagaaagaagtccagaaatgccttagaaacgctcactacttgaaggaccggttacgtgaatctggtatcagtgccatgctgaatgaacttagtagcactgttgtgttcgagcgtcctcaagacgaggagtttgttcgtaggtggcagttggcttgccaaggtaacatagcccatgtggtggtgatgcctaatgtgaccatagacaaacttaatgttttcttagatgaattggttgaaaaacgctcaacttggtaccaggttgataaagttcagtctccttgtattgctgctgaaataggagctgagaattgtgtttgcaaaatccacactcgttagaactttcaacaaagatggaaggtaccattgttgttttatttgtaatgaactcttaattcgtgggttattaataaaatggagaagaaatccataatttagtgttttttttttcttttgaaatgtgcatttaaatatcaaattaagtaatgctagagtcctatgtttattaagtagacttgcttttgacatcatgtgctaaaaggtaatgaactgtggactgaagaatgtggagacagtgctttattaaagcacataattcagattaatcattagctttttcaactggaagaatcttcataaattacatttatagcagttcatgttgacccaataaagcatcttttatttatgttaatgttattggagaattcttgccctatgtttttatgctatgttgcttgttgtcacagttgctgttgcttttatatattttggtgttattgtatgacaatttataaacatctttagcatacattgcaatataagagaaaatgccaaaagaaagaaaaatctataaagcaaaatttcaaaatggagccagccacaaatgttaggaggacaattttttttttctttcttttcttatattatttttgttagaaataaaaatataaactggataaagagaacaaaaataattttcttttattagaatataaatataaaaatatgtgaagacaaaaataaaaaatataaatttataagttttatgtccatatttagagcatcaaatatggttaatgaatgaaattaatatggtatttaaagcgccttggaaattacaattggcagttttgtatttaagtttaccttaaaaataattaaaggtgagtcaaaaatattttgttaaatagaaaaccagaaatcctatatcagaaatcctatggatatctcttactctcattcattatgttttaagctgatgatgtacaaacattacaagttcaataaagcttagatatattcattacagttcttattccttttagttctcgagtaattgttcttagtttctgtgtgattgttctttggtttcatacttgggttaaagaatgttgagaatcgtggagttttatctcaaatgatgagtgaagtagcccatgttcatttgatctatatgagacgatattgtccaataaagaggatcaactaacattcatttccaacagtcccaaacaaaaatcaaaaataaaacttaaaaaaaaaaaataatatatccttaatataaatatataataataagggaaattatcttcaaaatatagatgaaaaaaatatgggtttacctttatatcttaacaattattacttgttaggcagtttgcttttcataaaaaaaaaagaagaaaaaaatttgggcaatttaattaataagttaacatcttaattcttgatgaagaaaaatgcataattaccatgcaaatacagtagagaaggaattatagtcaactttatattacataatacataactatcttacgaatatttatgtttatatatgtatgtatatatacgaattgtcatgtaaatatacaacgatcattttcaaaaaattaaaatcagcaaaaattttgctatttatatttcggaagtagttgatttgtgatgattatgcagcagctttatcctgcaacaaaaatattattaatattatgacaatatacatgtattaattaatgaaatttttacaccaaaaatacacaatggaatttttat

SEQ ID NO: 69591 - DNA, 5661 bp, Cannabis sativa
ttagagtattattttgtaccattttaaaaatacatggttaattttgtcatttaacaaaatacaaggctcagttaataacttttgcaaaatacataatacaaaatggtattaactcttataaattggtatttttgtcatagaaattaaacttaagtatttacagacaaaaaaaaattagtgtaaaaaatttaatttatttctcattttctcataaaattttgaattaatttaatatttttttagtttaatttataataaataaaaaaaaaagttaatttgtgggtccctataaatatgggccgatagttcccgccatagcagaagaaattttcccgctaaattcaccatcttctttactctctacgctcaaactagggcgcgcgttatctctctctctctctctagctttctctctctagaactccgaacatggatatcagcgaagaagttagggcggctcacaagcgggagctcatgacgttcctcgaggacggtgtaagtctctcttactgctttatctgttatctctgtgttatttgtgtttatgtcaattttgtcccattttggtgaaatttggtacagatttacatggacgagatcaaagccatgatcaaccataagcgccgtcgccttatcgttaacatttccgatctccatgccttcggcgatttcggtcccaggtatttttttttttcattcttagttctttacaggaagaatatcggaaatctatttcgtatatagttgtgaatttggctgtttttgtctcaatttgaggagcaactggttttaattgttcttgttccctttgatattaagagaaatggtttcgatactgaatagtgtgtgtataaattcttagttagttggtgggatgagggtttgtttttgctttacagtgaagtgaatggtcaatgtggtgtgttttctttgaaattgtatgtgatttaattgattttgatatgttgattctctttgttcttttcatatatacaggattcttaggaatccgaatgagtatatgcaagccttttgcgatgctgccactgaagttgctaacaaaattgatccaaagtacttgaagcaagaagaacaagtgaatgtgggatttgaaggtccttttgtatctcggcgtgtcacgccaagagacttactgtctgagttcataggctccatggtctgcgttgaaggaattgtcaccaaatgtacttacttcttttatactatttcataagcacttacaaacacaggaacaagttttttgtttgatgagttgagaatcagtgactactcttagaattgtatgtagttgaatgaattcgttttcacccaaaaccctagatatttatgtgcattttttactttgattttttttatcttctagaagggaatagagatatgggtttacattttgactgatatgctttgggttttgaagatattcttgcgggacagatagtaattttttagataatctttttatccgtggaataatttgttgccaacacttttgtaggttctcttgttaggcctaaagttgttaaaagtgttcatttctgtcctactactggaagcttcaccaatcgtgaataccgtgacattacttccaatatggggttgcccacaggaactgtctatcctacgagggtaaactcaagacctttttctttcttaacttctcctttcttttttgattagtctcttactgaagaaaatacatgctcaggatgacaatggaaatttattggttaccgagtatgggctgtgcaaatacaaggatcatcagaccttgtcaatgcaagaagtgccagagaattctgctcctggtcagcttccaagaacagtggatatcatagttgaagatgaccttgttgattcatgcaaaccgggagaccgtgtgtctattgtagggatttacaaagcacttcccggtaaaagtaagggtagtgtgaatggagtattcaggttagtatcaaccatgtaaaacagtagtttctagatcttaaatagtgatgcttgttttagttggaatccttaaataagtgctcttgttttgcaggactgttctcattgccaacaatgtttctttgctcaacaaggaggcaaatgcaccaatctatagccctgaagacttgaaaaacataaagaaaattgctgaaagagaagacacattcgaccttcttggtaattcgctagcgccatccatttatggacattcatggataaagaaagcagtaattctattaatgcttagtggagttgaaaagaacttaaagaatggcacccacttgcgagggtgagttattcttttattgctatttgtgtttgttaatgatccgtgtggaattcaggacacatcttctgttcctttttcttttctgtttgcattttatccacaatcttgtttcttgtagtgacattaacatgatgatggttggtgatccttctgttgctaagtctcaacttctgagagccattatgaatattgcaccattggcaatatcaactaccggtcgaggttcttctggtgttggtctgacagctgctgttacatcagatcaagagacaggtagtttacctcacaagtttttttacagttttcttaatgaaatgatattcttctgaaatattatttgtctgcaatcaggagaaagaaggcttgaagctggtgcaatggtgcttgctgatcgcggagttgtgtgcattgatgaatttgacaagatgaacgaccaagatcgtgttgctattcatgaagttatggagcagcagactgtaacaattgctaaagctggtatccatgcatcgctcaatgctcgttgcagtgtggttgccgcagcaaatcccatatacggaactgtaagtatcaagataatggtcaccagtgtggtatttcaacttgaaattacttgcttgagatttgatttttcgagaccaggtttcattcatcttactcatcatgtgtattaaattgattacagtatgaccgctcgattactccaaccaagaatatcggacttccagattctttactttctcgttttgacttactgtttattgtacttgatcaaatggatgccgatattgaccgatacatctcagagcatgtgttgcgtatgcaccggttccgttctgcaactgatggaggtaagtaattacaacagcacttttttttcctcaagcattgtgtttctttacataactctgagtaaatgtgcattaaacctcaggtgaagcagcccttggagggggttcaagatacggtagagaagaggaggcagataatgattcgactgtgtttgtgaagtataaccgaatgctgcatgggaagaaaacagataaaggccgaaagcgtgatacgctcaccatcaagtttctgaaaaagtacattcattacgcaaagcataggattcaaccagaacttactgatgaggttctgatgtgctttaattttctttcttttgtttaataatctaaattgctgtgcttttttgcttatttgtttttgcttctacaacatctatattttaggcatccgaacaaattgcaactgcatatgccgaactcagaaatgctggttcaaatgcaaaggtaattaattactgtgaaattcttcaaaactgtagaatacaatagttatttcttcctttaaattaatatgattatttgactctacagactggagggacacttccaattactgccagaactttagaaaccattattcgtctctctactgcccatgctaagttgaagttgagcagaaaggtaaccagtgctttttttttttttttgcaacaatgaataacttcattgaaaaataaattataatgtcatacaaccttaagtatcatgaatcccaccaaaagaaagaatctcatcaaacaatacaagttctctatccacccgaagagcatgccgagctaatccatgtgcaacctaattggccgttcaacatacatggattagggacactccaggaaaactgaacatcaaacttgctaaaacctctaccaaagaaccaagttcaatgaggaaagaatggcgtttagaaaacgcattaaaaaccgctaaacaaactgctagactaactgtttcagccacatagatagagtgaatcaatccaatgctatcataagtgctacacaatctgcttgaagcacttgaaacttgtcaaatgcactacagtttcgtatcttcatctacagtttagcttgttcatcttatgaataattgatctatctttaaacaggttttacaatcagatgtcgaagctgcactcaaagtcttaaactttgccatatatcacaaagaattgactgagatggaggagcgtgagaacgaaaaggagaaagaaacagagagcaaacgccgagctgatcgtcccacaaatgatactgatagaccagacagtggtgcagccggtaaaggagggtaagtaacaagtcttgttcttgctcaatagctaaatctaattcagttactgattctcactaattttttctttacacagttcaacaactgatgccatggacatagatgatgaccttccaacccaatctgttgatgaactttctccagagaggtctgtatctatatagcttcttttcccctattcaacgagttttcctactcttcgagttctaatacatctttgtctgtttcgtcttacagaatagaagcattcaattctatattcggccagcatatgcgtaccaatcacttggatgcattatccatcgacggtatagaggaggctgtcaactccaggatcgatgtccgcttcacaagagcagagataacagtcctactagaggtaatataaatatatatatgtatacatacatacaacattgtttagcttcttttatttcttcaatggctagactataatgtaaaatttgatgatttcagcaactacaagaggctaacagagtgatgatagcggatggaacggtacatatggtatagatcccgaaactgtatcattcattgtatcggtttgatgatatcgatgaagaagaaaaacaagttcaattattttgaatttatgtcatgtaaaccttccaagtaaaagaagctaacttcatctccttgttttcttgtttatttccattaggtttagttgtcttagtttatgaacttaacatacattttgctgttttctattgcattgttaacttagaatggaatatggttatttgagacaaatctcttatgtcttgttgcacatggcattgccaatattatacataccttggattacaagagttttaacttgattgttgttcttgggttaaaaaggaatttcatattgttcgagttctattgcccatttaagagcatttctaatggagtgtcaaaaagtccgtgtattgctatattttagtacacttaaaaaaattgtactctaatggtgttttcaaaagtgttaaatttagtacaagatataatattgtactaaatttagttcacaataaacgatacttttttatttactataatgtcactaatgattgtgattgtaattcattgacttttactaaattttatttattttatttatcatattactattatttaaataataaaagaataaaaaataataaatttagtatattctcaatgaaattactattgatataattaatttttttttttttt

SEQ ID NO: 69592 - DNA, 2536 bp, Cannabis sativa
gggggttgtgtgtgtggtacaattgtccctgaagtgctggccgacgatcggaatgaagacctacgacgtttgcttccacttccctgtatttttatgatatttttattgcatattttaatttaataattattataaaaaattatttaacactgtctcatctgagtcacatgtgagataaatgtattaattatataattaactaatgataaatactaagtgattagcactacttaaattaatatcatattattattagtgtaataaaatattagaaaaattattagatctaactcaacttaataaaatggactagcgtaaactatgtcaaacaataattgtgaacaaattgatcatattagggcacccaacatttcaaaattgatcccactccgataccatattaagaaagttattggacctaacttaatttaacaaaatcgatttgttgtcctcgctttattaagtgaatcgagtatatatttttaccgaactctaatattaaatatacataatttaatgtaatgaattttatagaatatgactaaatcttcttaaatattaataactaataaacatgagcaaaaatcattataattatgcaaatgaaaaattattagtacgtaccttgtcatcatcagagtaaaaagtatcatcattgaccccttttgatttatctagcttagtcttgagcctaagcataacaattggatccaaaaacacttcatgggaatgatcataacttttggtacgaaaacaatcagggcaaacattgaagatgtaattgcaatcattcttgaaaaagcattctacacaagtaaaatacaatccaacaatgaatttatttttgcaatctaaaccattgcaaaatggtctaccgctttcgattatgtaaagtagagttatcacatcagcataaaccaaatgatctttttttcctcgctttagttggtcgaagaaattcttcgatccaaattgggggaatccaatatctttcatgtaagcggaaaattcccgaaatttgatcttgttcggtagggattttgtttccatttgttcagagaaagtttgaattgatttctgagtttcatggttgaaatgctcgtagtatgcgtatgccgtgtcccgcaagtcatccataattgagactcttttctatcctaaaatatatataaaaaaaaaaagtaacacaaagagaaataattatataattattaattaataatgaacaaaatgtataatattataagtaccttttcaaacaatagtactagtagtattgaagaagagcagcacaatgttaaacacagagatctcacacaaatggatcatggaactatttatagagagatttattacttattacttttaaggctaaactctaaattatttaagtaacaaattattacttaaagttatttgctgtaatttaataaaaagtagtgggagaattaacccaacacaaacagttattcttcagtttttggtcttttcttatatattaatggtagatcactagatctatatagatatatattatacataaataatttatgtatatgacaacgtacgtatatcgagacacatgatatatattcataataataattatataaaaaaagtcaattatgatcatatactaaaatgaagtgagaatattatatactaaaatgaagtttcatgactatgtataattagatttccatagatccatttccatccatgatgatctatattttgatcatatatagatctaatatcttgttctttttaattacgattttgctttcataaatttaggtgagtttggagtgtgtgtataagtagtgtaattattaggggaagatagtaattacataattatactatattttaaaataaaaagtatgtttagacattataagatagtatttacttataagttctaaaaaatttatttagtaaaatagttagtaattatatttaaaaattataatttttaatatattttatgtttaaaattgaaattttttagtaattacacaatataagtaatctctcaattacttgtaaatactacataattatatgtaattacgtgatacaaatatgcaaaactatgtaattatttttaatttacacccaattttaattctcttggccttccaaatgtgctcttaggatgagttttattttttttagtttagtaaggtgccacattagtaggtccattgtaattaatagtttattatattatttatttaattgagatctaataacaaattatactaataataatatatgacatttcatatatagttctcaataccttaagttccccatagcaatatttacataatgttttatatttaggtgttattagaaaacatattaatacttaaaatttattgctaattataattttagtttaattgcggtaatactttaaaatttataatatacttttcattgtttttgaaatatcatatattttttttaaaaaaaatattaataataataaaatatattttttggtaaaaataataataatagaaatata

SEQ ID NO: 69593 - DNA, 3083 bp, Cannabis sativa
aggcccataacatagaaactcagaaagattcagctcagtaactctcttctccaaaacaataccctatagataaaaaaaaacaccaacaaaccccagttgataaaaatccaaactttttaccaaaattcaaacaattaccatcattattggtatttttgcaaaaaaaaaaaaaaacttacatcttctctggtgaggataaagttgtcatggaaaataacagggtaatcatccttggtcacctacaaaaaacacaaccatatgtcggttcgattcacacaaatgttgtgtttttctttttgatttttcaatcccaccccaccaaaaaaaaaacaaactttttatcagtacgagtttaggaacgaactgaaattactaaaataccctactctgtagacttttttcacaaaaaaaacaccgaccgtacgcggcgacaaaaaccaatcacgtcaccctctttcaagttccgatgaatttggacgtttgacacaaaataaataataaataaatacaagaaaaagttttttttttcttacctgaacatcaaactcgacgaaatcaatgggaaaagaggcagctttgttgaaagaaacaatggagttttctttaaaagctttcattttcatatcagaagattgtaaaacgttcattccatggcctcgatgcccaatcacagcaaattttggtgcatttaaacttcctctacccaattccacacctgtcgattcaaaaacagagatatatttttaagatcaaagcaatttcaagattaaataagaaaaaagtcaaagctttttggacaatggtgatgagttgcagaagattttgattattattacctttgggaagacgagttgagtagagagagaatgaggcattttgtgggacttgatctaaattaggtacgtctgagacatgaacagctttgagagccattaattctcaaaaacccaaaaaagaaagagagaaagaagaagaagaaagaatagaggtaatacctctttttgaaaaagaaagagaaaaaaaagttggtatttttgagatcttgttttgaggcaaattgggttgtggttttgaggtgtatttatatgtgttttgattgtgggatctgagttaagaatattctttttctgcttcgatttctagagttatattcttttggatattcttattatttttatgaattttattatgttctttcttaatctggtgtttcgcggaacatgattaatttagtttaaataatttaattaaataaatatcactaattaacgatctcacgttaaaaacgacgtggaatgaaattggcgtacatgatgacttttcgtacgtaattaaatatcaaaagtaccttacacgcgaacccaaagtacgtggaaagcacacgctttatgaaccgttggatttggccttttttgatcacgtgatttgaaaggaaggtgggatgcttttttgggaaataggatttatatttttaaggaaataataatttattttttttaaggaaaggccaaatatgtgtcaatgtgtcatgtacagctcagacttggattggataagaaagtaaactaaattttattttggcgcgaaattgtcgggttatgtgttgccacgtcagcggtcacgagtcatgttgactttttttttccttaatgagctatttcatgcttaattatttgttaataatttcaaatatgttaattaagataatattaacgtacataaatggtgtatgattaggataattttttttgggaatgtggcgtgccagctcactaaccaaaaaccaacaaaaacattaaaggaataaacctaaatttatagatataaaatagtttagaaaataattaataatagtaataattagatgatgcgtgggatttagtgggatgatacttaatacatatggatgatgtgtaaccacgatagatttatgatgataataatatttagaagattattttaataaaagtgatacgtaatgtatagggatttctttttatgtaaatgcattatttttgcttgtactaaaaaaatattttctttttctcgtataaaataaattataatttatttctttttatataataatgataaattaattttacacgcatatttttattttggttaaatattaattagatatttttgtattttgtaaagttattaattaaattttctattttgttaaatgataaaatagactttatatttttcaaaataataaaaatagaactatgagctcaatttttaataattttattttttaatataaccaagttgaaaataatttttagcacgaataattacaaaaaatgtaactaattttgccatatttagatcagattattattaagttttattttaataaaaaaatcagttcagattcttatttgtactattataaaaataaaagatttatttaatttgtcatttaacaaaatatataatatgattagtaatttttacaaaatacaaaattcaaaataatatttaccttttaatttttccttataagtatatcatttttttactttaattattttctgtaaaaattaatgaaatatttgttataaatacaatatataatgtcaaaaaaaattagaataaattttttgtaaaatacttttactataaaaacaaaaatgatatttttacctaaaaaaaaagctaaattaatgcatttgtttattaaattattaataatccaatccaacccttgtcaccgcgcgcatggcatacttaaatgtattaattaattatcattaataactttgttgtatactctttgtccaaaaaatatggttgtacataggataatggcatttatagcatttagttggttataaggaagtttccttgttagaaataaaataaaataataatattgaaaaaaaaggacaccacgtgcctgtctcagcatatataaatattcatagagctggctaagccctaacggtgaattaataataatattaattttattattatttaaaattagggtaggtggagaaaattaaatttggttaggacaaatacataaaagaaaaaaaaaatgacttaaacaacaaccggtgtaaatggca

SEQ ID NO: 69594 - DNA, 5454 bp, Cannabis sativa
tagattgaatatagtaatatatttgaagcacgactgaagaaggtgatgaaggagaaaaagaaaaagaaaaattagtttacatgaaaagaaggaaaaaatagatgaaggcaggtcatttgcgataaaggaaaaagtagtagatgtacgtgaaacaaacacctacagtgcataagttataggatggtcaataacagtgctttttcatgtaatagcaccaggaattccaacatcatggtagggaaaaagtttggtacatataattctaaagaaataaaaataacagcattagagataagaaacatacacactagttccatccttcaagaaatcttctggtacatttccatatagtcgatttccagttaaaaagctaatggaagacaatatcgaattagtcaatgtaagaaatcagatttagataaaaaatatttattgaaaaaaaaaaagacacacacacacaaaagactgtaaactatatgtacaagtactttctagtttacaaatttctaaagtacatatgaaaattaatggtcctttcccagcaataattttataaatccagcatatctctctcaaaatttaaaaaaaagtgcactgtttcaaatgcataaccaaataaagactgggctcataacaataggcttacatgaatcttatatgcttcatctttgttgtctctgaaattttcccttctagattgttaaaactcaaatccctgccaatgacacagattcacaaacatgaaaagaaactctccattcttaaatattaaaattcctccatgagcacaaaaaataaataaaatatcggagttaagataagggcatttacatttctaatttaaattggttatcatagatcagccactttagcatgtttgaggtagtgattcctttacaaaatgaaacttacataattacagaaactacatctactagtattttctatactcaaccaaggagaagagttgaagaagataacaagagcataatgtagtgacatcaatatatacaaggtgctcttataatccaattggttaaaggatacacagagtttataaatgtttgtttcttactacttatatatttgctattactttaagttaataacaaatggaaatcacatagtcatcacttgaacagcttatataaatttttgttacatcttccctaacaatttgcttaaataaacgtctgaactttcacattaaaaaataacagtttaatacctggtgcaaacttctacagttttacatttgtgtttatcccatcatttttcaataaagctgctttaatactataatacaattaaaaatcattgccaaggactacatcagcctgtactatttcaacaaacagtttcttcttgacatcatctgaatcattccatttacaagaccttttaaatccttttatccaaggtaatcaagtaaaaaaaaagcttcgtggacacgaagatccaatacttacagcagatctagactcttccatgtccatatgtatgaaggaatattcccagatatcttgcagtttctcagaatcctgaagtgcataactaaatggcattacctaaatcatcattaaatgtgcatactgaaacactgatcatgacatagactaattgatatactgaacatacagtctaactaagcctgttgtgccattcaacgttggaaacttctgctccggcccactaatgtcgctaatcctcctacatataaaagacaaactatgctattatcaaagtaaaagcctgaaggagaacggccaatttcaaaaattaataaacaaatgcaaaaaacttatgaatgaaattagattttactcacagctcagttaatttaaccaaaagggatatctcggatgggatgggtccctcaaatccacttgcatgcaattctcttcaataattcaaataaatgtgcaaataactattagaaaacaagcatgaatatatccgtttaaatagattaaagcacttgagtaaatgtagagaaaacaattaaatcttacagtcttcggagttgtttccagttctgtataaggtccggaatgggtccatttaatttattatcgttgatcctactgtattcaataacagattgcacaagtaagacaagtatattgaccatatgctttaaagaaaatcatatgcgtatataactactaacaaatctgttaaattttctagctcaacaaatgtcaatggtagggtcccagtcaaattatttgacgaaagcagcctgcaattgtaataagaaagtgtgagatatatctatggcaatcttcataatacactgatagctaaaaacaaaaattgaaaataaagtacaagggaagaaacaccatacaaagtttgaaggttgatcagtttcccaagttcaggaggaacacttccaaagaattggtttgcttccagattactgtcatttaaagaagaaaattaaaatatataaatatatatatatatggcagacatacaattataccattgggaaaaaatttcaacaataggaaaatgaaaaagtggttctcagtagatggaaaaagtggaactttcaaagcacaaaccttaatcacaagtacctcaatgtccataacttaactatgctgtccaaataaaaataacagtcggaagttcaaaacttacagatatgtgagtctagtaatatttcccaactccttagggatcttccccgataagcggtttacgagaagagagctgaatggttcattgcagttaatgcattcgatatacaattaaatcaaaacttgaccacagaaaatgataaaggagattacatgtttgttaattgtaatgaagcccattcctgtggtattgtaccactcaagtagttatatgcgaaatcactgttagaagaggaaacagaaaaatgagacaaaagaaaggaggaaaagaaaatagatcaaatattaaactaaaatattccaaatgctcttacatttgctcaaggaaaggaagtttaaccagttgaggtggaagcacaccaggaagattaagacccttgagtactctgtcaagaatataatattaatggtgtcaggaaagaagttcctctgcaattaattgtagatgttttttatttacaattatgatttcttcagttttcttctaatcaccgaatggttaactaatttcattctatcttcccaaccattgctatcactaaaaaaaccccttttgttatacaaatcaaaatccaaactaccttcaaagacaatttactacgtgtaaacctccaaactcatacttcaaatgaaaaactggaagctagctgagaaataaaaccatttactactacacatgttctagagctcactaggcaagaaattatgaggtatctaaaggaacattcttgtaattcatgtctatacagtaatcttagtaacatgattgtcattgataacaatctctggagtacagagatatatgtatcaattcaagacaactcatttgacaatgaaggagtgatacatgattacgacatgacaattgtctatctccttgctgcaattacaagtaatgctactctcagctcccgttgttgggttttccgcatcaccaaccatttcaatttgacaagaatcagcattaaacttccaatactttgcacccattgtacttgctatttcttcaagagcatcaactgtgcataacaataattacaaaaaatgaatactcaataaaatattccaacagatcaaacagtttaccttcaacgcataagagaataaatccaattaacatgttgctcatcattaagagatagtagaatacaatttcatattagaggttaaatcaaaggtcctaaaggctaaaaccgtacacacataaacatagctggttaagagagaaaaatgtttggtcattgccaaagtaaacaccaaaaattcaagagactggagagaaccacttccacttggagcagtttaaccaataaagtccgtgaagaactggatcaaggaagccctttcaaaacaaatccattatagctttagtttttcactgccttttccttttacagataatagttacttctttcttcttttcttttttaaaataataataataataagagttacttctaatatgataaaaattactattaggagtctatagcaagttgctacaaagcacccaataacgccagagttcattcaaaaaatccaaaaatggttactgaagaaagataagtaaaatgataaaatccctcaaagtagtaaatagcgttgttaaatatctgacataaacccatcacagttttgaaaccaaagtacaataactttcccatttcgaaagtagaagggggaaaagaattcttgactcatattaacaactctggtgtttctctctctgaacaagacacccatgacccaagttcaaagctttcacttcatttctttcccactctatcccaccgacagagaatacttaagtactaaccaatctagacataaaattatccctcaccttcttgttggggaacctttgcctgagcaaaacgcatgggcaacccaaagtgactcattgcgaaaatgaagagcagcacgaaattgttgaccttcatatttacggtttgagatttttggcaaaaactgtatgctttatgcttctgtgatcttcttcagacagcaaactagccaaaagaaaatcatgaaacgggcatagatggtcatagtctcaactctcaacaatggattctgaatgggttatgaaaactaataactattaactgtttattgtttaaagaacatatagtactgtggacgacaggcgacatttttaaaaatcgtgcttgatttttatttgaacggagcccacttttcaacttttcttttctctctttcaaaaaaaaaacaaataactttcaggaaaaaatgtcataaaaatgtcattgaaatttatttatttgtttgtttgttttttctaagggaaagttcaaagtttcacgctcatggataagtaaaaacaaatcatttccgggaacaaacggtaaggtggccaatagactgacatattgaggcacacacccctgaagttaaagtcgataacaaatattatactacataaataatagcaaagaaggccttgggtataggcagtttactccatgcttaggattcatccaacccaagcctaaaactagccatatgacctcttcaagttattgcggaattgagaaagaatgaaaagattttattagaactgaatgaataaaattacagaagggaacagagtatttatactacatagcattactaacatcatccaaaccaacttaactaactccaggtgacattacaaacaaacttaactaaaacgatgctaaagaatcggttaaagaatcagttaaaacagttagaggaaaaggggacaaaaactaactgtcagtaaccgatattaacagacaacaaaccgagctacaggactgaa

SEQ ID NO: 69595 - DNA, 2491 bp, Cannabis sativa
  modified_base (50)..(54): a, c, t, g, unknown or other
tgtgtttatttcattgttttagaggattcatatttaggatgttaattcannnnncttgttagtaaatctagatcctagcaaaatattcccaacaatgatctcatactgtcctagctcgattgaccatttaagtagtcgaccagaggctttggattttttcaatacttgtcgtagtggttggtcgatgtaaaccttgataggatgagcctgaaagtatggtcacaactttcttgaggctagtagaaggtaataggttagtttttcgattggaggataataaattttagcatcgatgagcttttttctgacataatagataggatgttgggcaccttcctcttctcaaattagcacagcgctaactgcaaatttaattattggtaggtatatcttcaattcttctccgtccagaggttttaataggatgggaggttgtgcaagtcttttcttttgctcttaaaaagcttcttcacactcctcgctccattcaaatttcttgtttcctcagaggatattgaaaaaaggaatacacttgtttgttgattttaacacaaacctgttgagggctgctatctgaccaatcaaactttgtacttccttgatctttgttggtgacttcgtatctaaaaaggcttgtatttttttggattggcctcaattcctcgtgcattaacaatgtagctaggaactttccagagcctaccccaaatgaacacttgagggggttgagcttcatgatgtacttttgaagtatcttaaaataattatctaggtcccctatatgccctaacccttttagatttgacgagaatgagatctacataatacctccatgttatgccctatttggtctttgaacatctgattgaccaaatgctggtaggttgctcaagcatttttttaaaccaaatggtataactttgtaggagtacaaactaacatccttttggaagcttgcgtgctcttggtccggtggatgcattttgatctagttgtgccaaagtatgcatcaatgaaacttaagatctcatgcttgacagtggcatctactagttggtcgatcctcaaaagcgaaaaacagccctttgggcatggtctgttgaggttagtgaagtctatacagactccccattttccattgggctttagtactagcactaggttggatacccatacaggatagaatgcctctataataaacttgttggctcagagcttttctacttcctccttcagtgcccatgctatttccttgtccaataatctccttttttgtactagacaaaagttgtgggggtctatattgagggcgtgaaaaattataaatggatcaattccaaccatgtcatcatgtgaccatgcaaatacatcgaggtttgctctcaaaaattagatcaaagtagattttatttcttgcaacaaacctcttccatcttgattattcgggttggcatgtttgggtcaatctatacttcttctaattcttccattggtcgattcctgcactagcgtccctaaagcaaggacccatcttgtcatccctgccttgggcagatccctatttattctcagtttatttggccttggagctttggacgaactgatcttttttttttgcctttattagcgcgatgttttcgcattggcaggctatccgttgatccccctttatgcaccctaccccattcctagtaggaaatttcacatagagggtggaatatagatgttactactttcaggtcgtacagtgctagttggccaatcatgccgttgaaggctaatagcacatctataattaattgtgccataactgtggtgttggtagttgcctaccccatagtaaggggaaacgaacacctcccaagggtgcgatgctatggccaaagaagccataaatcaaatgcacacatggaactagatccttgagctggatgcccatcttttcataggttgacttgaaaaatatatttgaggaggctacattatctatcatggtacatgccaccgtcatgttcactatttgtactttgacgaccaaggggtcgttatacatgggaggcatcttcatcgctaaatgacacgagggtatcattggattgcatccaatagatttggacccaacccaaccaaactgatccaatcaaattatttattggatattgaatttttttcatttgatccaatccaatcgaattgagtcatccgatccaatctgattcaatggatgtattggattggataggtttcaaccattagatgcattgactggttttttattggattggattggatccatcaaatccattttaactgccatttaacttaatttcattaaaaagaaaaatatatataaaaaatataatttaaaacttaataatccaaatatataataaaaattagtttagttcaacctaattcttatgatctcataataaaactgttaaaaaataaaatttattcaatacgtattgacaattttattagcgtttag

SEQ ID NO: 69596 - DNA, 1632 bp, Cannabis sativa
tcatacaatttctcaatacgccaatcaactatttgagacaagtactagagggtcataatttcaccgtggtaataatccaatttttattttttaaaataaaattaacaaagtaaaaaatttgagaaaaaaaccatttatatatttttgttcattataaattaataattacctgtaaaatatggccaatgttaacaacaaaagcattagggagaggcttaagtgcaagccattggtcatctttcaagacttgaaggccatccatttcttgaagaagtaggcttatgaggttagcatcagcatgtttaggtaatcctaaagtcaagcttggatctgggcatggtggataatgatttatgcccatcaattgagcttcaaccaattcaccattgttctcaaagtatccatcttcaagccctaatccttcactaatcaattctaagatatacatacttagcttcctcacctcaactgtgtaagccccaaccacatctctataaatgacaaagaaaacaaaaattaaatagaattaaaataaattgaatgcgaaatatgcttgcgaagctaatgctcgaaaattttgcaagtctctcgaccaatcctgcagtgtcacgtggcgtggctccgtaaatgatgagaatgggattccataattatagtgatcagtggagtaattcatgctcttataaatgactcaatatttttacatttaatatgtatgtggcacaatattgtacaattaggtttagccctgcaccttagtgggccttagaaaaaagatttgacccttatttaaaaaatgtggtatttttaaaaccaattaaatgaattatgtgtatttttaaaaaagaaaaacctttctttgctatttgaactaagtgaatcttaaatatagagtaattgagagatagaacatttttttcttcttcaaattttatctcatataatttactaattttcatagctgactaattttcattaatttatagcgatggtctgattgaattgtgtatattttgtagtagtagaaatttgttagttttttgaaaacacaagtactaaaatataaaaataagagtgtgctataataattgatcaaaatcacttatataaatatatatataatatatatatacctatattgaggagggttttgaggccaaaattgaatatgttggtgtagaggatgacaagggtgtctcaaagcatctctccaataatgtacatcttcatttggataatcaatactagtaaatatcttacaacttttcaaaggatcatcactcaagaattttgctttctcctcaataggaatctcaaaaaactctttactcactttcaatacatcctctaataccttctcttcaatcccatgattaaccaactacatatccatatataatatatattagttatatttctatataaaaattaaagaaaatttacacaaaaatactattcttagtaagaaaaaaatacatgtttaaatatttttttttatatttttacggtattttataaaaataacacgaaataataaaaattacataaaagtaacaggaaaacaacacaaaaataatatataaataataaaaaaaaaaccaataaatcttaaaaatcttaaaaatatttaaa

SEQ ID NO: 69597 - DNA, 5170 bp, Cannabis sativa
  modified_base (358)..(366): a, c, t, g, unknown or other
attttaaaactaattaagtgattttaaaattaattattttttattaaaaaattcattttgatattaaaaattcaatttttgtaaaaaaaaataaattttacacgaacaaacttgagtctattttatttttcttaaaaaatgtagatttgtttaagtaaacataatattttcttagtttaatttctattttttaaaaaaagaaaaaattacattttattgaatttttaattattttttttttcatttgttaaaatatgagtttataaatataaataagtttgactttttcttcagaaatgttagtttatttaaattatttattagattctcaataattttggtttaattttttaagatnnnnnnnnntaaataaaataaagtttgattttttttaggaataatttaagttttttttaagtaaaattaatattttgtaataaatttaatatttctattatgatttttaatactttttattatttttttagaattaatagaatattataaaagggtgaaaaatttgtatcagtcaaagttcaagtggtaaaaatactaatttttgacggtagaagaaatagaacctaacaaaaggggcataattatgtaactattatattttagggagaatttttaacaaacagtatatattaggagacaaaattaggtagtaccaaaagtttaggggcaaaaatactaattattctaaaattaatttgtgtgcttcgtctctatatagttggggtaaagagattacgggcacatttaatcattgtattaaaagttataaggcataattgaagagattacataaaaatgcaatgtggcctcggttcaaaaatacaatgagattaagaagaaatttttaaagtgttagaccagcatgaaagcttttggaaacaacgggctaagtagttttggttatgagaaggcgatcaaaatagcagctattttcataaagtggccagtagaaggaaaaggaataatcaaattcagcatttgaaagatgaacaagagtcatgggtttcgtgggattctggtttacagccagtagttttgaactactttcaagggttgtttacaacttccagtactggttgtaatgaggttgtggaatgtgttccttcagtggcaccaagttggattaacaaagaattgtgctatccaattatatatgaagaagttaataaaactttatttcaaatgcatcctgacaagagtttggggcctgatggaatgactgcggccttttacaaaaagtgttgggaaattgtcaggagagatgtcattaggtgtgtgtgtcagttctttgaccaacgaacctttgagcaaggttgcagcgaagctaacatcattctcatcccgaagaagaaaaatttagagcaaatgtctgatcttcgaccaatagtcttatgtaatgttatgtacaagatcatcactaagttataatcaatagaatgaaactgtttatggatactattgtctcaaagaatcaaagtgcgttcatcccaagaaggttgattttttataacgttttggtctcatttggaattctccactatttgaagaggaaaagaaaaggtaatgatggctacatggctctaaaattggacatgagcaaagcttatgattgtgttgagtgaaattttcttaaagttatgctccgtcaattgggctttgtagaagaatggatttgtcttattttaaagtgtgttacttctactagttaccaagttgttcatggaagtgatgaagttggtccaattattccgtctagaggtatccgccaagggagttccttattcccttacctctttatcttgtgtgtggaggccctctcaccgtttcttagaaaatatgactagagtggcttgcttcatggttgtaaagtggcaagtggtgctccaagaatttcccatacgctctttgttgatgatagctacttgaactgtaaatccaaaagaataaaggcagtttgaattcgaaaaattcttcataagtttgagttggcttcgggtcaaaaggttaatttttctaattcctctattttttcagttccaatactattgtttcactaaaagaaaaaacttagtaattttttgggcatggatgtggctactgatgaggttagtctttatttgggactccctagtactatgagtcgcaataaaactactaatttgggctacctaaaagaaaaaataagaaaaaggcttcaaggttagggtaccaaagtttctgtctcgagctaagaaggagattttaattaagatggtagcataagatcttccaaattatgtcatgagtgttttcttgctacctttcgagaccattagagagatcgatgaagagtttgttgtcaaagttttggtggcaatcctctactagctctactaatggtattcattggatgtcttgaaagcatctatgtaagcataagacaaagggcaaaatgggttttcgtggcttgagaaattttaatctagctcttttggggaaacaaggttggtgtctactctctaaaccaaaatctttagtggctaggatatttaaagccagatattaccctcatggtgcttttctttcagctaccaatggatctaatctgagctttgtttggcatagtattttggaggcacaatagttagtatcaaagggggtttagtggactgttggagatggtaaaaacattgcagttttaggtgaaccttgtctccctgataaactaaatcctacggatatctcctcacaccctagccttattggggctaaggttggtaatcttctgaacatgaatggtacagattgggatagtgaagttcgagctaacctttttgagcaaagagatcaagatttgatcttacaaattctagtgtaaaatcttccaggtcatgactgtcttaattggtcccatgaattgtatggtttgtacactataaaaattgcttattagcgattgcttaagagactcatggagtagttactctcgataatcccaccatggatcagctttggaagtcttttttggagattaaaactcctcccaaaaatgaaaaacttgctttggagagcgggaaaagggtgcctccctactatgactcaacttcgttcaaagcgtgtggaggtgagtactacttgtcctgtctattctttagatgacgaaacaatttttcatgccttgattatttgtctagttgctaaaagtgttgggatcgtgtgggcattgaaacaagtttgcaactgaattcaacatttacagactggtgtgttgtagtcttttttgtgcttgatctggatcagaagagattgttggtggctctctgctgggctgtctagaattctagaaacgactgagtgtggaaaataaagtggtgctcgtggagagcattataatgtcagctaagaattaccttaataaatggcttgtttgctcatcattttgttatggattattcgtggtctagttttatgtcagaggacagtgttgtgcaatgaaaggccccccaaggttctagcattaaggtgaatattgacgttgctttgtttagtgaggctcgtaagtatgggaccgattttgttgctcgaaatggtgatggtttacttgtagaaggttgcaccagattgttccatggctcggtgtccgcagaagttgttgaagctattagtattcgagaagctctaagctggataaaagagtaacaatggcctcaggtggtcctcgaaagagactgcctttctttagttcaagccttgcgtagctctatagttaggattttcatgtttggttaagtggttaacgactgtaaggctttacttagtattgtgagtattatttctatttattttgctcaacgatcagtaaatatggtgacttataactttgttagagcctccatatactactaattgtcgtttcagtttggagtatgttcaaactaacttgttatctgtttggtaactaagattgaaagttaataaaatttgatctttcattcaaaaaaataaaatgtattaataatataataaaattgtgatacaattatgataagattaaataattaacagtattaaattagtacataaatttattatcatatataatttgtacataaaaataagaatatatttgtaatagttaaaaaaatttataattttttataaataaatttttttacacatataatataataaattaagttctataatatacattattataaatttttctctaagcatatttcagttagaattggcagtcttaatcaatattactaggatacatgatagatgtatttcattcattaaaggccacaacataatttagtaaagatatgtatctaataatgacaattataaaaagcttctaaattttggccccaacatgtccatatatatatataacttttctctcaaataataattaattagcgaagaaagcataattaataaatatattattatgaaacaaataaataaaactaatttataaaaacaaaaataggcagcaatttttttgtgagactaaattgaattaaaataaaagaaatttacaatataatttgaatatcacacgtacatatataattgtcctttaaaaatacactcaaaagtggacattttatttttactaaactttcttgataaaatccaaaatatataaagtattatgagtttatactagaaaattctatagtcaaattctgttttttttttatttttttttatttttacatgtactatattatactttttcaacttttgttcatgttaaatactcatgtgttagtaaaattaaacataagtcctagaattaatttaataatctcaatactttaaaaaaaataattaatgatttgaaaattttaaaaaccataatttaatgtatatcagaattctgaaaatacaaatcctaatatattacataagatagatatacactaaaacaatattagacatttttcagccaaaaagtagaaaccactatgtgtacgtatatatttgtgtacacatatcatttctcgtatatactctctttccaaaattaactccaatattatcttataagaatatttttacactacaaataaaaatcttactattaatcataataaaatttgtgattaaaaataaaaaaaattgtgactaattataaattatgaaattccgtatttta

SEQ ID NO: 69598 - DNA, 5031 bp, Cannabis sativa
ttttttttttttttgagaatacaagacataataatatttctaccaagtaaatttatcaataataaactaaactaatccataataaacagttgcaggaacgcaacatttacacaagcaatattcatacaaacatatgtaaacgtaaaatggtagcaacatttaattacaatgaaaaattaaattaaaacaaatagtttaagaagtattatgtatttataattcaagttcactataatttaaaaaaaaatacttaattaatacttcaaatttacgaattgttgaataaatatattagtatcaaataacaattgtaatttatgttgttggattcttgacttgacttgtcaatatttatgaagcataatagcaaaaatactccttaacttcttttgtgaagtgctcaatctatcttaccttatctgtattagcaaatagatacaaatgtcaacctccatctaatttgatcgagataacaaataataaaaataattaattggcaaatatatcctaagaaaaataaatttagaaaatacatatataattcatcactttatttttcattatatacttttttctgcatgttggttgtgaagttaaaagttagagtaagtaatatttgtatagttttgcattaaaaaaaaacatcggtgaaagttatattggtttgcaaatccattgcaatataattgttatttattaaactaaattgcgaaattgagcatttcaccgaaactagaggaacttttatttttaaaaatcccttacatattgtttccaacatctacatgaaatgaggtaatataaaacaatgtataatctcaaaattccacaagtacaaaagatcaagattggttgtcccaagtccaccttcggcctacctcctcaagaaccttcgcacgtgcctggctttttcttgcttcatcctctacccaagatctgcataccaatccttccaatcataagaactacaactactacatgttatttataacattaatgcatggctccactcaaatgaattaataactaacccctccacaattcaaaggaacaaaatgatgagcaatagtacaatgttgctaagcaagttagactaggcattcttagctcttcataaacaaaacatgggggtaaatgtactgcatggagaattattggaacatacctcaaaatcctgagagcttctatctcagcctcgagtatagattttgtatcaagcagtccctcctgcttggactctaaatcattgagcaaattttgcaaattcgactgctcggccacatacaaagccctctcggatgcaagtagttctgacatttcattgacctcgtctttcagactcccaagtaattgtctctgacagtccatagccaccttctctttgaaattattcgctaaatgtttatcttgaactaccttctcctgctccaaatcataaactacagcatgatatgccttctccacctcaagaccacggtttctttcttctttcagtttttcatcccaaaacctctctatgtctcctctgtcaagcaactccgatcggatggcttccatctcaacttttctactagaaatttcagctttaagtcttaacaactcattttgtatttcctctcccatcctgccacttgttagtgccactgctgcctgtgcttttgttgtaggtttgtttggttgaagccgcctgctctgtcctgcagaaataaatttcaactattcatttatattaaacttaaatagttgacccttttattcttctcagttttcttcaaatggattgagaagtactcatcataattgatcctcgaattgtgatctttgacacaccatagttgccattttcttatccttagtccccagtcccacatttttcttagaaaatttaaatatagcaggtgacttttagggataaaacaattataaacttatattgattaaagcttcgtatcatacgtgcagttatcattagaatgcttttctttccctgggtacattcattcatgctagtgttttctccacatattatagaaatcggcaatctatattttacgcactatattgagtaatcgttatccattatagatttatagtgcataataattgggaagaagaaaaaatcaaataaaaggaacaagagaaataccaaaaacttgtctgattatgctcctgtcaccagccaagatgtccatataaagtcccggtgctacatcaaatgtgagccctttcacatccatgaaacctacttttttagttaatatctggactgtataaaagtcaggttttaagagatataatagacaaaataagcagcatgtttctcgtaatccattaatggaaaagtgaataacaatccaaaataatattttcaatacctgttcagttattccttgcaaaaactgatactctagccgagctttccattcaatcaggtcctctcgaggaataaaactgtagaaccgtagattgttgttgagtaagaacaaatttaaacatattagcagagagagaaaaaaaattatatagagtaccattctacctatcaggggaaaaataaacatgtcttatgtcattcatatcattgtagctggacttctgtgataatttgctcgaaacaacaccagcctctgccaaggcttgagaatcaaaagaaaatgttcagatacatttttgtttgagatacataaaattaaatgataagatcaatccttaccctgaatggacacaaagtctaggtcttgaacgctaacatcatcaaatgcagcacttacggacccagaaagtgaaattgatggaacaattcgatgcctagggttcctataagccaaatccaataagtagtccattgaaaaacatacacagcactctacgagaaaaattttctcagttactatcatgagcatagttatacctctccaatgacgagtttattcgcaccagccatcttgcatattctcttctcgtacacaattcattagccttgacatcatcttcaattatctgcataccttatttacaatcaacatatttcatgctcagttctgaacccagagtttcattagtaccacgtcaccaagtttattcaaaagaatcatcactcaagtggttgggtgggtgagtgtgtttgggtggtgggttcaagtccacatagacatatcttataaaagataaaaactaaaagtttacaaaagaatcatacatttaaaatttcaaagataaaagctcaagttatatcgaaagtagaaaatttgaaaatttaacaaagcaaatgtatggaaatccctatagttatgaaatatttcgaagttctaagaaactatattttccaatcaaccgactacctataacaggaatatccaaattaaactcataaatttatccctctagtgtccagacttcatagtttaagttatatcaaacagttctggtggcttaaattcttttaattgtttaggcattacacaacagaaaaaaaatgcataagtatacacgaactcttaatggatggaaaactagaagacaataaaagttaagcacaccttcagtttcttcaaaactgataaagcctcctgctgagtagaatcaacggccacaggaattataacacgctccagcttctctgtaaatgctaaatcatgttggaaagaaagaaaagtgcatttcaataaaattaattcaataacaagtcaatggaaaaaatgatatgactacaattctttttgagatgagacaacacacaagagctattaaagagggggaaaaaattgccgtacgtggagtttcaatttccgttatagcagtaggttcggactccacgaggtggtctccatcagattcactcaattccgtagtactgctttcagttcctttggtatcagttggatttagtatctcttgaaaagtatgtaatggactcgtaatttggaacttaaaacctacaaaataaacaaaattgcaattcatgatgatcatcacaaaactaaaagaagttccatttatcactaattttcatgatctgacaacagaaccagacgggctcagttttgagaggaaaaaaagaacaacatcattatcagactaaccttttctagttatggagaagtaagcaattgcagcaacaagaacagccaatgaagccccaacactcccaacaacaaatataggcaatcctgcaatttttcaaaaatgttagacgagttaataaataaaaaaatttaacttaataaaagtagaatcaaaattgaaaacctcgcttcttggaggagaccggagactccgagatggcccaacccccatagtcattgttgggattggggtccggcgacacccacgagagttggagattggactcaataattgaggcagagaaacgcaccccaaagcttgcgaatctgggattgctaggaaatggcttcgaggatatgaagattgagacagaacgacgtcgtagacgagataaattacaggttgggaggaacagaggggaataagatggggcagacgaagcatgcattttttttttttttttgtaagaatcagttgtgtttgcaattagggtttagaattggaattgaggtgagacatagaaagagaatgagatttaagattagaagaatgaattttgtgggaattgttgtttgtgtttggttgggaaaaatgagaaaatgaagccctgaaagttgagaaattgcagcagaagcagtagtttggtacgcacgcacaactcaaggaaaaaaaaaaggaactctaccacagtagctgtagctactgatctattctagttatgtggccaaatgaccagtggcattatggcaatcgtgctcaaaatcaaaattatacaagtgtgtatagtgtgctgtgtgtatgtgtcgtgtgtgttgtttttcttttttgagagcattacaaaagttcaattgttttacaatgttgatactcttttactagactcaatctcaaaaggaaaattatagggggcaccatttttttttttttttggtgtagcactattcttttaactaaattataacctta

SEQ ID NO: 69599 - DNA, 2047 bp, Cannabis sativa
ggtttatgtaatgaagtcattatggtataaagaacattggttgaaaactcaaaaacgggacttttaatatgtgaaaaggatcataccctccatcaacaatctcatcaagacataacagtataagatccaaattctcaagtgcttcccgtttatcaacagtattcctatacaaggacaaagcagaaaaaaaccacaagatgagaaaataagtaataagacaaagcattcaaatgaaggcaaaacagtaaataaccagagtagcacctcaagatgagagaaactgcatcaaagaaaccctgaagaactgtggataaaataagctcattttcgtcttcccctcctgtcacatagaagtgaaggtcctggacaaacttataaataacaattttgtcgtcgaacatcgctatctccgctgcatatcataattagtttcaacattaaaaagaatgcaggcatcttagtacatcctaatccaataacaaattgataaagaaaattcatttgcaaagcggcaatagcagtgcaagttctatcatatttccaaagtacgaatcttgtggcaatacaaaggggattatcttagtctaaatcacgagaaacaatatctcttgcacatacaaaataatagaatataaggaatggagcacctaagtttttttacattatttttggatcagtactgtatattgattcaaattttttaacccaaaattctatatctcggaccatgataaaattgtaaaaatcatgtctgtataatcaattagaagcataccttctgtacggggatttgacttcaaagtcctgtggaagacagatttttcaaaagctagtttatgagtaagtgttggccactcatctgtgtaataccttacagcaacacgctgcccctcagagtctagtaaaagaatgtttttcaccgaagggctcaaatcctatcagaaaagcaataaaataaaattacttagtgtttcaataccaatatgagaaccaaaataatgctgatgatcacttatataaaaaacctcttctaagttttgaggcattttaccaaataaataaaccccatttcagaaagaacaaaaacgttccattgaagcatctaatgacgaaatgattttgtataaagtcaaatacattatcttcttaatacattatctgtcaaggttcgaatccaactctaatacacagatctataaatgggacaatcaaaagtcgataatcacacctaaaagtaacagaaatttgtaagaacgttctgaaaaaaaagaagggaatacttcccgactcaaaaatttaactcggtgaatagatctttacaacgaatagccttaaaacaaatctgatgacagaactgtaaaagaaaaagagagcgaaacttacataattgttgtaaatactgcccatttcgacgatataccagatcgggggaatttgcagagttcgctaatggagaagggagttgggttcttcgatttgtttttaaaagaaagacaaatgaccaattaaggagtgtctctttcagcaaaaataaataaataaattaacgagtgtctatttgttattttcaatttttttttatttttttatattatatatatataaaaatattcttatgaaatcgttctattctagttaaaatctactctatattgctaaaaaaagtctaaaactttaaatatttaagctttttttttagaataaatatttaagcttattacattattgtattaacaacttgtataataatgtatgtaaagtatttaattacatattagtttgacaaattataatattttgagagtttttatagtacttttaaatgattcctcaaattctgtgtaatgttgtttgaagtaatgaattttagttaaaaaaatggacaattagacttttttattcttatgttttataaaatttaatcttctattcatgaaaattttaatggtaactctaaaaaaatctataaaaattaaagcctccaaaaattttgttatgaaattattttcatttttgtatcgagtttaaaattttatagtaaataata

SEQ ID NO: 69600 - DNA, 1857 bp, Cannabis sativa
gaatttgtggggtgcaccagaatgattttgattgtttgaaccagagggcttttgaacaaagtttgttgtatggctattgatctatttgttgttgttggaaagagcattgagtctcttaagtctaccatcaaagctaagcaaaatatttagcagctgctgccatgttgtgttcccgggcttctatttgcacaactactgacaaatattctacatccaatctagacaaaacattagagattaaatgtttctcagggcagtgttcacctacctaggccaatgagtcagcctaaatacgcttctgcttcaggtaatctgtcatggtttgagttcctttgcgagtagtctggaccttggttatgagatcatccatgttagcccttgagtgtgctccataaagttcttcaagagcactccatagttcatcagcactttgacaccccatgacttatgctgctatggcctctgtcatggatccataaatccatcccatcaagagtttatcgtgaaccaaccaagcttcaaaatcagggtttgattccatagcagactgagaggttttgtctgtatcaacaccagtagcagcaataataggtcaaaattcaggaagggttaatcgagtgccattaaggtatccttccaagcgatcgatgacctcagatgatggtggtaaccattgttttccataaagaaaaattatttcgattaaattttagagagaatggttggctcaacatattgctaaaggggttggtaattggagctaggtgttgatggtgctacagccattgcagagactttagctaagatttgggactatgtttgtggagtctggtcctgaggggttgccatggcgttagccttttgctatgataccaaaaaagtttctaaaagaaacacaacatgaataaaaccagttgtacggctggggtctgtcattctcatttataggcaattgctgaatacagggcatttcatcatacaattaaaggttgacacgtagcaaatgattacaagggaatagaaaaggaatcaatcattatggtgctaacagtatgaaaagacaacttgagaggaaatctttttctcgggattgcaagctccaacagaattggaaagaaggcagaacatggacgaatatacccctggatatttatctcgtgacaagtactcttcgaaagcccaagtcacccgctttctttgccatatttttttatttaattaattattaattttttgcttaaatatatactttaattttaagattggagatcgaattcttgtataccgatactatatatgctaaactatactcgaattcttgtcaaactatcttgtattctgttatttaaagctttattagtattgttattattattcatatataaataaatattaataaatgttccctttcaataataattgtaaaagatttaaagttttaaacctacgatagagttatgataattgaataaaaaactatatatatttgctcatatataagctacaaataattagtgtaataagtttataaataaaaaaaaattatataaagaaattgaaaacagaatatcaatttaatttattaaaacaccataaacggccaaattaaccaactagatagatcgttcatgcatacatatacaggaaaccctatatatattaattattagagtacaacattatttcactgcatgaacattaataagacatatatatataaagtactcattagaaaaataaaagaaaaattaaatttaactttgatcaataaggcgcgcggtggagcatcgatcgatgatgattctctgatgatgatcatgttgatgatgttgaattagtagggtgtttgaattcgga

SEQ ID NO: 69601 - DNA, 3208 bp, Cannabis sativa
tacgtacacatttgaatcatggagtcagtgatcagcagagtgatgatattaactcaactctctcctaaactcaagcctagctaattacaattaattaacttcagctcgtgagaggactaacaaagttaatcctcacacactcaacaacactcattcgaatcatcacttgaagatcactcactcagccatttcataatcatcatccatatcataatccttaatttgccagaatatatatatgactaacccactgtatgttgttgtgggctgtacgtacacccactttctagctagctagttgcaataaccatatatctccagttgagtatggaatggaacccttgtggtagttggtccctatctatgctatgggttctcaaacttattttcgtgggtcattaattatacactcaaatcagccctcatgctttcgcccttactaccccttcctccatataattgtttgtcaatctatggctaaggaaatgagatgggttgtataacccataattttattaattggccttctactcttggttgtacaaactatcaatatttgttaaggattatttctaccacatactcaattttttttatctttttactcttttactgtggcgcgaatgatcattacaatttgaaattttacatttgaaaacacaattttatcttttgatttttttcttcttttctcatattttacttgaattaaaaaaattgttacaaatatccttcttcaattttatattgttgtttttttaaaaaaataataatttacttatatgatcattacaatagaagagtaagctaaatttattaatactaagcatacaaaaattatctctaagaatacatatatatttctaaaagctatctttagaacggttatttatgaatgtatcttttattagagtactcttcaactgtgtcaaattaattagcatatcatacgagggctacatcaacaaatcgtttagaataataatctgcgatatatatagcgttgtacataaattgatcaaaaacaattataattgatcgactcaattataactcactgctaaacattatatatcttatctagttatgatttggttgaatcataagttatcttttaatttttcagttaaatctcagttcgattgatggatgtgaagtgtccaaaaaatcaaatacgatctaatatatttaattaaattaattagtgtttttatttgattgaattggtaataattagatttaatattattatacataattgtatatatttgtaaaaattaggattaaattatatttattatttttattctttaaaaagtatgtaattgaaaataaaactttaaattaattatatatttcaaattctaacaatttttttatatgattttggggtaaaaatatattattgaaaatttatacaaaaatagataaaattatatatataacacatattttattgatgagctcattaattaaaaataaacaaaaactgaaaaagtggatgacaaatttaaggccatatttaagaaaactagtattctttagaaaaatgtatggacttgagtaaaacataatacagaaatattaggtatataaattatgttaggtttactctataaaatattaccataactaacctagctaatatcaaagggcatgtggatagctagctaatatcatcatatggactataataatatattaatgtaatttcaaaaatttattaattcatacataataattaattattcataagaatcataaccatataaaatggtccttattaatttatctccaaaccccatctaataatatataactaacctatattatatatgtatatagctcactccaaaaatattaattgttatttataatttttagtcaattttatatagataggcttccttctcgaagcatatatgtattattaattcaaagctatatatacatatatgaatgaaataagttgatcaacttaacttaatactcttcgatcgcttttatttttatatatatcatatacgatatgatgatggaagtagccctaacatcatcgtcatcaccacagagactgaaagccagtccagtggctttggatgatcctctgccgccgcaagagaggacggcggaggaagaagccaaatacaagagatcaaggaagagaagaaatataataagagtaagctgtggaatgttggtagtacacatcatcatattggttatattaagcttaacagtgtttaaggcaaaggaccccaccacaacaatcaacaacttccacgccagcaaccttacttactttcttgacatccaacggctgagagttgatctcaacctcacactggccgttgacttgtcagtcagaaacaagaacaaggtttcctttaagtaccacaactgcaccgccgcccttaactaccgtggccacctcgtcggcgtcatcaacattccggccggcaacatcccctccgacgacacgaaacgcctcgacatcactctcaccatcatggccgatcacctcctcttagacgactcccaagacctattctctgacgtcgtcgccggcgttgtgccgatgaacacttacttaaagatgtccggcaaggtcaaaatcttcggaatcttcaagattcatgtcagggcaacctcttcatgcaatttcaatgttaacatctcctcaaccagtatcaccgatcaaacatgcaataataaggcaaaattatgagattatatatttctattttttccatttcttttttgtacatatatataaatatattaatattaatgcatgcatgcactactatatgttatattatattattaatatacattttttgagttacacatatttggattcgatttccgcagcatctatcaatattttctatgactacttgaactagtttctttgtagttttattaataataaattaattaataaagtagcttagcttattattacttggttctttcttggaatttatttttcaaactagctaattttagcttttcacgtgtgttgttgttgtgattttattttttttatttttgttttgggcaaaaacagcttaataacaattttagcctaccaattacttttattacactgtattattgtattgtataatattatattaaattgtatttcatacaatatttttatataaaactatatcttgtattaacttttatggacacctaa

SEQ ID NO: 69602 - DNA, 3997 bp, Cannabis sativa
taattttatcatcaaacttttaacagaatgaacattttgttaatttttttataaaaatggatatttattaacttaattgttagatttagggctacccacttagtaaaatgatgtagtattagagatgctctaagtagtgatccatacaatgcttgccaactcactttgtcaatttacttgtcttggattaggtggttcggaagaagttgattcattattgcttggaaaagaaagatacttatggtacaataactgcatggaatattcttatctaacattgcataattattaatatgcttcatgatgatgatgttgaatagttataatgttgtaatatattatatgagcttttatcatttatctaattttgaaggttactaaatcttatattcattagtttagcaactcacaatcacatccatatcttaatagatattattaggaaaatttaaattattatatttaatttttttatttaattaaaaaaaatctcattattatattatataggctaaataaatctatgggttgagaaaaaaaattattcaacaaagaaaatagattaaaaaaaattaattttaattatatattttatataaatatagttttaatacagtgtaaaaaaatattttttgatattttcttaattaagcaactaaattaaatataaaaactaaaatgtactttttattattctcatcaaaatctaatagtttaatatttttaaaatagatatttaaagttaaatttttttaataattatgatatatacttataggtgtgttcattggatcacatctaaagtttttatgtcaatcgagatccgatccaacaattatatattagatgttagcttttactatacgatccgatctataattatttcagtcatccaatcgatccaacatccaatggatattagattagatcggttttatccattggatatatttcataaatatttattggtttaatttgagtttacctaatattttagacctagtatttatttgatcgcatcaaatatattaaatattttagatacagtatctattggattgaattggatccaaccaatctaaataaataaagaagattctaatgttaatttatatatatacatttattttttggggctttatcatgttttacacttcaaaatatttcttttttgcatttttacgaaattcttcatagaaacacttattgcaactagcgctgcaacctaaatgcaataaaaaatcgtatagatacctctattgtaactagcactgcaaccactttagaaactcaaaccgtaattttttctaaaaaaaaaagtaaataaaaaaaacagtatatggggtaattcctcctttttttttttacttataacagcataaaatctaattactcattaaagctgaatgaaaatattcattatttcaattggatgtatttaatttttggatacctcatccacatgcaatcgaatctaatttaatattcaaatataacacatctaatctaatccaattaaaattaaatatcctgtttagccatttatacacacccctacatatgcatgtcaatttgagaaggatgcaactcaaatagattttggattttgaatcagaatcaaattattacaaaaagggcaaattggtgttcaattggattgcagcaatacaattagttttgtacagtacaattgaagaagatttgactcctgctgaatgttcagaaagaacaagattaaaaaaatcatgaatgttgtcgacttgcaaatgtagccaggaacttaaaatttatcttagaagttaaaatatgtaacacatataatttaaaaaaatttcaatttcccatattttgttttaattgacttaaaacaaaaccctaagaaatcccgaaagaaaatggtttcaaaaccttatcctgtcgtctgaaaatggttcccctattgttccagggaaaagaaaaaacaaaactcagacccttaatgttcggcaaaggagaaaataataataagaattgttgacttaactccacccaaggcccactaaagttacaataatgtaagaaaacaattaaatatacgtagagtggaggtcgtaaattccagcaataacccattatctatccaaccgactacgaccttcaaacaaagcccagtgggacccattacaaccaacccatgggcccattctaatccctacccaacccctacccttgaattgcgttaagagaaaactgtgtctgtgtccgactgtggaggcattgtctttatccaaacccataaaacaatatttcttttaatctcatctcagcttaactcctaaaattcacataaaaacgtcattatatattaaaagcccttcttttctctttcactagtatgtacatatttggcttcattctcacccgagaaaatgggcaaatttttatatttttcttattaagttgaatagaaactattaacgaagagctttttctttctttgtttgcctcataaaaaatgtaatagaaaaagataaccagttttcagtcttttccttttctcattttttctttctcagctgacccaaaagagagccttagttatcatgcatcaccagtgcctgccaagagaactactgcttccacctttgttcttgggaaagaagccattcttttgctttgatttcggcagctcatggatgtccatcacttggatagttctttgcttcttagcttcaacaaataaaacacaaagtaaaaaaagaaatcaatacaaattaatcaaaaagagacacacaaacatatgtaaagaaataagcagagtaaatcacaccattttcagcttctttgtaatttgcttggagtcgtttccttgctgaagccagctttgcagcatcaaaattcatctctctttgttctttttctctttgttccctcctctgtctctgcaaattgtcaaaaaaaaaagttaattttagtgaccataataatgaatgatttccttttggcacttcttatgttttacacaatgaactttacaatgttcagcacctgagtaaagacttacacctctaatcaaactaggctaagatttcaagtatttggcagagttgagttgtgtttcttatgtttttcagaaattttatattttcttcctccaattttcagaatccaaacatagagttagaagactctaatttggaatccatacattttgaagagctgagtctgagtgtagggcagatgaagtgattggtttcgatggagcttctctcctgggagggactgctttgggcttgcgttcaggttctgaattgttcctctctgatccagaacttccatctgtgttgacaagaataaaacaaaaagaattaatagggaaaacccaaatggattaatcagacggaaatgaaggtagaagttttagaatatgattctactcactgtgtgggttaggagagtaagcaaaatcaggaacctaagaacaaaatcaaaaggaacaaaagaatattagaaagcatgactagaaatcagattttccacaactttgtacccaaagaacaaaattaaatggcaagggaaaaaaatcaactagcaaaaggaatctctccaacctggtgatgaccattttggggaattctctgtggcggtgagtccccatctaaagccaatcatataccaaatgagaacacacacttaactagttaagttcaaatttcaaaccaaaaggataaaactaaaatggaaaaaggacttgtactaatgtacccatgattgcagaggcatgttctccagggttatttaattttacccattcatccacaatatccttccatttcctgataaacaaacagccttaaaaccaaataagaacccaacaccatttttttttaagaaaaaaataataataataataaaattattccttttcattgctagctcaaacaaaggggaaagttgtcatcaaaacctgacaagttgcttcaccaatctccgaacttcacttgatgaatgcttcctc

SEQ ID NO: 69603 - DNA, 3382 bp, Cannabis sativa
tggaagacaacctggcagctctgacaccaaattgtaataccctactagtttaggcatgttatcgtgatttatattaactgtgtattccattgctaatcaatgggtttattaaaaatcatgattaattaacactttacttaatttccctttgattgaaaataaacattctttgtgtaaatcgggattctatatttcaaatgtttacaaccgtgttacaaaatattaaatacaaaagtttttgcctagtgactatttaaaatacagcctgttgtcctaaagatcgtatgctccaagtttaaccaccctgatatgtacaatctttatctgctcgcacttactattgttcaaccttaactttgtccttacctacacaagtaaacagtaactgtgagtcaacagactcaataagaaaagcataatcatatcataaatataaaccagattataacaaggtacacatacacccaatcataatcttatctcgtatcccaaatgtaatgagtctaaaatgttcgtacgatagtgttattgaccataatatcagcctatactcagtactctagttgtactgatgtgatagtatcgatatctaatataagtctatgtatactgataccgctatatcaatgtaatgtaacaagcattcataaacatgaacactaaaaatgtaatcacatatgtatatcattatactaatcttaccttgatcccaaattcaagtatattgatcaacctgaatggaattgctgcttgacgatttacaggcccctaagtcacaacatacttaaaactgatgagtgatacggtaaatcaatttttggggactttaatcaaaattaaaagttttcctattgctacaacatgaaaatctaggttgcccaaaatttccacaatcggtaaactggatcccaaccggaaaaccagtttctatgggttttgcctggggggaactggtagaccggttctatagggtaaaactgaaccggtcgacttatttagtgcaggaaccacaagaaacctcacacacaacacaattcaactccaaatcgtttctaactctccagaccacctattcaagtcataaagaacatatttcaaggagtaaaaatagataatatcctctgaaacaggattcaccattaaagatcaaaacttgagctctaaagctcaaactttgtccaaagttaaccacaagcaacaattcacacataaaataactcaagtaaccctagatcaacaccagaaacaaatttttaacacttctcaaacatagtgaaaaactaaagttgcatgaaagcctaacttaattcaagaaaaattctaagggaaaaggaagcttaccatattcaaagactatctcaaccttcaattcagccaacaacttcccaatttagtcagaattgaacgagatatctcttgttttggtgagggtttcctaggacctaactaagagagagaaaggaaagagtatgttttcgaattttctaatttttaaaataaataaggataatcttaaaaataattatctaaaaatataaaaagaaatcagattaaaaataactaaagagtaatcaattaactcactaaaaataaagtccaacttaagacaaaagactattttgtccttgtttcatcaagaagtaacattgccacctatgggtattttggtcaaatttttaaccacaaatacttttgacattctcaatgtctatctaaattactacactatttctaaaatactaaaccataagaaaaagtgactctaccagctaaacgtcgcattccactattaccggacataaaatatgaaaaaccttgaatttcacatataacataattagcacacctagaatttaaatatatctctataattatgtaaataataattaaaagtctaattttgaattaaacccttattatctactaattctcatatttaagcagcagtcattacattaagattttgaattattttaaaatattaactatcctcatattattatttataaactgtttgcacataaaagtttcaatgtattcaaacatgggtctttttgttgtgacaaaaccgcacagaaaactaaagaaagtagaatatgtcgtgaggtaactaattattttcattttctttttttcttaatagattttggtatttgaagaggaataatatgacatttagctttcatcttctcatacacagactagtatttataatttttttagaaagaatggttgcccaacatcgtttaccacaaatggcatggaatcatttaaaaggtatgtatatacaaaaaagaataatctataaaattaatgttgtgagaaactaatagatgtactgtaattaataataaatgttttgaaatcagtcacacacaagatcagctgaggaatgtcttattctattttatttgtcagtgttggtaaaacaactttaattatctaacattaaattttactattaattgtatgcttcttgtgttaagtaagcactattatttcttaaattttgttttctcattggtacttaatgtgttgttaagcaagacatgttgtatgagttacaactttaaggagtgttcaagtttggattgagtttcgcattcatgaattgtttgctgaatttgaaagaagaggagggtaatgaagttaaaggtgttagaaaataagttaatttttttcaaaagaagctttgttgtactagtatcacttgaatttttttcagttggatcagaattaatgttgtattattttgccaatagcctgatcattggatatttgggtaattatctttatttgttgaggtagctatgtctgtttcttctgttttctctagttttagctaaagtagattatgaacaatcaattttttttagccaaaaagtactaataaaagacattgccgatgtatttattaaattgggtttatatattatacctaaaaaagtaattgatatgtgtatatcttactataaagcttcttttgggtagtgataatgagtttctagtaaaagaatattaatcacaacaaaaaattgtgaataaataagaaccagtgataaacttttgttgtgacttaaaaagaattagtgataataaaaattgtgactaaaattaagtaagttgtggttaaagaagtactagtgacaacaaaatttgtcactaaataattattagtgacaataaaaattgtcactaaagataaatgaattgtaactaaagagtggttgtgattaaatgtaataacatcttaacaaccattagtcacaaaaactagttgtgaccaaaagtgactttaagtgataatgatatttttattgtgactaaaatcactacaagaaaatgcatttttaccggcgcaattcgtcaaatgcgccggtaa

SEQ ID NO: 69604 - DNA, 8022 bp, Cannabis sativa
ttctaaaaccaatctttttatctacacagttatgggaaagatcactacaaaagctgatgtattcagctttggagtagtgttgatggagcttataactggcttaacagcactagacgaagggcggtcagaggagagccggtacttagccaattggttttggcaaataaagtcaagcaaggagaagctcatggctgctgttgattcaactcttaataatgcagatgaagaaagcatcaccaaagtagctgagctagccggacactgcaccgcgagggaaccaaaccatcggcctgacatgggccatgttgtgaatgtgctctcaccattggttgagaagtggaaaccagtttatgatgaattagatagttgctctggcattgattataggctaccacttcctcaacttcttaaggcttggcaagaaatagaaagcaatgaggatagtattagtaatagctattgctacaacaataacaatctcaatgacagcaaagggagcattccagctaggccaatgggatttgcagactcattgagatcaactgatgctagatgagttttaaaatgatggtaagaaatgttccatcaatggccttttctggtaagaaatgatagtgttaatgaaaaatattgaattttggttcccacatacagagagattatggtgctcaaaaggctattgtggatgtggttttggacttttctttatatttcaaattgtttgagacaacattgttagatgggagagactatcaatattgagatgtgttattaatattctgtgttacccgttgtaaaattctgaatatcacaagtgaaatttacacttgtaattcgtgagttgcgtatatacaaattttaagaatgaataggattatttttagactatacaaatcattgcaaatgtttctctctgttcatcttttaaaagggtatatttttcaattgtttttataattgaagagaaataataaactcaagaggcaaaactcaacaagatcataattggaggcgtataaacatctcattttgttttctttttatcagagtaccatgtatatttttggttgcatatattatgtccaaattttatttatcaaatttaagtctataacatttgtatgtacaattttatattacaatggactaaattaatattatcgaaaacataaacacagtatcaacataaacatttagcaaattttcttactaatactacacacagtttaaattataaacagttgtagaaagactagttgtagaaagactctgcttctagaggtgccttagtcatccagccctccttcgggtctactcttattgaactgattgttgtaaaacccgttgttgaggttgcggaggcccccatttcagtagatgatgatggggaaggcatcatattcttagagaaagttgttagaactttaaaacggtcttatccctctttagttgtggaaaaagaggctaagaaggctaggaaggagaacaccttcggttctacacattcccctgatgccaacaacgaagactcttggtggaggaataaggtcaaggatggaaagaaggcagggaaggagagtgaaaaacactcgaccatcggagctgagcccaaggacttgcaagtgagttcaaggccttagctatccggagcccaaaaataacagcctctgaccacacttccctatatcccaaacactgactttacttagcccatccggtccaccacgaaacactttgcaaaagttcggaagaaaactaaagaggttgagacttggcccgaaagcacaggaaacagtagcagattgctgcgcaaaggaaggcttcttccttgccaccagacagaaggctaagctggtagatgaaggcaagagcaggagttctgggctagtcgtggattgttcggctttgtctaagtatcttaagcctaggttcaggagtgatactgccccttttgtcacaaagatgatagagttgactgcgaatagcatctgtgacctcactcctgaaaagtgggttgtgatattcagttttgacttcgtcctattggcctgtgctgctaaataacatgttgctggagtaagattttctttgcacccttgctaagtatactcattattatttttcgtctacatcaatttatcctaacactttttcttcttttattattctaagttattgtgcttgttgaaagggcatctgactctgttaatgccacgacggtggaactaaaccaatttagggctaaaaataagagtcagctttcccaagtagaggaggcatcgatcaaagctgagtggagatctaaagacaagcttgaatattatgtcaatcaagccactgaatcttacaagggtctgatctgatagcttgaagctgatttagctactgccaagactaacgtggaagtcacttctaaggagtctaaagaggtttaggagcgtgtcgacattatagaagctcgagtgctggttagatttaatgagctcagattgaagcagattgaagtcaatgccaaagacctcgagatgaagaaaatcacgaaagaatttgagtccaagaggctaagggtactatctttggaaactgaattggagtcagagaagacttggaggaggccactccaaaatatggagaaggactggactgctgaaaggtctaaggcttacgttgtggctgggaccttgagcaggttagttgcatcgtaccctcaatttatcaaacaatcccagcaactcgccaataggacctggatcgagaaggaggaggaaatgagggtcacccttcaggaagttgtagaagaaaaaatgagggaagttgttgaagctgcggaagcgtatcgcatgcgaagtgtagatctaacccttgtgaacacccttcattatttgtggaaaaaagacccaactatcatgaagatccttggggatgaggaagaaatttctttggctaagatgctgaccataaaggccaccgcattagaaccacaagctgttgagtcttccggggatgatgttgataagttggaccttggccaacctccatccaactaggtttagttccaaaaaaaattatttcttaaaatctcattcttccaatcttctttttcttgggggtcgttgacccccccttttggtatttgcagagaaaatttacatgccttaaccgcgaggctatttgtaataattttagtcttttacctttaattatcttcattccaacctgtctatcgaatattgctagttacatacttttctttcaggctatctagaatgtcttgagttttaggttccaacggtgtgaactctaagacttatgtaatgactgcatacttagaatttagattagtagggcaattagcattaattatttatattttatgattatatgtgattattatatattgtgggccctattttcaagaaatatgtattaaggttataatttctcaattctagagattttactaaactctaagagtatcatatatgatatatgtgaaaaatagtatttttaagatttttgctcagtaacgatagaaatgcaatggtttggccattagagtcacgcaggtttgggttagaacctttgttttagtgggacaattgttaactattttttagcttaagtttcgagtaaatttttaaagttgttttcattgtttgttattacttttaggactgttttacgcttatttttctttgttttcgattcttggggttttaaaaggacatattcattaaggctcaaaaggacaaaaacgggaagaatgagaagaaaaatcaagaaggaattgctaaagctcgccgcggagagcattattttggttgcaactaatagtcgatgcgatgagcatgacttatggtcgcgatgagatggcttacagaaagcctcaaattcgactttcttaggtcgtcgtgactagaccattcgtggtcgtggtgacgacattcatacggattcgatggcagttttgtataactgttattattacttggaatatgtttatggatgttgaattaggtgttctggagagtttggcacgatttggggaagttttgagctagttttcgagttttttgggttttctacagagaaacgattaactatttctggaaaaacggttaactggtttctcaggaagaacccaagaaaacagtttaccattttgggaatttggtttaccagttttagtagttttgaaatctttatatatgtatatatatattttatcaatatttagggtattgtcatgctatttatcgataggaaaaattgtagtttgaaatttaagtctccaaaagtgatttagcatatcacttatcagttttatgaacgttgtgacttaggggcctgaaaattgtcgagtagcagtttctactcaggttgatcgacacaccataattcgaaatcaaggtaagattagtataataattgcatatgtgtttacatgtttagtgtgcatgtttatgaatgcctgttagataacatatcagtaatggtagtattagtgtacatagagttgcactgaatactgacgaatatatgtttggcatagtataaattgacgatattacattagtatacctagagtatcgtgtataggctgatattatagtcaatagtactgtcatacgaacatttgaaacttagtacacgtgagatgtgagataggattatgattgggtgtatggacgcctaattatctgggttatgttatactatgtttatacttttcttactgagtttgtcaactcacagatattgtttacatgtgtaggtaagagcaaggcaaaggctgaacaatagtcaacctgagctaatgaagatcgtacatatcggggcaattagacatggagtgttcgatcttcgagacaacatgccttattttgatagtcactaggcgacaacttttgtaattaagtattttgtaaaatagttgaagttttaaaaatgagatcccaaattatgtaaagtatttttatactcaagtttaatgtttaattatgaaagtttaaatcaatcacacttttcaataaactcgttgattagcaatagagtgcatattaaatattaaaattacgataacatgcctaaactagtagggtgttatagtaatgatcaatagtagatcgacctaaatcctgggtaatcgggaactcatgttcatgttattagtttctttgattcactcgttaaactttctaagagaatatgattcttccaacttctgttttgaaaatctaataatatggatggctggaaatataatctacaattatggaatcctaactttcctaacaaactaaatattacttctttttaagtattaattctggaactgaaaagttgtgcacaaatttagattggatctaaattacactttcaccagtgaattaatggtactaaaggatataaaagtaataagaaggataaaacagtaatttgaccaaaactaattacgaaccgaaacaagaagagctaatcactgaaattgattatatcaatagacactgcattaaaactcagtaaatataattctataattattaagagtttaattctatatttatagtgagtaatcatgtaattaataaacatgattatttgattgatgagattcaataaataaatctaatttattggagcttagaatagtgcatggtccccggatcattaccttaaaacactatcaagggtaggataaatgttgtatatgaaagttcagaaaaatctattttgaattaacaaaatagtaatttttttatttttgtaataaataatttattttttaaattaattaaataggaaaaaaaacgaaagttgtgaagacaaaagacacattccttgtcgaaacacactgcatgcgtccacatgtagagtgtccctattagttttatctttttaggttaattaattaatttaatggataaatatttaaatatgaaatgtagttgagatattcttttaagtcgttgagaaatcctctcaatcggtaattagatgtatatatctataaccgatttcggttaaattatttattcaaataattaaatataatttaataaataaatgtattaaataattaattaaataaaaattttattggatttatttaaatatactgtataacaaagttgtgataaaaatcttttttctctccatcacataagaaatagttcttgctcatgtgttagacttatacaagaacttcatatacactttatcctagtagcccatactactccttgtgtgtggtggatcgatctggaagattacagtgtgagatttattggatccaacttatgagaagttttgaggatacccttatattcatcaagaagtatttatttctttcatgcaattattttttttagagtttaatatgtatatatatatacatctggagatctttggaactatggtacaatgataatcagttaattattattttattgtgtacctgatttgacaccataaaaccaataggcctatgctttatcttctgatccagctcctttcaaattctagaacaactgagcaatctcttcgttcttcatctggagaaagaagaaatcaatgaaagcaccaatgttagagaagttccttccttgagacaaggtcaatctcccacaacgaatcaattgcttattttatttcataactgaaaatcctaataattatagtcctcaatttaatctgtaaaattattcaagtctaacagaattcagttacaaaaatctcactcacttagagcatgttggctgtgttttcagtttttagtttttaaaaatgagaatagaaaacagttttttttgtcattttaaaaatttaatggtatttggcacaagttttttaaaacttctttaaatttttttcttactaaaaaaaattaatattttaacaccataccatgtcatgaactcatttggctccgggttcgagtttggttcgggtctaggagctgagtatgtgaacaaaaatataaaatataatatgttagacaaaaaaaattatttttgaaaattgaaaaacaacattttgatgttttctgttttctagttttttaaaattcaggttttttaaaaaaaatattttaaaaaatttttaccaaacgattcatattagtttttaaaaactgtattttattttttaaaactgaaaacagtttttaagttatgaagccaaatagcggtttagtgtccaagcttcagcatgtagtctttgagccaattgggtttcatgcgagttcttttacgtgtgtcctccttgctcttcaggtctcgacttgctggtttcggtccaacagttggtatattctctttcatttggtcttaggcctttgagtaggcttctcattttttttttgttttgagataagagtaggcttctcatttggacctccgtaacactacatctcatacatgttataattttgtctcaatctttatcctaaaaaagatataccataaatttttaattttatatacttaaatattatattttttttttcgataaattaaataccttaagttacatttcggttacttttgtcactacttttctgttaaatcctatttaaacataagaatatttgcgacataaatatatgaatttttagattttatacatttatatacaacatattttttctttttgagaattaaatatctaaagttaagtttacgttatttttttcattatctagctcgtaaattctattaaaatagattaagttagcacgtgtcaatatattattggtccattcatatattatcaataaaaaagttattaaataattttaaaatttattaaactgtaaataaagcgtaaaaatatattttttgttaagtagttttttaataaaaaatcttattaaataattttaaagttaaaaaataaaaaataatatttatttaattaataaaaatatatgtaatattatttatagttatgtctatttctttgtttcttctgctatgtaattgttatttttcttattatttagttattttttaattttacaac

SEQ ID NO: 69605 - DNA, 2363 bp, Cannabis sativa
  modified_base (45)..(48): a, c, t, g, unknown or other
aggactaaatgtatgcatataaaattatacaaggactatttgtannnngctgaatagattaaggggcataatagtatagtgtcataagtacatggagtaaaaaagataattattcttggcccttaatttctgttttattatattatttttgacaattgttattttatataaaaatatattttttttttcaaaaatatacttactattactgtagtaacactttcaaaatgttattatattcaatgttaatgttagtatcattttcacagatgtaactactaacagtaaatattcacaaattagtaatatttttttttttatcaaatatcattatataacagtaaatattcacaaattagtaacatttttttatcaaatatcattaaaatacattaagtgacattttttaaaaatgttactaattaaaatgtaatatattcttattaaagtgacatttttgattaaatgttattaaattactattattgtaacatttttatataaatgtcaccaattaaaatggtactaattcgtatttttggtgtagtggatggctttgatgtgcgctggtgtttggtgagaagtttttttgaataatgaaatcattggtatagatgtcatgcaacatatagatggctttcttatagaagctcgagaaggaattagtaacacttaaaggaattggatagtaatttttatatatttcaattttatcatgaaatagatattcaagctatttattgtaatctttgtgttgtgaatattttaatatgcaagtgcacgtattgtttgtaagtaataatagtaaaagtaaagtatcattcccacaaaaactgcagttaagtaaattaaatttctaattctatctaataactataataattgaaaatgtttaaattctactaagaagaaaataaataaatagtaaaaaaataacaatgatcaaagttaagggtaattaatttcaattgaatctacttatcatggcttaatataatttaattctaattctaatttttatgtgatagcgagttaactaattcaatttatattttggttaagatatatagaatctaaattatatggtaaagtcctacattatatggtaaaatcctacacttttgtggtaaattacacatataacttgcattaaatatagaaatcctaattattacacaagccataaagatactttcatttaatatcaaaacctatgtttatttcactatagcataatcaacactcattttttgattttgtattgaaatcataaacaattaattagtgataagacaattaaaaacgaatgaaataaatacacataaaaaattagggaagaactaaattatattaaaactatagaaaagtgtcaattaatatccattcacaaccctaattaaaaatttagctactcattgtcattgtgaacaattgataaaattaattcgaaacatgaaattaaagatagaaaaaaaaaaaaatcttagaagatcaatatttcaccaaacattgattcaaaacgaatagaattcccgaacaaacattaatgctaataagaattttctttatatttactcaataaacaacactactaacgtatagtcatggtatgctgcaaacataacttaactcatgcttctcaaataattacatttagcatgtaatcaaataacttttactataccatgagtaataactcttgtttatcgacggttattaccaaattatatattgacaaatactatgtggtacaattgtactttttttaacctcaagtccaaatttaagtgtgtcagtaaacttgagtagaaattgctcgacaatccgaggcccccaaccttgagctgctcgtagggttgatcacttgacaaggattggacaaaaaaattaatataattgatgagttttttctgtggttcttcttgggtcgaatagagaaagagatgaagagaagagataaattgattttttttttttttttttttgtatttctaagtttttctacataattcttaaatctagcttatctattaaataaaacataagaatacaaggataataacaaaataactaatttaaacttatttaagtaaaatttggcaaattaccatctttccctccaacaccctattagactaaaataaactaaaagggtaaattagtcatcaataaataacctacttaattctaaagttcctaaatatatatatatatatatatatatataacatcttccaataccacagttgtaatatcctggaattaaagaaatggattagcaaagccctaactagttaattgagtattattgtagaactagggaactaagccgcgcttcgcgcggtattgtccaacttttataa

SEQ ID NO: 69606 - DNA, 3628 bp, Cannabis sativa
aagtgaatatatctttctttgtgggtttggtaattttatcaaactgagtaaattttctttactttcgtttttttattattttgttacgtttgaagattatcatgtttcccaacaatatataatataaagagtccactatatatatttctaatattttcattttcttcttacaaaataaatgttttactcctttcttgtaattggtgtagttacaatttttttaatatatatatttagactaatttaaaaaaatatcaataataattattattttattatttgtataattaaatattaagtatattatataaattaattaaataatttttagaaaatatggtaataaattttaaaatggataagtttttgtaaaccgccaaaattgaataatccgcccaaaccaaactgacataacccaatgaataatgtaaaccgaataactcgaagaaaatataacccgcccaatataaagattgattgggtgggttgaaaataatatcaacccgtccaatcaacccgaactaacccgattaagagggttttatatatatgtatatatgttttattatatatatttacattatcatataatttacatacatattttaaaaaaaatatataaagtttaaactactatattttaatatatatttattttactatcacaattaactaaaatataataattaaatgtaaaaaaaaataaaacattaattgtcggtttgaacgagttaaactgacgaaaccgaccaatttcattaggtgagttactaattttttttttctcaattgaacggattacacttaatttttgtaactcaatttttacattaaattaaataaaatataatataaactgaccaaatcgaccaacatacaaccatagtatacatatatttatggtgtcaaagatattttccccagtcaccggagaccggaccactcatgatgagtcagtcagtcagtcatgggatataataatataataatcagaactaaaaagactacttaaaactaatttaaaaaattcatcggcatcaacaaaaatagagtggcatttcagcttaatgccacgtatatttaaccaataatctcctacttcacgaagaataatgcaatcttcctcctcccaagaattttttttagaaaaagctgtatcctaattaggccctattcctacgtaaaaacacaaccaaaaacaaaattgaattagattaacgtaaaacctgtcgaatggctacatctccacgtaccctccacgtattaatattacttttgatttaataaaatttcatcaccatctatattacttccttcctagaatttttataacaaaaataataaattctcttattattttcataactgccccaaaattctaaatttcatctatatattggcaaaatcgatcaagattgttctgttatataatatgaaaaaaaaaatattaacgtacttacttgaacaaataatataaaagaaatgccagaaaaaaaaagaaaaagaaaagaaaactatagaaactaagaaagtttgggatgatttatatatatttaaagtctctagatgatgaacgtagaccgtttaaagatatttgttttaacttaggaaagatcacaattataataatagtaataataatcttgtttccttaaatactaacacatcatttaaatttgatatgtacaacgtttgtattaaaacgtggcactaaatgagcggtcaatattggtccaaaacatgggactaagtgcagttcagaatatatacacatagctcacttttatttagttaagatcttccgtgtgatctcattcattatcaaactgtacgacacgaaacgaatgactaagaccaaactccacagaaccaaatatatatagaaagtgaacccttttaaataaaaagaattattataggtacggctgttaagaaaattgatgagagtcgtataataagtacttctaatcccacattcccattatattaatgtgttcaatcattcgagttaaggaaaataattacatgtgttgattgtgtatcaaatcaaatattatacagtataatataagttccttcttattatagaagtagaagctttgttccggaaggttgtagaaggactagtgtgtaatagattaaaatatacataatgtaaaactttatagagaataaaaataaataaacaattgggaaagtagaccactcttgttttgtgtcattggccttggtgaagttgtgtggctctgttccattattgataccattgttaacaataaaatatggaacatgaacgccaacttggatattttttaatatttctttaaaagattacattaaaaaactaaaataaataaagttataatttcgaatttcagtgttgaatgtgactggttttacgtctctgtgaaccaatattgggcgcccatttgtagctgctgacgtatcccgaaaaagcaggtacgtgtcgagcaatgtgattgccacctaatgcttagtaggattttgtatattttattacattttgtattattttattacttattcacagccagaagtttcgtctagccacccatagtattataagtagtaaaataacaggaataccaaaccaaagatgaaacaacacatagataggaaaaaaaaaacacgccaataattaccactcttttttcagcatctccaatgttgttgttgttattattattattatcattatttagtttttttacattgaattagtacaaactaagaacataacataaatcagtaaatataataatatgtgtacctaaaatatgtacacaaaattacacttaatgacatagtaatgctattatacaatgatgttttttacatttatacctataaataattgtataaaattgttgtgtatttgagtgcacatatcactatatattcaatataaatataatcatcaatcctacaatagttagcttctttaaatttggagctatattacatgtaaatgcttaaacaaaaatataaagccactaaagattctgagcttttatttattcagaaaaaaaagagccattcaaaaaaaggaaacaaatttttgtgctattttattttacaaaaaggcccattaattaaagacatactacaatttacaaagatatgggaggaattaatttatgaatatggctcgattaatggggatcagtagtgtggggaaaatataaagagaaatagacaggcgaaaatggacgcgagtgccaatgaggataagagcgaaccacacaagtgatttttttatatattacaaactgttttattttttattttttttagccgggattgttattgaaaaattcaaaaaatttaaacaataggtgaattcatgtattaattttattattattattattattattatttaaaaaaattcatcatttttattaattgcaatccttaatagttacatgattaaaatctggagtaacatcactactcctaataacacgatcagcaactaattaggatgcttgagttaagaaatgagcaacactatttgcaattttgcagaacgtctaataaaattgacataaacatctcgcaagtcatttaacaacatcttacaatcagaaataatactcccaaagta

SEQ ID NO: 69607 - DNA, 3308 bp, Cannabis sativa
attaaattttgaattaatacgttacacaacaaatccaaaaatgctctttatagtttacgcatagacatttttgagtgacgtaagttattatatgaaccatacatcatttgaaaaagaccatgacaagacacaagcccaataagaaattatttgtttaaattaatatgacaaataaatataggaagctcttccgaactcgtgctccttgactttgaggaatgaggagtctttggatatttgcctttttcggtttgattatttatccttttaggtttaatacgatttaactttttgattgaaattttgtaaacgaaactctcagttctatccactttggtcctattgtgaaggtgtactacaacttgttgtggtatcttttttttttttaatagttgtggtatctttttattagtccataaaatattaattatttaaatattttaaaaaattattaaaaataaaattaaatagtacaaaaaataattaaaaaataaaataattaaataaaaaataataataaattttaaaattaaagtatttttttgctttttttttttgttttctttttcttcgttcttcattcttctctagaaactttgtgcttcttcttcgcacaaccacaccacctcagccaagaccaccaccacccaccactaccaaaaccacaccatgcatcaactccattttactcagtacccgataacaaatccctctccaagctatcaacttcaacaacctcatctcccgcaccaatctaataataacgccaacaaaataaaccaatattaaaaattaaaacattaaactttcacaacacagatttttaatccaaacacttaatcacgtactaaaattctccttccaaccaaccatgattttttttagttttaacgatttttttttttagagaaaaacttgtgctccattagaataggcaatgaaagtacaaagtaaacaagctacatggaaggtaagggaccattccaaaccaactcattatctaatgctaatcctggtttggcaatcttatagacaattgattagaatccctataattatgcacaaccttaagattaggactgaaggataacaagtgtttaatactaattaatatatcatccaatggactaacattcaaattacaagaattaactttatcaacaatggttttacaatccatttttagaacatccactgaaagatgaagcaattgaatccattgaataacatgttgaattgccttggcttcagctatggcagcaggattacttccaacacaaggctttgctacgccagctttcactctatcaagctcaataccatagctatgcttcttgttatgatgatcaagagcagcatcagtgtaaatctgtagagaaccctcctgcaaagcatccaaaaccctattttacaaatgaactgaagcactaggatgctgattagcgtgttgtgcatctaagtatttgaaaaagtagctaacacaccaataaaaaatatcagaagttgggataacattgttatgttgaagatgattgttcctttgattccaaagagtccataaaaagcaaaacaaaatgttaacataatccttatccaaagcatcaaaagagcataataaaaattcactgatatcaaggtgtttatatttataataatgatccataaaccttgaagatttccaagtttttctcaatctggaacaccctatcaaatcacgatgaactgtttcaggactgtttttataaataggacaaagtggagaatcaataatatgtctagcaaaacgagaggaagtaaccattatagcatgagacaccaccctccaaacaaagtgtttaattttaggaggaactctagagtgctaaatcttactccaaaacttcttagaatatgcaaaggaggaagaagatgggatatcttgataagagagagctaattgataggcaggcttgacactaaaataaccagaactctcccttgaccaaataatatcatctttacctggcaaaccagtgacagggacctcaaaaatatcatgaacaacagattcataaaagtgattccttaatttaaatacatcccaatgacctaagtcagtaataaaataagaaagtttagacgaagtacgcaagctgctatctttataagagatatatttataattgggcagccaatgatcctcaatggtcagaatgttatccccatccccaaccttccaaataagaccaaaagccatcagatctctaccccaaagaatactcctccacgcataagaggggttatgaccaagaatagcttcaagaagagaggagttaggaaagtacctagctttaagaacctggcacaacaaagagttaggatttttaaaaattttcaaggcttgttttgctaacatagcttggttaaaatgaattagagagcgaaaactcaaccctcccatatacttagattgacatacttttttccaagatttccagtgaattttcttagaactgccagaagaaccccaccaaaatctagccatcgcagcttcaattcctttacataatttaacaggcagtctaaactaagccatcacatatgcatgaatggcctgaatcactgccttgagaggtgtctctttaccagccttagagaaccatttagcagaccaattagtcagaacagaaaggactttgtctctaaggaaagtaaaagaatgatatttcgattgagtaagatattgaggtagacctaaatatttgctaatgaaaggcctatcttccagataaaaagtggtaaaaaaaggtttctaatatcttgaggggtactaggataaaataaaatggaagatttggtaaagataatggcctatccagaagcctgggagtagagctggaaaatatcccttagagagctacaagagttcctattagcagaacaaaagataaggctgtcattagcaaaatagagatgagaaatagaaggatcccttctagatatggcaactcccttgagtagaccctcattttgatgagcacgaaggagagaggataaccctccaacacagaaaaggaagagatagggggataaggaatccccctgtctaaggcctcgagaaggtttaatcgaccctttgacaaccccattgatcaaaatggaaaggctagaagtggtcacacacttcataataagggaaacaaacgtgacagggatattcaaatgaagcataatgctctttaagtaatgctagttgaccctatcaaaagcctttgccatatcaagctttaaggcagcccaaccacatttaccatgctttcgagagttga

SEQ ID NO: 69608 - DNA, 1334 bp, Cannabis sativa
attatagagcacctaacataaaactaagtatacgtgccttgcacgtaactttcttctatatatatatatatatgaaaatttatttgaataattacctgttgccgacctattataacaggtaataacaagatgtaactggttattcaaacttctcccacatatataatatactaagaaaactgtgttttctatacttctattaattatcactcaacaattgttaataattaatttaattcatagatgaaatgtatagtacgtggtcggcacaaaagctgataactataggtagtacaatatagcatctttaattacaaattgtatggcaaactcaaagaccagaagcatcaagtgaattagagctgcatttttcattgcatattatatagaacacaaacttttgaaatctcctcacactcaataaggacagtacttagtgttcgttggcagatataaattatatatgtgctctcgtctactgtcacctaaactattagcaaatttaaacaagttgaatcataacgacgacatacgtgaacacacatcttcctgtccacatttctggtcgcatataacggatcctaattactatattgtaattattacaaaatttcaggggtgaaaaaaattatacataatatatataaatatatatatattggcgcattatggggtctaccaatatagaaaaaaaaaaaatagagatgaatttgtgtaaaaaggatagtgtagtgtagtgtaggtaggaatagctaggagtagagaatagaaacaaaaaaattccacactgaatgagatatatataatgaagagtttgtgaaggctttcccagtgcccaacccccctcgtgcgttttctgcacaagagtctttgctgcctaatagcagacaggtccctcttttgtttttaccttattattatcacaacaactgtagccccaactctctctctctctctcgcaaaaagttttaagttttggcagggggggcctctctctcttacacaggtcacaactagctatgaacattttccttcatgagttatacatgtgcatatatttatatatatacatatcaaagataaggtgtaatcaacacaaattaacaatgtatcaaatatacatatataatagtacatgtatttcataatacacattattttcttttcaggttttttttttttcgctaaacttatttttatttgcatttaactctcaaagttgaaatttcgatgataaaaccctctaaactacttaattattaccgaatttaaagtttcatttctatttacaccattatacacgtgttatatttatattggtacacatagtatta

SEQ ID NO: 69609 - DNA, 4205 bp, Cannabis sativa
tttttaataatttgttcattcttattttctccgattaccattctgctcattactaactgatcggtgattaaaattttagtacactttagtcaattttctcacacacctatataaatatatgtaatgatttgatatcagattcaacatgatatcgagcaagatcgcactaagtaaatgaacaaattaaagtacataaattgaaattaaattaaaactgggagaaattaaagctaatcaaactagaaacacaccagattgagaacagtcttagaggatctttattaatcataaactaatatcgacatataagggagttacaatcaaaacaaaattataaatttctcacttagacacataagatcaaattatgcactgaacaaccctcattttctctcttcgtggtatgatctctcctttacatgtcaagtcgatcacccacactggctgacttagactaagttccctttttatagagttagtgagctataaggcaaaccaactaacttaacgtcagccttataacaatcttagtggctgaggctgagctgtacataacaatataagatgttgatccccaaactcattaattactcatattccttatttcaaaaactacactaattaaaaagaatgctagtgagagtttgaaagatttataactactaatttctttatctttatttaacaaatctaaaagatcaatatgttagttggattttacataagtaataaatatggctacaagtgtacaatctccttccgtttatataaatattgtaacaattggagaagaaaaagaaaatcgttataggtcggttataacctaaataggttgtcgttgcaaataataaaaccaaattaaataattaaaatatatataattaatgcatttcttattataattaattaaaatacatctgcaattaaaattaatgatgttacgtaaaatacatgcatacatatatatatatcatgaccaagtaaaagcaataggactcccaacaatatgtttcccatctgaccattccaggtgaccaaattgggaagttctcttcctcacgacagtactagtaaacgtcactgtgtaagccagcttctgttttttatgtgtgaaggttagtgaacttggattcaccacaattttcactgactcaactttcgatactttcactttatatgttgctggggttcccacatttgtcaaacttcttgtgtgcgtaataatggtacttgtagaaccattaataatattagtatttgcattaataatatcgaaaggaactgcaaaagatggatagttaaactgaccaaggtggtcatttgttccccttaagtaatcctcgcagttaatatctctattagtaaccaccttaatctgtctctgcgtgtagtccgacacacacaaaaaccacacgtagtcttcaggagtaaggtcgtaaacaagtcctggatcgacggcagccacgggatccacgtgtccagatccgtaatcaaacggcgtggcatcgttctctgtagtgatgtcttgaatgggtctaccgttctttcgatcagtcctataagaggtagtcatcaaagcagacttaatagcagctgggctccaatctggatgtacggatttgatgagtgccgcaattccagagacgtgtgggcaagccatggacgtacctgatatgatgttgaagtcaacgactcttttgtcactactcaactcggttggcccacttgttccgctccacgcggctaggatattcactcctggtgctattacatctggcttcacaatctcgggggtgataggatttggacctcttgagctaaaatctgggacgattggtgaaggtttaactccaaatccaatctctgttccctttatcatcattgtagcagtaggattaaccactgaattgagatatctcttgatttcgtttatattttctaccccaatagaaattgtaggaacgaaatcggcatccgctactatcttatcaaaataattagattttttgtagatgtaaaccattgctgcaccaccagcgtcttttagggccaaacttttttgggttcttgcggttcttccttggtagcaaataactattttcccggccacctcatggggagtaagtgtgccagctaaacaataaccaccgtacacagatctactgactctcttggcttctacgattggaaaccacttattattgttcaaatgtttgggttgagcgaaggaggaaaggcctttgaattgtcttccgttgccgagtctgatgtaggctgtgaaatcgcggtctattgtgcccgcgccgactgtcatgatccacggcgcaatgttggagacgctcttggtttcgggacccttgttcccggccgatgcagatacgaagataccgcgttgcatggcagcgaatgtggctattgctgaagcatcgtcgtagtaatcagttggggttctcccgaaagacatggacagaatatggactccatcttcgatagccttgtccactgcggctattacatcgctaccgaaacatccagaaatccaacaaaccttgtaagaggctattcttgcggtgggagccatcccgcgcgctgtccccgaggcgaaacccttgagattagccccaaggacagcggatccggctgcagtggcggaggtgtgagtcccgtggccttcgttgtctctgggtgatttggattccagtgtttggttaattggaccggcacttgcttcgtagcctttactgaagaaccttgccccaatcagctttctgttacacccgaagttgttgttgaagaacaagtttagatcatcgtcatcatcatggcagctgcctttccaggctgctggtattgggggaaggcctttgtcgttgtagctttggctctcgggccatacaccagtgtccaaaactccaatcacaacgtcactcactagcttattgttagtatgtgaagtaaacgccgtcgtattgtagaggccaaggaagttgggagtcctagttgtgtggagcttgtatgtgacttcgggtaagacgtagcgcacacctctctgtttcctaagcaactcagcttggttttgagtgagtctggtggagaatccatggacgacgtggctgtaggtgtagagaatgttactgttggatactgattttaaagatgattgaaaccagttgatgtgttcgttgaaaactgctggcttgttggtcttgtccatgtggactatataagtctgtttattcatcatcatcatatcatttactactatactactactactaatagtgttattcactagtagcaatagtagtagcagtagtagtactactggccttgataattgagaaactaaaatcttcatctcaatcgatatatctcttcccaatattaattattagatgccaatttatacttatagatagaaattaatacacacgtaatagtaatagtgtgtgggacgttgagtaagatatataacaagtgtagtagctgatcaagatagaggtgcatggcaaaagttgaggcagataatccgacggttttgggggcggcaacagcggggccgcctctagatcgaccgagccgactcatattatatatatatagtctcgtggccggctgcatggaccaaatgtggtgggcccaattatctttactattttaatcataaaaatgtcttctctcattcccagactcaatttgaatttaaatttaaatttgaaattaattaatttcttctcttatgcattcattaattaattttatatttccccaagactatacctgccaagaaaacaatgaaagcactaaaagtaaaaacattttttttttgttttcattttgaggaggctcttttcttacactactctctctatcatttaacacaaatatcaactatctacattattatcttattacaattatgccattacaataaaattatcttactaattttttacttaattggtacatatcttacttattatataagtgtttatctaacacatcttaacgatttttgttgtatcttaatggaatattttttttttgtattttcttaacaaagtgttggctttaagagaaatataacatttgcaaatcctcctacagaaatggtaatcgttcacaaaagagatgcatccattcatatatattagggctctacatcggtcggtttgggcggtttatcctatatattttctaactca

SEQ ID NO: 69610 - DNA, 4218 bp, Cannabis sativa
  modified_base (3958)..(3963): a, c, t, g, unknown or other
aaactgttttgaaatgtaaaaataataaataaataaataaattcaactgctatttttttttttaaaaaaaaggaataattctattgaaaggcacaccaagatgatcaaatgatcaatacaaatataaatcatctagagtaaattatgcggaagatcagttacaaaaattgagatgtttctaaaaaatgctaatttaattaaataataagcaaaatattattagctcgattacaatgagaaataaaaatataaaaaaaatgacattctaaatatgacattttctgcattaaaaatattagaacacgattttgtcccgtgatgtactttcacagaatgtattccgtggtacattagataggtcttagggtacattagatgaatctcagagtacgttatcattttttaaccctaattacccataaatcaaccctagccctcagattaaataactcccccatctaacggctgccgtacatcacgaaatgcattcagtgaaagtacatcacgggacaaaatcatgtccctacaaatattaccctaccagaccaaatcatgttaatatttatgtgtcttacaatttatatattctaattaggatatttaggaatccataatttcacatggtctattttctcaaacacggccccgtcatatttttttttatgtcgaatcatgcaagtattaatttagtgttgtaccaaaaaccctgacccgtatttatagcactagcccaatgtaaagatgaactcgttggaattgaaactacagataattatatagattgtttttcttcttcttccttttatcatttctgcatactaacaaaaaataaccaaaaattatatgctactgacaattaagacatggttgcagacaaagcttctctttgaaaatcaaaatctggcgtgtgttttgcctcaaaatcatgatttgatttttaattaacttctctatctactccttatgatagactcatatggtagtagtacaacaccacaagatatgagagtatttcgtggcttctactctgtataatacaatcccaacctacctaacatcatgtcaattttcacaaactcaacctcacaacactctagttaataaaaaaatgaccagaaagacctcagaagtaagagcctcgacgaggataggctaattcgtttcgatccagtcttctttgcaaaattttcaaccagtcttgcttcatggaagctcctgcccctactcacatctcgttatcaatgatgtcccgcatcatctgtattggaatgagcccttcagtccggattgcatcttttttcgggtcagggctaatgaagtataatgtaggcaatcctcgcacctgccatgatggaaaatacgacaaactttttcatggcttcatctctgcagttaaagaacttaagaaagtaacatatgcaattagaacaaagatgagtaaatgattctacctgcatgtcacgagcgaattcatattcataatctgtatcgacttttacaatcattgcattgctttcatactccactgcaagctgttagaacaaacccaaaattaagaattcatttcaatatatgcaaaacctatgacacaatacatttaattaatatttcatgaattctcacatcatatccaacaccccaactaaagaattaactatgaactaaatgactttttaaggaatcatagatctggtcaactaatattactgggaaaaaagcttcaaaaacaaatctttaatgaaatggggcagcttgctgattggttttatcaattcaaacgaccacaagacacaaacaaatggagaaaaggcacgaaaactagacgggtttacagccgcaatgttggcaagttttgcagggagtttgataaggactgttgcattcacggcgcaagacgtacaattgcttgaccccccaagaaaattgaattgttgtaaggtaagttattacatgcttactagtctcatgagatcgtactacgtgacacaaattcagaaacacaaggggctttcaaggctgatagacagattttggatgttattttagagacaaacaaggttatggaggaagatagaggctatggaaaaaaaggggctaacatgtaaaattgactttgagaaggcctacaaatttatggtgtggtatttactattttctagagttattgtacaaaatatgagggagaatacactagtagtagatgccatgggtagagtggtgaagaaagccaggttgaaacgaaaatcttagaccgaatctggattaaaaagatagcatgaatgaaaacacatacaagtacaatatgattaaaagtacaactataagaaacctagtgaagctccttatcataaccaaataatgtccctcattgacaaaaaattatacaaagcatctactcatataaaatttatatctaaatgtattatatggttcagcattaccagaaaatattactaacctactaaaacttaaatgtctcatatatcacttcagagaaatatagatgttgtatatattaatataaatgaaactgctagatgtttctattctatttcaagaaactgggctccttgcctaaccccaggagagactaaaacctcatgtgttagtggaatcaaaccattctgaacatgcaaaacttaaaaagtcttttcttctaaacaaaatataggaaccaaagcagagctggatatgaatagttgaaattcatacaaaaactaaagcatttcataaaacaaagagtcttttaagtctgtatacaggagtacaattcttaaaccaaacttaccatctctagttcttgagccatcagaatacaaggtccacaccatgtagcataaaaatctattatgaggggcacatttctttctccctttaccaggtcctgaatctcctgagcagacaacttcttctgcaacaacataattacagaatttcaaagtgttacacataaattctacaaccaacatcatattcctttaacattgtttacagatttaaccaacccataattcatacaataaagtaaagactcttacagaacaatagagcaagaattgagacaagataagaaaatgggcaagtgttatgaagagaagcataccacgagatagtcttctctgacatgttttccttgagggggtttacaaagaagctttctgggaagtgttgagagagaaaagggtgtttggacattggaggaaaagagcgagctttggtgatgggtttttatggctgacagtggaaaagaagagatgggttttggagttgtgaaagaagggatttttggtaagggtgagaaggtttgaaaagcaaagtgtgggtgaagaagagccatgttgagagagtgggagatgggtttagttcaaaagccaaaaccccaaaacccataaaacaaaggcaaaggaagataattgaagagactgtttggaagctttgaaatccatcctctcacctcgaattaacatatcccaacaaaataatgttgcattgcaacttcgtttaattcaatctgtaaaagggaattttacagttttacaccatttggccaaaaaaaaattacaaagtataaattttttatatcactccattctattacgtgttttctctcattttttaatattttattaaatttataaatattaattaattaataactaacaaaatatcaatcacctattcatatttttcctcagtttctcctaatattaattttaaactaaatatttaaatcattataaatattctaaattaggttaactttaaaactactttaacaacgtggacatatgcatattctaatgattctacacttctcctcacaaagagaaaatcataagttcaaatcctccctccctaaaccacttgaggctagctcaagtgaccacaggggtgcgtgtgtgttggaggtcttgggttcgagtcccaagttatgcatgttgtaatatataaacgcttnnnnnnaaaaaaaaaaaaaaaatcctccctccctaaaataaaaaaataaataaaaagaaactacattaataactctaaaattaattactttttattaattaatttccttactctattagcactctccttctcaatcaaataaggatttttttttttttttggcgagaaagaatcgaataaggggctttgaggttttttttttttttttcttgtatcttgttgtgataaatccaacacgcaagtatacgtatcgttttaaca

SEQ ID NO: 69611 - DNA, 2496 bp, Cannabis sativa
ttattttgatattcacttaaaaaaattaataatattttgcagttcaaatgtatatgattttaaattttttaccaattttaaaatttatgaagtatatatgtttttaaattaaatttataagctgtttcaaaagaaaaaaaaaattaaatttataagaaattgattgataatttttttttaataaaaaacttaattttattttagtccaaaatacccaaaccgcttcgaccgtccctagttaaaattgatagttactttatgtaatagtaatagttacttaattacaatttacaacaactcaagttaaaatatggatttcgagtgtcaaagtttatttaatttaataattgaaactttcaactttatttaatacaataatgataataataatgcacttgacaataattatgcaaataataaccttaacctaaatgttgctttttttccacatattataacctcaattaaatttcatttggctgcgagctaatatatatttatatatgctaattgatatttttattctttaaattttgacattgtacattatgactcttaaacttttaaggtttttaaaaatctttttcaaattattaaaattgttggattgaaaaattttgtctaattttaataaaaaaaatgtaacataaatgaaaattcaatatttaatgtatatcaaaatttaagggacatagtttgatagatattaaaatttaggcatgatttagtacaaataaaattgaatgcaatcaaataaatttttttaaatttaataattttaataataaagaatttttaaaggctaagaaaaattaaataacattatttgatacataataaagtataggggtcaaaatatgcattacttattttatctataaaaaaaaaggaagtggtgggtcatcactattctattaccgtcaatacaataatatataaaaaggacgagtcttacttatatatttttttagaacaagactcttatttatatttttgtatatgtaatgtccataagcataacctaaccttgtcggtttaatcataaatgtatgtacatgcaaattagataggattacttttacttgcattgaaatttctttctcagacaaacgacgacgctgaaattttcattaatttcttcgcattccgtattggcggctttctctatatagttccccttttcccctttgttccttttcaactttgttttcgaaattcgtaacctttcgtagtttgatttagtttgaacttttatgtttgtttgttcgttcttgcttccttccatgttttttctcaactactgtttttactgctttctctttccaattcaaaacattaaatatttaaaaattcaatatcgaacaatacaataccatcactttcttcctctcttctttttccttttagtagttgaatcactcttccacttccccactctttcttaaaccccctttcgttctccttctcccacaacccattttctctctatttctgtctctccaaatggggtttgtgttctgtaccaataaaattattgctgtttttgttttcggatttctcgttttggatgctttcttctctggatttggatccaacgctcaacttttgcccgaagatgaaggtacgctttcggtttttctcgccgtaaaatttcccgagatttagattttaatattttagtgacttctcaataatcatagtgatgacgtgtcacttgtaggattaatatcattctgattgggctgagtaaatgttggccaaaactgtcatagaattgctgtcattcaaattatttaattaatttattatttattatttttttattatcggttcgttcttagttttcaaacagaagtaatttgaatattgttgacaaatttaagtgttctcagaatcgaatacctcgccatgaattcttcacacacctttttcaaccatttcattaattaaattgaaaaaaattgtgtttcttgggagtaattttaagtcaatactaaggctattgagttttgtattattgcccttaaactttttagtttaaaaataattcatcaactattcatatttgtataaaataataacatgattgttagtgacatgtaatcattaagtgtgtaattatttttttaatttaattttacatgatttttttaatcattaattattttttaatttaattattttttataaaatataaattttatttattttaaatattaaattatacgctgatacaataattgactaagcaattgtattattattttatttactacttctgctgatcaaatttggcagaagtaccaatttacaaaacccttaaataatttaagaactagttgtaaaagttggaaaattacataataatacataaggtgattctacaatgcaccatctaaaagaggtgtactgatacacccttgacttatttatccataaaaattttttagtctatttttttttttttttatattcatataagttatagctatttaa

SEQ ID NO: 69612 - DNA, 2160 bp, Cannabis sativa
acctatacatacaaaaaagtgagatggatctatctatagacaaaatagcaaattgttataagtcaaagtcagaattttagcaaaaacccaagtctagaatggaatattaaaaactgattaagataattagaaggaataaagattagatttttaatcaaaaagtagatccattttttttttcagctaatttcatcaaaccaaaaatgaaaatgagaaaaagagaggaaaaccccaactcagatcttaacttacttaggctttgaagccatgtcggtggcggttacggcggcggttacggcgatggaaagaggaggagtttgaggaagttaagaaaaacaataaagaagtgatttttatgagtgggttttgtctaaaatggtgacatttttttaggaaagaatgatcagatcagaagggtcaggtcagatagagagagatatgtatatatatatatatattaatgatattttgaagaagggggggagtgagaaagtgtgttctcattcatatgaaattatttgggtttgttatcctgtctctcctcttccccacaactccacaactcactcactctctctctctctctctttgagtttctctctctataagttgttgtattgaaaatgagtatttgtactctttttttgcttttatcttttgtctttggagggagtgaaaattttcagaggatgaaggaggaagagaagaagtgtgatatgaaattacaaaaatgtccttgagatttgggaggaaaaaagtgagatgaaataagggtaaaggtagtaactttgtcagataaaagagacaaagaatggaagaaagaaagaaagaacctgtttttgaggatattttttttttactattttcttggaaaatatgattgattttagataaatgctaaaatggattagtaagcattgcaattattaaatattgaatcttatataatttaaaatattactgtagtggtgttcaatattttctacaagtgacatcttacaattaattagcgatattttattaaaattatttttttaaattatataggactcatacttaattataccagtaacagtatgagatcgagaaaaatattaaacataagtagtattttttagcaattctctataatttaatataatagctgttaagaatatcgttgactaattataaagcataatctaagttgtttgatactattaataatcaatagtaatacagttgttttttttttaattttgtttggtgaagtaacaagtgacttttttttaatcttgaaactgaaattaatcataggataatatgaaattatggagttataatatttcttaagtacaattagtagttttgttcttttcttattgataattattttatttataaaaaaagtcaaataaatagttagttaagagaatgtactcaatccatgattcctttttaaaaacagtaaaataaaaatgttacaataattatgtgttatatatatatatataattagtataaataatgagatttaaatgaggagggtgacttataatattgtgagataataaagagaattgagtgaagttaagatttgaaagtgaccttaactcacatacattatcatctcacccaacaaattcattgctaattattcaatggggtaatggcaatggatagaatagtgaaccaaattaaacatcaatagttatttagttaatttttctttttcaaacaatagttagttagatagataaataatcattttttttcaacaaaatagaaaattaaacatattaacctcaatatcatatacatgttaattttttaagcataaaaaaatagccttttttttcaagttttaatatgcattttgttcactcaataatcgttggattgatagtaaatttaaacgaatgattcttaatcattagacgctagagtatatcaaattaactttgatcataaatattgcaatacaaatgacacttcttcatgttttaatctgcattttgttcactcaataatcgttgaattgatagtttaaatgaacgatagaagttaaagtacattaaattaactttcatcacaaatattgcaatacaaatggcactttttcaagttttaatatgcattttgttcacccaagttggatcgattctaaaccaagctagagtt

SEQ ID NO: 69613 - DNA, 2317 bp, Cannabis sativa
gtgtgggggcatttgggtgggtgggtgggtggctatgattattaatcaaagcaaagaatgagtagagaaacgaatctgggcattgaggaaaaatatttagataaataaataaaaagaaataatatataataattattatttatatcaaagtccttctctatctcgctacataggttgaccatttgaaccccactactatttttctctctccattattataacaaacaaacaaggacaatctctctctctctctctacagaatcctacatgaattcacatggcagtgggaaacacatcaagaggatgatgattcgctcgcatttcgccacccattaacgtaccaattttaactatttccaccactttcttgtcatgtatatatataatattttattatatatatttatacctaattatgttatgtacgtttctatcttaaaatatataaatgttagaatttgttacaaaatttatatataggttcactttataaatatgcatgtattattatagtcaacttttttcttttattggttactttttcttaattttcattttccacaattaggttttgatatgaacagttataatagcgctaatattgttatacaagttcttgtacgtacttctcattcaaagattattgcaccctatattaattaagttatttcttgcaaaaataataaaaaaaattgaaagtcgatgattgggtactgataataattttcccttttaaaatcagaccacatgaactgtctcccattccatgcctgcttcaattgggctaagattagataccatgtcatctataattgcttttccaaataataccattacttatttcttttttagaaaaaatatgtttatgaagggattggtggacggttttgattttttctttgcttatgaatgtggagagagagatcataattatatagataaatatataactatatatagcattttatgattagtgttatatgccttctttattttcttgtttggtgtgcgagaaaagtaatattaattagtattatcattattataaaataatacaaatggactaataaaaagaaaagtaggtagaaaacaccattggagttttaattcaaagagttataatggtgccagaatatgattcatcaacaagaatccgatctttgcttaactagaaagttgattagccttgttttgggacctacttctttatttatgtactagtacaatagccactttcaataatgctttgtcggcgatacttactgattagaagttaggtcacccataaaccatgatatattataatacctaatatatatatatagttaattatatattattattatcataaaaagtaaaaattaaattaagaaaaaaaaaacactgattagcatgagttccatttgcttatcatcatcaactatattaagcttttgaaaaaaatattatttgagaacaactgtttgatggtcccccagaccagtaatattttagaatggtgaggatacactataatttccatatgatatattgttacaattagattattggaacaaaagtttattatatttatatattaaataaaatacaacaaaacaaaacaaaagttatatatatagttgggaatataaataaggaattatttcccataagcaagcacgctttctaaattagcaatttattagttatatatataatttggacttgtatttgttatgttttcattagtttattctatatagcccgcgtaagacgccaaccaatgattgtatacgatattttatttatttcttaattaatgattgtttacataaagatatataaatattagatatgatcatgcttaattaatatacatcaccctaaataaaagtaattgttggtgtaaacctgatgagtatacagtcaagatgaatgtcgatggtgcgatttttgaagctcaccaaaagtttggtttcggttgtgttgctcgtgatcaccatggtaagcttattgaagctatttctgagagtcgttggggttgtttctgcagaaatagctgaggtcattggcatcaaggaggcgctaagttggataaagcgcaagggctggggtagggtggctgttgagtctgacgctttagttgctgttcaagcaattaatagctcagtgcatatgccatcccagtttggtttgttggttgacgactatcgtactattgtaactagtttgaataatgtccttatttcttatgttaatcgatctgtaaatagggctgcccattgtgttgctagggcgtcttatttatcgtcaggttgtacttttaatgagctaaatg

SEQ ID NO: 69614 - DNA, 7983 bp, Cannabis sativa
catggctgaacttcatagcatcatcatagctttattttgttttgaatgaccaatgataggtcatgaaagtttttcacatacaatttcttacaaatgacctctgtatgtaccagaatacctttattttggttttcccaaatggaagtgacttctgaacttatgatactgtaaattgtgcctcattccggagaatgatcctctttcaactcttaagcaacccaattcaaattctggaagtgagagcacgaaaattcctgtatattttggcccctgaaaaaaaatcgagtatgtgtctcataagacatgattgtcagccttgaagatacatggatatttatttggcctgcaacacaagcaattttaattccatatagagtgtagtggggagcaaaccaaaatttcttctcaaataatagttatgtaccaaaatctgtccagcaagaaagactctggtcaaaccataattctaagcaatttttctgcaccaaagctcttcctcctaaatctaaaatcttcttcagattaatggaagatggatagttatttctaaatccccattattttgagggcacaagaaagagatgtctttccaagtaagaaatatctttgtccccttggctgcacacctattaaatttatccagtgtcatagtgatactcagaattgtcttggcaccactacaaaccaagaaagtccatcagctatggataatgaggagctccctcacaagatgagaaatgccactagtatatggaataaaaaagaagtctctcatttctagcgtaaagaaatcataagaattctccaatctccataatcaattctaagaagagtcaatttggcgccaaagtatctgggcataagctttctcttcttccttctcttctgcaacaaaatcagtttcctgaactgattcgtcttcatcgggaacctcttcaacttcaacgtcttctttctcttggttactcgttgctaatacctccctcattgccttttttgtggcaggcctatctctaggtccgtatttcggagcaggcacaacaaacggcagaataatattatccaagttcctgctaatttttctggcactaacctttccatctgttggggggaaagtgaaaacaatcccaaattcatagttgcacacgtgaagtcgtggacccaatgaagatttagatttcccttcttcatctacttttagaccatatgaattagaaattgttcgtccccaggcagctgcactaaaattatgtgagccacaataaatccaaccaaaagaagatgcatctgtcacagacttaaagcgccttcgtgccacctgcatgcacattttacaattcaatatgtgagaaaagcaaccaacaatgaacccaacttataaaggtggaagaatttttagaacatagaaagcaaaaaaaaaagaatgacaacttacttaagaggaagtgagaaaagatggattaagatgtaatttgtaacaccagttgtcatttaaataagatgctaccatttaaacaagttcgccgcaaaagtaatagctaatgcattcaaatgaaaattgtcctttacataattatacagttgatatgttagagaaacatcaatctatgattttatgttcttaacttatcctgtagctgaaaatccatttttcacgtagaacttagaagttcgaagaaaggtgaaatactgcatcgagtaaagcattaaaaaaaggaattaagcaaaataaaattgacatgcatcacaaaaggatcaagcaaatctacattttgtcatattattgagaaaaaaaaaacaataataataatcaagtggaaagaaaatataagataataacatgaatataacataatttcttgattaagagagggagagagtgagagaaagatgagtctatactatatactggtattctatttcaataatatccaatttaaaaaaatgataattttggagctaaaaaaagaccagagaaaactctaaattaaaatgctgaacttttatttctggatagaaagtcaatttcttttataaactaacctgaagataccctctaaattaaaactcttcataaagagccataagaaaacttaagagaaaaactctgctcaagtgtaattgttgcaccaagttaacaataatttcaaaagagaaatatcttaccttcgtatgcatcgggtgccctactctagtataaggatgaggaattgcatcatggagtatgttaatagacctcaatctttcccatgttttctgcatcatagaaaggcaataaaataaacttctggaactaagattgctgtgtcaaatatcacattattcaaacttaaccaatgatgtgccaatttatatataggtggtgtttataatcataaaaatatcatgcttcgtggctgtgataaaagatactgtaatgctaacgattaagggaaactgaagctacactaattgtcacaagctaaaccaatcgcaatggataaaagtgcaaatgtaatagaaggtggtcttaaaacttcatactatgctttattggagctacaatgaacatattatctgaagactgaaattcaggacaggaacagaagagagggtacatcacaacacattatctaacatctctgctctacctctattctattccaacttaaaaaatggcaaactttgatccctactaatgtgtgaaatgcatcatacctcagagaagcaaagtatacgctttgaaggcaaagccccattacatgcatttttaactctgtttatcgttgggtagatgactctaattgatggatttttcaattcttgactagcactccagcagccccactgcgaaaaacaggtaggagaacataactatataaagagagcaaagtatcctctcaagaaaatctataacaaattactgaatataattacctctggatcagattcttctgaatcaaattgtgccgatgtttttcctatagctgctgaaaatgcagccaaaaattttgcatcgatagacccaattgaggacgcgccttaagaaaaaagcacaggcatcaagcaacaaaaaatacacactgtagtttcttttcgtcattatcagtatcttcttttaaataaataagcaccactcaccgtaaatgaaatcagattcaagttgttcaggccatttatattgagacagaacctataggagaaaataaaaattatattaagaaactaaacaatattatggaatcaggatttactaaaacaaattaaaagataaactacttaatgaaatgcctgactaacttcatttaaacacctgataacaaaaaattgagtctaaaaaagcaaaagaaaagtaaactttctgactgattggcaacaagatacaatcttaaagaaagaatgacacaagaaggaacttgactatttattacatttaggagaataaaagttgagtcttcttagactgcccaatccccctataccacccttcccgaaaaaggaaaaaagaaaacataaaggggaaagactacaattacctcttgtaagcgccagaggccggtgcacctttgaattgcagcaaccattgagcataatgctgcaacatgcccaggttgcattaaattttgtatgtcttgaagattgggcccctgaacaagtaccagcatctctttattatatgtgccaacaagctattatatatgttatgattcaagtagataataggacaaaataaacatggtcacccaattccaaaatatcatgcctgtgaaacatgtataaacagtgtcactttcttgttacttcctcctaaagcagcagcaagggcttgcctttgacaaacataagcacagaatctgaaaactccaatatcccacagtggagagatccactttgcaaccttcctaggaagaaatccaagctgaacacaatctggttcaagtgcaggaaaagacaataaaaattacttggctgtccaaatattcaaaaagtaaaatccatttacagaatatgtgtatgtgtttgtgtgaatatataaaagaatttatgattgctgacgtatagtggttaagaaaatctatagtggctccacaaactaactaaaatgaacaccatcatgtattgtagctacagaaaattaatacgaaagtgacagaacaaaacaagagctcaagaaatccaacacactttcacagataaagagtcatggttatgccaaagcaagaatgtaataatatatcctagacctacaattgactatgtacagcaacaggattcatcacattacggtgtcttctataacagatgatacttatgcaatcagtaatagcacattataagcattttcaccacagcctcactctgttctcctcaaaaccataagtccaccattccaattatttgatattatccaatgagagaaatataatatataacataatgttaatatatcaataagttgaactttaccttgactaaggtcctcatttgggttaggaacaagaatgctcacagcattttcatcggcacgaacatttttatttctcatcaatacaaccttagaaaaatcatgcgtattttcacatgatttcctcatgaaagaagccaatttcttaagccgtacaccgttggagtcagctgcattgtgaaagaggtagctcaaaccaacaacagatgcttcaactgaaccaaggaatctgtgaccagatgatgttgacatatcctaaccaaacagacaagaacataatgacaattacagatctggttttatcaagcacctatatgaaaagaacactatgatcaataaaatatgcaactgtaaagtagtgataattctttctaagaaactgttctatgcataatccattaaagcatcaatgcctcaaattcactttagaaatgggtgacataagattgtgggcagtcttaaattaaatgaacaaactggtaatcacaaatgtcaatgcctagaaatggtatatgaaaggaatattcatctactataatattatccacatagagcaagaaacgcaggctagtgtgcataatcaacgaacgcactcacttgtaagagttgcatgaatggaaacatattgggaggtctgtaagaatgaatcccaggaactgaagcaactaaatcacccattgcctctccaaagtcatactttgccaattcaacaatccaatgagcctggctgggtacatcagtcaaaagagatgccataaacccagccagctgagaacaaaaatcagattttgagtcttggtttactcctggaccatgaatttgagtaaaaagcgacatgtaatctggaacacaattgcggggaaaatcttgccaccagactgtgttagtcacagcattccactaaatcaagagaaaagaaggcgaaacaaccacaagtacaaaaacattaataaaatagagaaagaaataagggatttattatttaaagaagataactacatttaatctattactgctacatttggagccattgaaaaagggtcgtgatgcctagtaatagtttctctaacctctttgtctcagatatttaaatattctagatctctaaaattcagatgcaaagcatactcaagcgtcaatcaaattagatatatatcttgaatgcagagcaataaatccatgctaaccactgcacatgacatgctcttgcagagtgtgaatttcgaagaaaatttggaaagtacccagtatgatgtaaaaacaaaaacataagaaattacctgggtcggaactaaatttgcagaagtaattataactcgaacaaaatcatctctttgtaaaacaaacaatttggggtgatgacaaccaattccttgtcttttcaagtctttaccgaaagcaatgtcctcgggaaatgggggatacctgatttgataagcacaatgataacaccaaaaaactttcaaagatacgacccagcttacactagtcggaggtcacattaatcggaattgcaatacacagaaataatactcacactacaacaaggttaggaaaatcagggtaaggcacagaagtcctacattcagtacttgaactccaacatttctcggtactatgacaagcaattgtcacaggtaaatgcctaggaatctcgcaggacgacaaaaacctacaaaattctcccgtgatttagcactaataaactatcaacttaaacaaacatacaagttcaacgatagaattatcaattatgtaaggatgttggctagtgtaccataaaatgtcgctggtaaaagttgcaataaaaatttgggaaatgctttcaacaggatgaaaaagctcatgtaaggatacatcagtagtatgacttgaagaggaatcatccatgaacccaagacgattcagataaaaaccttttccaggtggctcagaaatgcagccccgagtacttattcttctctttacagcacaatcaggaaacaaagaacaatccttaccaacattattaaaccaagttttctctgaattattatccacactagcagtaccaaaaccaatcggactttcattttgtctactcaaactttcactattagcaacgtaatcaaacggttctgaagccatttttttctcgcaaggacgtgaatgtaaactcgaacaaggcagcaccgggctagccccttcactactttccaacttctgattcatatggctttcatcagattgataggttgggatagcagtggctcgaagataagatacagggtcatcgctaagcaaaatgcgcttgcagttactcaacaagcagtttgctctggcaacgaaatcttcacattttgaaactgcatcaaaatcctcgtcactgacctttgaagcaaaaactctcttgtttcccttctggctcgatacaattgttccttgggagtactgtgactgcgattgagattgtgatttctgggtctcaaaaacaattctttgaatagaaaagccgatgcgaaaagaagaactacaacgccgcctgtttgaacagacaagtgaaacttcatctccatcggccaactccacggccatgcctctcttaaccttgacactattaacaaacactccattcttagaagccctaacctgaagagcagagccagaatcaaattctccgtcgagaagatagagtttgcggaggaaaggatcaaagagaatctggcaatggcggcgaccgacgcggcggtcgctaaagaaaaaatcggaatacctagaactacgaccgatggttgaggaagggcgatgaggatagagacgaatagaatcgaccggagaaccggtggttgcagaaaggagagggagatcaaagtgattcaactccaccacaacgctcctcctacttcgtcttcttctcccttcatcttctgtgcttcttcttcttcttttgttagatttcgaagaagaggaagaagaatatttatcgtgtgaattacagcaatcttccattgaaacgtgaattgaagaaactcgatcaattcatcaactaaaagattaaaaaaatcgtatattaatttgatttgaattttacaaaatactcttgctgttgctgctctgaaactgctcaatgaaaaatcggtttctaattttcaattttccctccaaaatccaaatttatcttcctctttacggtaatactaattccttcatcaattgccttggtccaaagtccactcttaaaataaataaataaatatttctttcatcaaaaataaataaataaataaatatttttttaacaaaggataaataaaagggacttctatttttatcctacaccacaaaataataaatacaccttaatatttttttaaaaaaaaataaacttaaaaataatttttaattttaatatattttgttgtatgaaaattattatttattaaacagataattctcctaaaacaatagactgaagggcagaaagaacattactttcagtaaaaagacggttagaccaataacaagcatcatgtgccatacagtgcgcggttttgttagca

SEQ ID NO: 69615 - DNA, 2977 bp, Cannabis sativa
agaaagtgtagtcgttatgaccattttcgaaaaaaaatatatatatatattcactcgtgcccccgactagttatgttttccatatatcattcatagtggaattggttggggtcttaggaataaatgaaaaaaagaaaaccctcacatatgatactcatatctaaatattatataagggaaaatataaagtgaaagcatattatataattatatatatatgatgataaacgattaagggtttgtttggtacgtcatattgtattgtattgtattgtgttgtgttggattgtgttgtattgtattgtattgtattagtattatttaatacaatacaatatttggtattgacttatattaattgattgtgtaaagttataatatattttcaatacatttgatcccaacactaactatgagtctgggtcccgggtctggttctgggttcgggttctaggtctcgagtcccgggtcctgggtcccaggtctgggtctgggtctggatccgggtccgggtcttggtcccgggtccagatttgggtcccggccggttcgggtccgggtctaggtcccgggtcccagttcgggttcgggtcctgggtctgggtctcgggtccgagttcggatccgggtccgggtttgagtctggatccgagtccgagtcggagattaatgttgaccccaaatcctttataaatattaattataatacaagctaatactgattatttatttattatgtcttaaataatacaacatacattgtattaaaaaatttggtcgtaataattaatacaatgcattgctttatccaaacataattttatttattatttgatacaatatgatcattatacggcataccaaacgagccctaaatgttcaatccgtttgattattttatctattttaagcaaaaaaaaaaaagccaatattcatggatcacaatgggtataaagttgttccatatagactgatcatgagaaaatgggcacattgttcatacatatttttatatatcttaatgatcaaagtgagtactttcatggctatgaagatcatgccctacatttataaatagtttcacttctttgacacttttaatttttaattatttttttttttttgaaaggatgacactttaattattatagtaactatatatgggatgggatggaacacttgggaagtatatgtataacttttttaaagtttttttccccttcatattcatagggccattgactatttttcctatccccacacactattgcatataatagaataaaaatacagattttttttaaaaaaaaatacagattttaatgaggctagaagttgctatcatctcctttaagccactgaccggccattaatattaatgaaattaattaaagcaagtagacaatagcttattacatagtttcctatttgggttaaagcacttgtatatttgagcttttccatatgcaacaacaaccattgtattttaacatcttttttaattttaaataagaattgagataaagctagctatcgtgcttggccacatgaatacacacattgatacatatatatatatatatatatataaattgtcactaatatatatatgtaactttaagctattccttctcttgatcaaaggttaaataatttgttccttccaataaggtcttaattattccacatataattgaaataacataatacactaatgggtgtgatgatccaaaagtcattaatctaaggtcattattcagatatatggtggaaacagcaaatataacttacaatgcaatatttaataatattatgctgccaaaaaaaaagtacacaatttaatttctctaaaataacttaattaattgggttccatctataacatctgtacagaatatattcaagaaaaataaaatcataatctaatttatcaagatggtctgccatgattcatgaaaagtaacatttaatttttgcaaaacaagtgtagatattaattaataatgaatattaaaaaaattatatctccatgtcttcccatgcgtcgtttatcatctccaattaatagaaagtaatgtacttgcacctattattatttgcatgaactaattaatcttattctaataacctaataatatatataatatataaatatgttggggtaacacaattaggccatgaaagaggaaaatgggctgagagattaaaaggagatgagcccattcaaaaataataagcctccatcacaaattaaggggataagttaaaaaatccattatgcggagaagcggtgggccggtggcttgctgtttggctttattggttgctagggacattggttctggatttgttattgtggagagcgacttgagagtagttatcaatgctcttaatataaaggagttccactggcaattgaaaactatatcctttttgtaatagttattctcctttgtttattagttgtattttttctaatattagcagaatttataactttgttgtccataatgtagctaagtgggcgtttttccaccagaggtttggttttattccgctatctgccatacctataaacattttatgtaatgatcgcgagatctaactatttttatttattacatgtacgcttttattccaaaaaaagttaatagaaatagtaagaagggttaagtgtagggcatgacggtttggtaaaaaaatacaaaaaaaatggcttatgacaaattaactaattgggaatttggggtattctcagtatctgatcaaatattctaatgagcaatttcacacgtaaaagtagagacaaaaaagagcaatcaatattagtcacactcgaaatattcacaaagttgaggaatacttctttttcgtatccattaatgaaaatcactctcatattatatttcattaaaatgtactaacttttgtgagtgagttgttcaatataccttcaccttccacttaaggctagcac

SEQ ID NO: 69616 - DNA, 3507 bp, Cannabis sativa
  modified_base (3151)..(3160): a, c, t, g, unknown or other
gaaaaccaaggatttcgatgaattcccttcaacacgtttattctctctagctctcttgaattcacttgattgaaaatttggcagagaacgaaactgttgaaaatcatggacttacttacatgctgctgatgccgcttacgaatcctcaaaaaatacagtatataatgccctttgaattgaaatgtgaccaaaatggtagtctgatataatgcctggatgattatatttctacacatggcttttgaaatgagaggctcatttggtctgattggaggcttctgcatcagctcattattgggaagttccatcagtagagctggcccaattactagagttgtgaccaaattagtccagatcagttgaaagccggtaatagagtttgatcccaaccacatcgtggtgatggatgctatcaatgttcctgcaatgttggttacaagatctagttgaatgtacttttgaatgttgtgataagtacatcttccgcactttgtaacagtcagcaaggaacttaaactcccatcgaaaacttctatgttagaacactctctaaccatttggctgctccttctccccattgcaacaccaagattagcttgtctttgcatgggaatgtcttctattctacttccaagactgataacaacatctccattactcttcaagatttccattagaagtattatgtcagatggaagagaattgcccattacatagattttatccgctttctccttcttctcttgctcgttgtagcctcgaaaatcttcaccactaatcaccagcccatccggaggaagaatttcgcaagcagtagccatcctttcaagctctaacttgtcatcttttgaggccaatatgaacttcacttttgcatcattaaaatctttcagtgtcttttttgttttggcgcaacaagtgtactccttgacaccaaccattgctattaacactaaaccattttcgcccatcaacgcattttcatcctcaactgatgcatcaatctgcttgcaagcaaaagcaaccgtttttagatcttgggacttcatctcctcaatattcctctcaaaaaattctctttccctaccattcaatcttttttcatttccattcttgtcatagtaactcgagcacattcctagtattgttgatgcagggcctttaaagtgcaaagacatattctctatcctagtgttcttattcttcttcatcaaaactccacttccttcctcatttgagcttaaccccttgatctttactactgtaaatctttgccacaaagtatcaagcttcacccccaaatttgacttagcccaacttagaagggggtcctcattttccttactatcactccagtgcttcacaagtggtgcgctgataccattaccaagagcttcacgaacgagtgttggcaattcagcaagattaacgactttatcagtaccaacaaagcacacagaaacatcagctgggttgagcggatcacaaataactactgtagctgatcccattatcacagaacccaacagtcctggatctgaagctattttagacagcaacttctttctccataaaatggaagtcaacgttatgactaacgacattccttccataagtcccaccattactatagtcagcaatgttactaaatttgtacccatatttcctcttggcttcatgacaagtctctctattaaatctatgatttccttggtcttggtcgtgtctgtattcccagccttgagctttggataatcagagtcaggatcaaaattttgatcaatcataaaacgcacaaaagggactaccaaaatcacgatagagattactaggccagccatgtgcgtcaccttactcaacctctcaagttgagcaggaaaccgcgtgatcctgtccggggtttgagaggttgcagcacctgaactcacgagcttgctaaatttggtttctcctcccacagtcgtcactagcatacgtccacttccatgagtcacggtagaaccatgaaatagaaacggacattgttcattaatggtcgaatttaaaccgtcatgcaccactagagactcacccccaatgaataagccatcagcagggactagattctcggtttccaaccaaaggacatcaccttggactagctgggaaatgggaattttctgcttggtgttccctcttgaaacaaagaccaaattctgctccaaatgcaataatggctccctccgagaacgtgcaagtagccaaagctcatgcaatgtaggcccaactacgagtatgactacaccaaccagtatgaaaaagccctcgtaccaaccagtctcggtgccatctttcttaattccaaatccaatagacaacaatgcggctatgataagaaacccaattgcagcatcattgcagtattttaggagtattcttaagaagtcaaaagaaggctgagcttcaattacgtgctctgtactctggcttgtgctagcatgatctgaattactctgcccctttcgccaacttagatcattttcatcgccagagattccagcttctaaattagtattgagagcaacagcgattcctttgacacctccgaatcggttcaaggaatccaagtccttggtattcactatctcaacgatgttggcaaattgttggctttttgcatcatcatcagtagtggcagccgtggtagtactagtagtaccaatacttgtctccgcctcctcatgaatatccacatggatttgatgatagtgatcattaggtaatgcagttgcaacttctaacacttctatgccgtttgatcccttccaaaattaattaaataaaggtcaaaacgttgattgatttatgtatacatatgaacaaatgtagtactatccaaaatagttagttgcatatgtatctatattctaaaggttaattggtgaccaaacttaattatattctaatttttatatacttaattctttctcttatataataggttggaagttttaatggttacatcgtaactattatgattacatatatttttaactattaaattattgttgtgtttgtgattaatttaaaaattaaaaaaaaaataataaataacttataacttcgtactttattttcttttaaaaacttaattaaaattaattatatttannnnnnnnnnactaataattattaattaattttatgcaatttgttaataattaaagatatttagcaattatttttttaacttaaataattgaaataattgcaacaaaacttcttataatttatagttattatacacacaatctcaattaataaaaaatagtatgaatgacctctaattagaggtaattttaggctcaatcttattttttaacacttttaagtgtcaaattaatgtgtagtccaagattagttcaacttatttagtttttttttcttttaaaaaatgaaaaattaagtaaaaaaaatgtaataacaactataaaattgatgatggttaactatttttgctcctcgttg

SEQ ID NO: 69617 - DNA, 8515 bp, Cannabis sativa
  modified_base (6190)..(6194): a, c, t, g, unknown or other
aaaaaattaaaaaaattatttaaaattaaaaaatattttagaaaacaaataaaaaaaacaaaaacagacagtatacaaatcaaaattaaaacaaacacaaaaataaaatataaaataaaatgagagattagattgggttttagatttaggtttggagttctttttcatttagatcgtgccacaaattgtcattgaccaaaccagatcacctccctccctcactctcttgcttacctatgcaaacccagacgagcgatcatttctcttcaatgggaatgggaatggagcccatttccggccaagcttctaaggctatgaaaatactttgttctgacgttttatttcagatctgggttcgtgtgggagcttaggatgaacggatctgcaagagagagagcttgagattaacagatctgagagagagagagagagagagagtatgggagccaccatcttgttccttctccttgccatcgtcggtgctctcctctgcgggttacttcaacgagagtcatggtttccaccggtgaggatgagatgcttagggtcgaagacttccttgatgagtttgtgcgggaaggatctaaccatatacgctttttatttcatcctgaatagattttaaggtttgattcatttgggggcagcttttcatgatttgggtttaattttatttatttttggtgtaagattgcttccgaaagatgttgaagtggagattcgaaatggaacaccaattcttttcaaagatgctgataactagggttttagtttttgtaaatttatttatttattatagagaataatttttttatttttatttttatttatctgggctaaatggcagcaaaaaattatgagttcttccatttagtaccctaactccccattcccttatgttggagagtatcaccaagtactaaacctaaatagctttcttgaattaataaatgcttttcttctacacagtcttccacacagatttgagtattgccttgaattgtgtgggtaatttctcaatactattcaagtgtaagtaaactacgttgttgattatcatatcagtaaaaatcttgtgtactgataaatcatgagactatatttaatcacataatctttattactttccaatgtgtagacaacccaataatcatgaataacaatgtgataaagatttaaatgaatttataaattaaacaaatgatcatgaaacaaacatgtgaaccaagcagcatattaaacaagtaataaagtaattctatttctttattgataaataaatattcaagattacattgaaatagaattttagttagggtatagaaacccaatagccttgtctagcttaactgcctccttcatcaccgatgctaccatggcagcgatctcctctcgaatatctgggggatcacaatagccatagttgctgataggcttaatgctttgggtcctagcaatgagtccatggctacggaggttctttgtagtgaccaaaatttccaccttcaagacgttggtagagatcttttgatatttaatttcctttaatgcaaaagccagggataatttttgttcaatgttgcctgcaaactgaggtcatctttatcagaaaaataaaggtgacacataagaaagtgaatgagagatatgaatcctaaaattcttactatgggcggagaagtccaaggacaaagttagaaccctcttcgacagggactcggtagtaaaaaacaatagtcctgaaagttaaggacatacttggtgaaacttgttagacacgttgatttggcagacgtttatccagcctataagaccctaccttggttttattattctgcatcgactgtaacttaaatgcatacaaatataaaacttcttttgggttcggaacttcaacttttgaagcttgcacaggatgtaccatccaaccagaagcttgtaagactatgggatgagttagaagggcgtgatccttatataagcgcagaagttggcgaagtagcttcatagaggaaagtgggccccatagattatgtgtgcccaactccatactctgaaggcgtcaacacatctagtagtagactctctcacaagggaaagcctgtgccagcatagtcttagaacgttgttgacgccttagaactcgtcgtatctttggagcattcccaagctccaaaatttgttttcaattcgatccatctcctaaatggacgagttatagactatgggagtagccttctttttacctttcctctggggtggggcttccagaacttctgcctgttcttctagaaccacctcctgcagcccagtttcaagattaaagttgttatcagacatattgaatgaatctaaaagaaaatcaaaacccaagaaattaatacctaaactcaaggataatagcatgggtattgggaaggccttctttgcaaattatttggagaggtcccaaccagacaggtcattcggaagcacaacttggtcctcacagaagccacacttctgcacgattgttcaagaacacaaagagtaaacaatataaacctaaacatatcatctgaagccctaatgactccagacaagaggatggaaacccaattcaacgcagttataatccacatccactcagttcagaaaaataaattaagagcaaggagtcctagaaccctacctactttcatgctaaaacaaccctattgcctctagattatcaagacctgatacgctcaatccccacatttccattcccatattaaaattctaacacaaatttctacaaaagcatgaattttatattgttcatagaatacagggaacttaattgttggaggaagtagggatagaggagtgtggcggtggccagcacagattgtgaatggccagttaagaattctatccatgtttgcctgaacttctagaggctccagcggctgggggtggttactatcagattcaatgggggtgtgttggatactccctcactctaattcgtagaagatggtggatggcaacgttgaagagatcagacattcattgaagttgcagacatggttcattggatttttctcgcttgagactgagttcaaagggtcgaaagggtaaaagtgatgaaaaagtttaccccgcttgtatttatatcaagggttggcgatctgcctactcttgaatcaaaggcacagatctcacctagagaaacataatgccaatccaacgaatgggtagctggaagggtagcattaaattcaccttacgatactcgaagcatttcctcattatcaagattctcctcgaggtttgtgttaacattagatagtcgtcattgcgatacctcgagcctcacgcgcttcccaagaatgcgtgaaattcatgaattaacaaaaagataacacatgtgtagtgcaagatgtaaccctcgaaagttcccaacctttcacattctacattatgggagatgaacagaccactttttcaaaataatccatgtgttcgaagtactcaaagtcattcagaggtgagactgcaagcctttgcaactcccaagtttcggaagcatggggataaatgttatccacgtttctagatgagcaacacatggcatttcgtggaagtaaccggtccatgtaatacccgacctaagctttctagtatactaaggcccagtccaaacaggaggtaggcactagcccatcatatctccaggagcatcgcctccaaaagtaagattctcctactcctaatagcccattcagccttccaggagatggagcgaactacatcctctggacgattaatgaagcgtatatggacgggaagcccagaggtgcctccagaagcccttataggatgacatggctgctctgtgacacttgggcttaccagatcagatcttgtcccctatgtcaggacatgatagtgcgcgtaccgcaaagagagacatatttccttttgtccaaaacgacgtccctctaacattcttgtctactttctgcacccatgcgtgacacctgtccagattgcatgggatttcaaccgtacgaacattttcgttcacaagctaggaccttgccatgggccttaaggtcatgtatttaatgtatttaccccaatagtggtcccattttacacagaaaccccagcgggtcatgggtatgcccaaacccgaatctaggcctatataaacccctttatcctttcatagatactagggttcttcaaagctgtaaaaattcatctgtaatatgttcaaagtctcttaaggccaatacattgactcgtggactagggatcattaatgctcgaaccacgtaaaaatttctgtcttactttacttaaacaatcatttaattttttggctcgtacttaatttagtttttaaaaattttgatgaacgcttttttactttaaattttgttttggacgtattttataccgttagaaagctcttaagatgctagtatctatgtgtctagtttatgagccttaattatttatgtatatttatgtgattgggattgactctattatgtttgtgctcgagattgtgacgaattatcactacttgattaagattaaaataatttggatgtcaaaaatatgaaggagtgccttggtgtattcgttttttggggtgcactgtagaaatattcattacttataaccagttatttttaattcattaataattttaaaattattataaataataatataaattttatataaaaaaaattactaaaaacattccaaaaattatatttttccttttttcttttcgcaaattaattattttttaccttttaaagttatagataattagttttgattttgtttagaaaaccaaacaaaatttgataatagctcaaataaaggagataaaaaatattttctcagcaaaaaaaaaaaaagagataaaaaataataatgatttctacatactttgttatctttttataaaataaaattacaaaaatttaagaacatacaacataaattattttttaccctttaaaataattagtcttaacctttcttttttctttttaataaacccaaactgaatttgataattggctcaaataaaggaaaccaaaacattaataatttctatgtcattgaaaaatctaaataagccttatttaaaattaagttatttaagatttctgcctctaaattatgacctatataatatatattattgtgctcctgagctttttcagcctattaaaaatagtttatgaactattcacagtgttgtaaattaatttttctctcaaattttctctcaaattttctcatatgtggtaaataaattgatgacactattaatattatatgtacaattaatttgaaaaaaaatagaatttaagtttttttaaatttagatttacgtaattttattaattaataattgatttataatttaataataattttaaaactgcataattttttttaatgttaaattatccacgtggtattgatgtggtaatgaatagctatgtaatcatattattaatttgtttgccaaatataatagtacttgataaaaaaaactaatttataatactgtcaattttaatataggttaaaaattaaaggtacaataatacatatctcgtatagataaaaattgttagaaaattttataatgcaccatcttaaaagggatgcaccaatacatctctatccgttttagtatccaaaataatttttgagtcaatatttttatttattattattattttttttgaaataaaataaataaatcctgcaaattttaagaaattcgaaaaagtttaacacgccgaaagttatgttcaaataatgtgttgcatgcgtgagtattttattttatacgcgtgtaaaatagattgttcgaacattgttttctatattataaattattctgaatttctcaaaattttgtaggatatcctaaatacctataatgtatatgaatatgaaaaaaaattagattatttttttttttttcagaatgtcaaaacaaataaagaatgtatcaatacataccttttaaggggaagcatatattgtaaaagagaaatgctaattacaacctcttagtcaaactccacgtccgaaatcacatgttgaaatattatttttcaatttttttcatagagatattcgttatagttacagtatcatcctataaatttttgaaaaattnnnnntagtttacagtaccgaaaatagagttcctgatattctagtttaacacgcgcgttcaaaaaacttcaaacgtatttttggcactgtaaactattcgaaatttttcaaaaatttataacgaacatccctatgaaaaaaatttgaaaaaaaaatattccgacatgtatttttgaacgtaaaaattaactaagaggttgtaacaggaggttgagggtagcgttgtaaaaacactcaaaatggtttataggattaaaactatctgaaatatagtggcatatctctgtcatcaacctcgtttgtcaaatgacaccgcctgatgggccccacagttaattgggtactattatttgcaaatctgtgggcttctattgtgtatggcaacaaagaaggatttatataataggaagattgttaaaaagtaatattggtgattagcatctctaaggtataatataattaattttatagaggtatttgtaagatattatttttaaataagactaaacactattaatatttatttataatagagtatttatttttatattatgtacaacaaaatttattatattacaatatatattgatttatgaaagttgagatacaattataaataagatttgaattgattttttttgttaaaataaaaattaataataatctgatttagagatgttatagtaaaattaattatatttttttatttattcatgttaaaaattatttttaaattaattatattaaaaataaaaatattaaaaattaaatttaaaattttatttttatcatttttaaaaatataaaatttaattaataacttttacaaaagataaggtccaaatttttatactaattttttaaataatttatagtgtgaaaaataaattttaaaacattattttacatatatatataaaataacaataataataaaaagcatgtatgtaacaaactactcaaattttgttaaaattaaccccagtattattataataaacaacatggctcgatataattttggagaggatattatagcggtacaacataaaagtgttgtgttctaagcaccatttctttattgatatccttcactcttataattactaaaaagttgaaaaaaaaatagcaattttgaggtgagtgacagaaaatattgttcataatttattcagtaaagtctaagtgatagacctaacccataatgaaggataagatcaaagaaactttagaaaattaatccaaaaaaaagaatatacagagggacccaccaccaccattacaatattacatataggatagcttctcatgatatctaattagtattattgtgtttggattttcttaaaccaacttccggaatttaatcaaattaatgggttctctaatgtctggatgggattcgcctattttcgcatcaaaatcaggtaatagctactcgttttacagacttaattaaattgttttttctttacttaaaaaaaagaacacaagtacttaatttgtctttttggaaaaaataaataattaaaggaacaacgtatatgtgtgtgtttaatcattaattatcaggtaataacaattataagcgaaataagtcacttacgaaagaggagattgaagcttattggagatcaaagcagaaaacagttgaagaacaccttcaacacattactagcctctcagacaccaaacaagatcaggtatatactaatatatattattattacctactttttcttaattacaattaaggtgatctaactatcaaatacatgtatatatatgtctcaggaaattagtagagttgatgatgaggagatgaactactgtggtgaaattagatatgagagatcaagatctttggctcttgaagatagaaaagagagtgctgatgagacaagcattgaaaatcttatcaagaaaaatggctggtaaaattaattataatttaatttagtattaattagctactttattttcataataatatatttatactaattatatatacaggtggactaagagtaactgggcctttctaaatgaaacaccggcgtgtgaagctgcttccaacacctatgtatcacagtcccatatagctgatactttgtctccctctaaatcaaaatcacatgagtctcctcatggaatcacaactaattaattaaagctctctcaccttaatcctcatcatcaatgttatttctaattaatcctatatgtagatatatataatataaagatgcatgtatgtatcataattaaatatggttgacgaatatcggtgtggagctctaagctatagtactatatataatttgtg

SEQ ID NO: 69618 - DNA, 3741 bp, Cannabis sativa
  modified_base (46)..(47): a, c, t, g, unknown or other
  modified_base (2191)..(2192): a, c, t, g, unknown or other
  modified_base (3489)..(3494): a, c, t, g, unknown or other
atctatattaataagtaaatctggttatattgaaatgagttttatnnagggcataaaacccaacactcaccactacaaaaaaaattggctggcaacatcttggtcacaccattagtagcttctaaacctattagctggacaaaaaaattggtatagctaaaacagatcctagcacatccacaggtaacacatgtattgtgctttccaatatgtctatgtttcctgttggtggacctggatacttgatttaggagtcacaagacatatatgttcggacataaagctcttccaatttgtttgcagtactactcccacaagactcttattactaaataatgactatctgttagttagcaaaagtggatctattgtttcaccacatttgtttttgaatgatgttttatatgtgccttctttcaaacacaacatcatatctgtgaatttcctaactaataacaattctctttatgttaaattctttactaaccattttatacatgacactgtccacaagaggatgattggaaaagatgaatccaaggatggccttcatctaatgatttttctatttttccaataagtgctgatatatggcaatctaaactagaacatctttctactaaacacttgaatcttcttagtaataaactgaaatgtaatgttgctgctttacacaaagacaccccctgttatatttgtcaaatggctaagcaaaggaaacttcctttttgtagcaataataaatttacttgtaatgtttttgatcttgtacattgtgacatttagggaccttaccacatttttgctcattctggacacaagtttttccttactttagttgatgatcattcaagattcacatggatctatttggtaaaacaaaaatttgatgcacttaatattgttccacaatttctatcccatgttgaaaatcaatcttctactcctcatcctttaaataaatttatttcttatactcgttttgctaactcatataaggctttcatacttgtagttacttcacaaaatgagccacaaacatataagcaagcaatacaaatcaaacaatggcttgatgccatgtacaccgaactcactgtacttagaaacaacaagacttggtctattgtacctcttccacctggagagaaagcaattggatgttattgggtgtataaaattaagttcaatagtgatggttcagttgaacgacacaaagctcgtcttgttgctgaaggatacacacaacaagaagggcttgatttttttgacacattctctgttgtggctaaaatggtcacatttaaacttttactggttgtttctgctacaaagaaatggaacatgctccaaattgacattaacaatgcgttcttaaatggtgacctcaatgaataggtttatatgcaattacatcctggacttacattaccttcttctttgtctacagaatccaatctagtatgcaaactacacaagtcaatttacggactacgacaatcatccagataatagtacgaaaagctctctgatgctctcattcaggaaggtttcaagaaattccaaacataatatagagccctggcagccaccactagtgagattacttgtcttcaataccttttcactgacctcaaaataccacaaacttaacaagccttcatctactgtgataaccagtcaaccatccacatcgctaaaaattctacttctatgaaagaactaaacacatcgaacttgattcgtgacaaaattaaaacctcagcaatacaattaattcttgtttccaatagcctccaacttgcaggtgctttcactaagccactagcttctacaatacttacttctcatattatcaagatgtctatttttgatttataccatccatcttgagacggggtgacaagattaagatttattattactctgttattttctagtactggtaagttcattagtagttaattgtttttagttaacaactatttcagttaggttccattagttctttcttctttcttgttcctttagcaaggttgttaagatttcttacactgactttactttccttattgttaacgtagatttttgttaactatatttgagcctaaattgtgataagcttgcacaaaaaatagaaacagcaaagaaaaaagaaagaacacaaagatttttacgtggttttgcagtnnaaattctgcatagttcacgagtcaatcttattagatttctagaacagttctagggccttttctcttatgaattttcctcccttttttttagtgcaacatgtctctatttatgatcacatagtccggcagttaattacataaatgactgatatctttacaacaaatatctcctaaaatcatgggatttgatcacattccacgtaaaataagtgcgcttaatatttgaaaatcacacagttgtgattagtccgcttttattgtgtcaatataaaagtgtattaaacatgttgtaacatgtattgtcttgggatcatctcgttgggaacatagcaacactaaccctaatagcgagctagagatcctcctgtatctttgtgagcctcgtcatttatgctactgaagtcataacgctccatctgaccactacagctcttggcgacaaggtgaacttcagcagccaacatcatttgaatgtcagcttcttttcgagagaactgactcgacgagactattaatctcattgaaagatgtctgtagctgattagtgaagataccacgagtgtgtcttcctatagcgagattgacgcctccctattagttgtatgggtttacccgactattatacttagtttgtataccgtatattatacgctaagtgtcttgtcagtcattatattttgtcttctaatgcgtagcgaggttgacgcctcgccttgtacatctgaagttgtatagtttttcgttaatgtatgaagcaacagtttgtatatctttatctcgcctaagacttgttcagtcaaccgagttgtaaatatactttgtcaattttgcctttaacgacattccatttcaaatataattattattacgcgtgttgatttgtattctttacagtttgacatgtgtcctcctctgatgtgttagccaaattttgagtataacacttatatatagttttaatggctcattattacatacataatttttacaatcaaaaaatactttattggttttgttcaattccgcaatacattgtagcaaggatcacctagcatatatgattcaagtggtagtttttattatacatacatggtagggttcatgttcattactttttgctagtttacatactaaaatctgttttaggtgatatgatcttagtaagagatagtggctttaagaaggttatgaaatagagtgctataaattagttgctactagctaaagggtaatctatttggctagttctagtaatattatagtggggttctagttgcttagttcttgttgtttggtnnnnnntggtcaatttgataattttctaataaaagttttattctgaattttctgttattttttcaggtgacattttagttttacaggctgaaactttagccctattggttagactcaatggggctcacatgtgtggcctcctaattcatatagtctattcagattcattagctttggtgacggctatcaacagagggaaggtatattttaacgagctaggagtgttgtttgaagatgttatagctttattgtc

SEQ ID NO: 69619 - DNA, 3331 bp, Cannabis sativa
tattgtattaaagattctttctttctttcttttaaatttggcttctttttccctttattatgttttttttttttaattatataaatttgattgaatgttattatatttctatttgtttcaatcaatgctttattttggtatgcaatagattcaaaattgattcttttggcaatttgagaaaagggatttttgaattcaagtttggttgatttaattttgcttagaaaccaattcactatctgtatgagaggttataaagttggctaaagctccataactctaaattctaatatttggagaataaaattaccaaaaatgaaggaaaaaaaagaaactaggaagctcaacttttatgagagtgacaaattttttaggtcttggatcttaattttatgtcataatgttattggtataattttatattgcgccataaaatgttacatgcttgatggtttgagttatctttctcgagtttacttcgaaaagaaaactcgagaaaggtaatgttacatgcttgacttgacggtttgagttatctttctcgagtttacttcgaagtgaaaactcgagaaagacttgacccttgagttcactctttcgggtctatagcgaaacaatcttgttactattccaacattatgagcaatgaaaaggaactcaaaaaagtaattgggtacttttcttcttctttttctttcacttttaagaaaatagcacaattttacaacaatgggatttaaggggaaaaaaaagaacccattataatgaaactcaaagcaaaattgaatttatataagtaaattgtactcatcatattatgagccaaaatattactcctcattatagcaaggccaaactacactaatatccatttggcccttctccaattttcgccgatgatgatctcttctgttggtctgtgtcataatgttgaaatgcagcatcaagagcctgcaccgaaatggaaaatgagaagagcttataaacaacaaatttactcttccttaatagctaattcatagtacaaacaaacattaaacatagggaaatcactactgagaggtgtggctttattttgacctggtgcattggccgaactaggagcgaaacctgatgccgaaagtctgatggcactgactcctttatttcctgttttcatcaacaaaaaaccttaccatcattattactactaacacacattatccacatcatgttttgcttatcctagaaggcatttcggtttcgattgagttaactattttgacacaatttgttatcggtttttttctgtttggagcaaaaggagatcacaaaaggctttatctttatttcctgtgattactcacaaaatgcaaaaaatcattacttctaatcccatgacacatgattgcaactaggtagcgaaattttatttttcaggaccttggcaaaatggaattcagacactctaatgaacaacaatactatacctctagctgccggtatatacttgacatggcatccttcaatctagttacctgcatgtatatcgagtatcgacaccatgaatctcaatactaaggcatatagattcaaagaaaagcggttcaagactaacctttgtatgaagagacgttgttgtaattggatatgaagaccagaaatgtcttagtaactcttgaatagacatccaatgctgtcaagagagagattttcacataagacataacatctctaacaaagattaactaagaaaaaagaaacttttaggcatttagatctatgttttgggaactcacgtgtagaagttcgtcttttgttgtgctcggtaaactgtccagaatactctcatgaggattcttcccaagttggtacctggtgcttgagatattttgggtcaatccattaaaaacctgccatagagatgagaagttatacttttcagcataaaactaaaactcagcctatcatatattatcacttgaatgatcagatttctgttaccgaaagagcaacttcaggtttaacaatgggattactcagtcccaaagtcttgattttagatatggaatccctcaatgagtgataagcttcaccgatactgaggttgcatttcttttgttcggatttatttcgtatatcgtccaatgttttgagtgcattagcttgctgtgcatcaaaatagtctcgaggatcctgttttcaagaaaataaatttatacaaaatacaacagataaaatgtatactttattacatgtttctactagtaatgatggtgcaaaaaccttgatgcagagaggagcaaaaggatgatcatgaggtgcttgaagatcttctatttcagtcatacgagaaagcctatcgagtctctcctgtgtcacatcctcattggtctctactaaaccagtggggcaaatataataaaacaaaggcgagacttgagttcatatagtaaaaaggagaggctatcatttcaattaacaaataaaccatgcataccttgccttgatcgtactagtgcctcagcaaccgatcgtggatcttccaagtccatatctgcagtgaaatgtagaagcaaatgttatgtacctgaaactaaaaagaacaatctgcattcagcaggaggctcttcgaatcgaaatcacggagttactctgactttataagacacatatggattgtgtgctctaaatgcccaaaaaagattgggatcgccttaagagtgagtgtagctcataagtcgtaacagtctagaaataaaccagaaagcgaaagctaatagattgatagaaagtttcacctatagttcttccttcaagaacaacagcaccttgacggttaagatcttgagacaaagtccttttgtaatgctcactttgtggctcacttacttctttggtaccatcgcgaaagattccatggtcctgaaatattaaagaacaacaacaatataagcatgattagcgtttacgtataactgatctaatacataatgacgaatgatgatacactacatactggaagatgggaatagtcatctcctagatctgcttccatgtccaaagttggatcaactcttctgatctgcagatacgaataatcggggattgaaatactgtaatagaaatgtctatgaaggaacgaatgagaaaaagagagcagaagcttgcattaaaggattacctttcggcgagcttcttgtgccaatatgtcatcttcctttaagaaaatggcgagttcatcatcttctgcagcctctgctgctgcggcaacggcattctttgtactaatgaggtactcggctttaaagtatttagtaaagaagtccttttcactcatctagtttagaaa

SEQ ID NO: 69620 - DNA, 6432 bp, Cannabis sativa
ttgacaagagcaccagaaacaaacgtatcctgctcaaggcaaattttaatagcatagccatgaacagtctcagaagcccaaacatatcccgagagtaaacaaagcttaagcatcggtgccaaactaaaaggactagttgatatgaaagactcacgaagattacgaaaaacactaaaaccctcttgaatattctcgaatttagattcagcagatcgagatatggcagctagaatggagttccaagtcacaaggtctctatagttagttctattgaacaagtggcgcgcatatatgagagaaccacatttagagtacatggtaataagattgttggtcagaaaacgatctggaatttcccctgttcttatgatttttgcatgagcacacttgccaagtgataagtcagcagtggcagcagcagagcggagaatagagaaccatggcgaagaagaagacgagaaagggagagactgagatgtgagaacatagagagaaattctacagaatggctgtggttggaattgcatttctactgagcattcttcggtttttccctccaaaaaattaacagctaccttcacaggagccttaatacaatggtaacattagttatgtcatttcttttcaaataaatatgtatatatatatatatatatatatagacgatcaacacagctatatcacaaacctcacaacctatcttactacagaaagaacaaacaaaattgactaagttcaaatcaaaacttacccaatagcagttgatggatacactagtactggatcaatttagtcctccaaaataataatctgagagaactaaaatagcaaattacagagacatagaaagagaaagattaagatatgtgtcaattaataacaaattttctaatatacacctcttacccttcaattattaacattgattaataaaatatgtgcaaggagactatagtccaccaaatattgtggtagagaaaaatatatgattataggccacaaagtcaatatcttgaactcttgaaaatcatgtcaccttagacagatcgttatctagtcagtttctgtattaggctcatgttaatttatatataaatatatatatatatatttatattataaccaccaattatcaaacaggggaagaaataagagaaaagagaaaatcaaacaaccaaccaataagtgtaaagtaggcatcatcacaagggacagtcaaaattgactagaaatataagacttagtcttatgggaaccacaaagtgggaccaaaacagcattatgatacactacattagaatattatttgttctagttcagttctagaaagaattagaatttagaacataggcatttcattgatatcaaagagaacatttcaaggttccaaactcttcaagatagtttggtatctcagtaatgagtttatatatactcagttactaactaaaaaataagggttaatatcattttagactatatgttttacaaagttactgaatgaaccctctgtttagttaaatgacaaaaaagactgtttttcaaaatagtacaaataagactctaaactcaattttagataatatttttttttaatgtaatcaacttgaagacaattcctaccacgaatagatacagaaaacgaaactatttttgtcacaacacaattgggttactattaagttttattttgacaaaaaatcagttcaagatactatttttgaaaatactaaatccaacttatcatttaacaaacagatggtcaaagcagggtcaaaaatagtatttaccgaaaaaacaataacagtattctaactaacaaaacaactgatcctataggaactaagctgaactaatttgtaacctgaattagaattaaacaaatataggtataaattggtatatattttggtattagatactgttaaaaaaaattattattgaaaaaatctcaaaagaacaaacaaaacttcatcaaatggcttttaccagtaatcaccacatgagcaggttccattcctaaaacgatggaaccgatttgcatctctcaacacaatttctcgttgagaaacctttgaaatatgtttgatagcattatggcaatctccacagactctaagatttttaatcactgttatggtggttgaaggaggacaccttaggagtccataagcaattgctagcttctcactatggtaatacaaagctcgttctttttcctcttcttccacatcaaccaacacgaaatccgtatcggggacatacccttcttctcgaattcttctgattaagtcctcaaccttgtcataaatcaaatcactttcaggatgcgatttatcatcaaccacaaacaaatgcatcttgttcttcacatcaatccagctgaaacccgggtcctttttcacatttttactcttcatctgttttcgagcattactagcctcatcccaacgatttgcagctgcatacatgttagatagaagaacatacgcggctgaatcagatggctccaaaaccaagagctgttctgccactcgttttccagtttcagtgtccccttgaactctacaagcaccgagcagggctctatacattgatgctgaagctttaaaaggcattgatgagatcagattttctgcctctcttacacgtccagatcggccaagggcatcaacaagacaagcataatgctcaatctctggttcgatgccataatctttatgcattgaagagaaatatccataagcttctgaaattaaaccagaatggctacaagctgaaagcaccccaacaaatgtaactctatcgggttcgatattattaccaaccatacatttgaaaagattaagagcttctttggcatctccatgttgagctaaaccaaccaacaaagcattccacaaggcgacatttttaacgtccatccttttgaacaagcaataggcactttctatattcccgcacttggcatacatgtcaactaacgatgtcccaacaaaaggatcggaagcacaatccaactttatcacattagcatgaatttgtctcccttgttccaatgctgtaaggcatgagctagctttgactaaggtagcaaaggtatattcatcaggttggattccggccagcctcatctgatgatatatagaaagagcacgatcctcatcgccattttcaacacatcctgatatcattgttgtccaagcaacatcatcaggtgtagggatatcagcaaacactgtgttagcacttaccatatctccacattttatatacatatctaagatcccactaatgacacacaaatccccatcaaaccctgtttttgaaacatggccatgaatttgcttgccttgttccagtgctaccaaggaaccggaagctttcgtggcagcagctaaagtaatctcatcagccctctctccaagtttatgcataagactcaaaagttccaatgctttgtgactcttattaccaatgatgtacccgaacatcattgcgttccaagaagccaagtcaaattcaactttcttgtgtaaaacaacctcagcatctcccatctttccacttcttgaataaacatcaataagtgctgttgaaacaaatttatcagctattttaccaagcttaactacatgaacatgtacctgtctagcaatgggtaacccttctttaagtgaagaacaagccctcaaaatacttgctagcgtaaattgatcgggtactacaccagtatccaataaatctctaaataggttcacagattcctcctctaaaccactctgactacaactcgaaatcattgagttccaagaaatcaagtccaactcttccatgtatttaaacacttttcgagcaaaataaacagaacctaactttgaatacatattgattagactattagcaatagaaacttcagaatcaaaacctgatttcacagcaacacaatgaatctgtttccccaactccaaatcatgtgtacccaaaactgcacttaagataactactaaagtaacaacatcaaacttcaccattgatctaatcatattaacaaagcaactagtagcaagccttttctcaccaacttgaagatattcagagagtgtcttgttccatacatacacatccgaatcatctctatacaaagataatttagttgagtaagcttgaacctggtccaagtacctaccacatttatcagaaccaagtttgttaatcccagaaataacacaacgcatagtaacatcatcaggtcgtaacccactctgatgaaactcattaaagagataaactacttctttttcaagacccatttccaagtacaccttaagcattacattccacaacacaacatctctttcaggcatcaaatcaaacaaaccgcgagcctctttaattctcccgaatttcgaataaatattgacaagagcaccagaaacaaacacatcccattcaagtccaatcttaacagcataacaatgaacagcctcagaagcccaaacataaccagataataaacaaagcttaagcaatggtgccaaagtaagtctactagttgatacaaaatactcacgaagattacgaaaaacatcaaaaccctcttgaatattctcaattttagagtcagcagattgagcaatggcagctaaaatagagttccaagtaacaaggtctctgtcaggacttttatcgaacaggtatcgtgcatataaaagagacccacatttagagtacattgtaatgagattgttcgtcagaaaacgatctgggtcttgcccagttcttatgataagagcgtgagctcgctttccgagtgataagtcggcggtggcgacggcggaacggagaacagaaaaccatggcgaagtggaagaagaggagaatgggagagagtgagaagtgggaatagagagggaagtgaagagagagcgaagagagtataaagatgggttttttatagaggtgataatggctgccaccggcctgaggtcggattggaatggcatttccggtagagcattcttcggacggaggagctttaatataacggctattcttcaaaataataagaataattatgatttttgcccacaaattttgatatatatcaaaattatgtcttttaatttttaaagccgctaaaaaactctcatgaactatcgagattattgaatttaaaatttttgtccaattttagtaaaaaaagtctaacatggatgaatgttcatcagacataatttggtacatagtgacataatttggtaaatatcaaaatttgaggaatatgatttagtacataaacaatcaccgaattagtaaaattaaataaaattaaacaaaagttcttaaattcaaaaatctcaatagttcagagaaatttttaacgattagaaaagttcatgaaccataatttggtacatgtcaaaatttaggagacaaaaatcttaattagccaaataataatatataagattttttttttgtttttgtatttaataattttttttgtttttagtgcttgttatagttatttaaagtctatttaggatttttacccttctaaattatgatttatgtattattgtgctcctgaacttttaaacccattaaaaatggtctctaaactattcatagggttgtaaattagtcattctgttaagttttatcacaggtagcaaataaaatgatatcatgactgcttaatcagttgtcacgttagtgccatgttaacgatacgtgattcattaattttttttaaaaaaaattaattcagttttacgtaattttcttaattattaatttaataattttttaaaaatatataatttttatttttttttaatgttaaattatactcgtggcgttgatgtggcaattgactaagcagttatgtcatcattttatcatcacgcgtgacaaaacttgactgaataaccaatttacaatactgtgaatagtttagggggtacaataatgcatatgtcatagttcaggggtaaaaatcgtaaataatcttatttaaaatatcttgcaaattttaaaaaattcgaaataatttacaatataggaagtagtgttcaaataatctatttcttatgcatgctagccaacaaaatatttgaattctattttcagagtgttaaattttttcaaattttttaaaattttataggatgtcttaaataattataataacatatacgatcatgaaaaaaaattagactgaaatttttccaaatgccgtaaaagataaggatacaagagtacaccttttttaaggaggtgcacagtaaaattttcctatttcatctaaatgcttgtattttttaataaaaaataactttaatattaattaataaatttttgataacattctattcaacttttgattgaaatcaaattgtgatcgtataagttttttttttttaaaaa

SEQ ID NO: 69621 - DNA, 2381 bp, Cannabis sativa
cttcttcttcttggcttctttctgcaaatatgattgaactcttcttcttcttctataagcaccaagtaaatgtcgtcgtttcggaattcagaaggagttatcaccaggtgacaacgttcttatttcgttggataagcttgaatttataacaggccttattatatgttacatagcacataataaaggtcatcattttctgtctttcaacaaggttagtaggtcattatgtaaagtttttttctgttaatggagtaaacacattgcattatattaaatttgggatgaccgataatttcaattactagggactcaaatatttttatgtcatgagtaagttcccatttcgtcggttttcaacttttcttaattcaactgagaaggaatctatcagtgttgaacccataatttctgggattttgaggggaaggaattggaatccgattccattaccccacagaacgattcctgaaccgcaaggacaagaccttgattttgttaatgttgctcatagccatctaattcattccgattggactaagcttgactctttatcgaatggcttgaccgcatttagggtaaaacaccttctgttgaagattcagaaggaccatgttctttcacttgagtttttcaactgggttggaagtcaaaagcctagtttgcataccctggaaaccatttccattattctccacattctcaccagaaaccgaaaatttaagtccgcggaagctattttgaggcctattcttgcctcgaattctatagacttaccttccaagctgtttgaatcaatagtgtattcgtaccggttatgtaattcttctgctcttgtttttgactcccttttcaagacttttgctcatatgagaaagtttaggaatgccactgacactttctgtagaatgaaggattatgggtttttgccaacggttgtgtcctgcaatgcatatctgagctctttgctcggtcttgatagagttgatattgctttagcattctatagagaaatgcggcgctatcgaatttcaccaaatgtttttactcttaatatggtgatgtgtgcgtattgtagaatgggcaagttagacaaggctgctgaggtttttggtgaaatggagaatatgggttgtagtcctactattgcatcctataacacattgatgtctgggtattgtagtaaaggtcttctgagcatggctacgaatctcaaaactttgatgggtaagaatggcgtacaccctaatgtcataacttataacactcttataaatggtttctgcaaagaagggaaattacatgaagcaaataggctttttagtgagatgaaggccataaaggtggatcctaatactgtaacttacaatatcttgataaatggttatggtcaagagggtaattgtgaaatgggtagtaggcttcatgaggagatgtcaaggaaccgagtaaaggctgatattctgacatataatggcttgattttgggactatgtaaggagggcaagaccaagaaagctgcatatctggttaaagatcttgataaggagaacttagttccaaatgcatctactttctctgccctgattagagggcaatgtgtgaggaacaactctgaccgtgccttccagatatataaaagtatggtcaggggcggtttccatcctaatgctcatactttcgaaatgttgatttcatccttttgcaagcatgaagattttgatggtgcagtgctaatcttaaaggaaatgtttaatagatctgtgattcccgatttggttatattgcataaactttatgaagggctgtgccagggtgggaaacaaaaactggtcctattattatgctctgagatggaagcaaggggccttacacctcaaggttttgacaaagataagattatatatgctctgggacttaataaggagagccagccattcagagattaacttataaggttacaaccttacttgccttgtatcaaatttttaacatagatttttttttttatttctaaatgaaatttaacatagatcagtacatcatgttagcacaatgtacatttcatttgacatctgtatacctatagcttaaatgtagtatttatgatatgcatatgtacataatctttgttttcttttctctcttacacctaaaatggtttcgcataatggtttgagttgtttgtttacaaaaactatttaatggatttaataaccttctatgctctctatcagttgcacatgaacgttcgttatagttgattttgcattatcacatctgtatatgattggtgtccaaatattaattctaatttaagaagtggattgtcttggtacaattacttgaaactctacatagacaacaaatgctgcttaattttc

SEQ ID NO: 69622 - DNA, 4046 bp, Cannabis sativa
agttatttaatttttttaattatgtaagtttgtcttttaaataaaaaacaaatgaaaaaatcactgttagttaagttataaaatgtaaaacagtataataatttaaaaagcgttagaaattaacgttaaaattaatattgtgatagattaagttattattgataatgaaagacaaaaaacgtatgtacatgtaaattatccaaaaactttctcggtaagagcaacttactctcttagtattttattaaattttagttaaattagctattatatttcaatcatgatctctttctattaagagaattcttttacagcaaaaccttaagaagcttcctatatttagatagctatttcatgacatttgatttaaactacggctctctattttggaaaaagaaattattgcaagtgaatggagtgttatttattattacttttttatgattaaagagcgcattagtatggcatctgatacagaaatgttaatcttaattcacgtcactgtcgaagcaatcatcatcatcaccggattaacatccaaggcattaataacaataatattccggtcaacggacagagtcgtccaacaatgaacgattgtatctgcaattgtgggaaagtcttcatcgccgacaaagatgattctcagacatattctgtttatagatttgtgtggactagtattgaactattttttctttgaagaaaaatagttacccaatatatttagtaatggaaaaagttattaaactcattagttaatggggctgacagaaacattttgatccaaggcaaaacaagtctctgctctctagtaagacgtttatttcaagtttggtgacgtttttggcagtacttcatttcaagctgctgtaacatacactttggcaattgaactctatcttcaacaacaatgaaataacaaattataccttagcatcgccaacaattatttttcataaaaataaaaataaaccatcccaaatgttacaaaccctttattatcgaccaattcctccccttaataataagcggttttctcaaatctgccacctcacaacaagttccagaattttcagactagcttcaccaacaagcagaaattaaaacaagagtgttgatcatcaggctgctgcatcaactagcacaaacaatggtttcccacctagtcgggctcgaccctgaaatggcaataaaagcatatcaaaagactcacctagatttgttaagacaaataaggaagcaagtgaagagtaagtaggtggcttggaaaaagcagcaacgagtttacaactatttctgacaaacattcacaatagagatccagaggtacgatgtgtcctaccttcagctcgggcagttcaataacacaagcacactcaaccacatccactccaacacgttctacaagagaaaataccaacaagatgtaagcctgagagttaattaaaaagccatcacatggtatcccttaaagcttataatgtagcaagaaaaatattataatatttaaattgtcccaccaaaactaagtagatattataaaaattcaattaaccagcacgacgacttaaaaacaagttttgaattataatcattttaacatcaatattaaagttcttccacgaaataatccctggaattggtaagccaaatagcatgttcataaatggatatccactatggagcaatcattcttactcccataaagtaaaataaaattaaaagcagcagcctatgaaatataaaagggagagtaatgttcatttctatgtatagtaccaagtagcctgattgcagcacacaaggttcctccagttgcaataagatcatctatgatcagtgcacgctctcctgcttctacagctccaacatgcatctcgatcttgtcagttccgtactccaaagaatattcttctgaaataacttcccctaagaaaacaaataaccatgtatcaatatcagtacatatatataacgaagcctgcaaataacagtacccaaaatttatacccctacaagctacaacattaatggtgtctctgtctcaaattcccctaagaaaacaaataaccatgcatcaatacatataaataaaacgaagcctgcaaatgacagtacacaaaatttataccccacccctacaacattaatgatgtctttgtctcaaaccccaagtcccttttactcgtacatgtctcaactggtattaactcatattcacattgtacaggacttttcaccagtaaattgtgatggattgcatgttacccagaacaatactctcaaagacagaaagaacaccgccaagtgggattgctaatataaaaaggtggtgtagatgtacctggcaacttatgtggcttcctcataggtacaaattttgctcctatagccaaagcaataggtgggccgaatataaaacctcttgcttcaacacctgtaccaaattatcaatataacaatacatgacatgttattttataatcatcaaacagtaaatgagagaaacagactaaagccaccaaattaaaatgaccctaaaactaagtgtctagacaacattcaatgcataacaatgagattccgctccgactgagtactgatatttgctgccaaaaacactactaataaatcacatattatgagttgtgtttaacacttcaactaaatttgttgagggaccccaccaaacctataagctccttgaagacagcaaacatgtgattcttgtttacacctggctcatttattaacatatatgacctctacaatgctaagtagggtatataaaaccttagcaattggtcctaggacttgttagtactcgtccttctcagaccgctgaaatatcaattgcaaactcttaaccaatctgaaactggaaccaatctgaaacttcgagtcaatatcatcaagctatgttttatgaggtaaagaaaggtgtaactatttgcttcgatatctctggcaccaaggtccagttgaacaccatttggcccgattattttccaagatgaacaaacttttccatttaaattcaactataaaccaaggtatcagcccagtacatcttacatctactgctcaaaccaggcatttaaagtaaacgaataataatttgaccttcaattctttctagcctttttaaaaaacatacaaaccatgataattattgaagaaatagacattgttctaaacattggacaactgaaaacaaaggcatcagcccagcacctcttacatctactccctaggtggcagagcaccacttcaacgctgccactgtcatcaacatcgtcccatctcccatgacaattgaagcgccaatcttttatattattattattatttttgatgttttaattaatcaaaatcaaatccaaaacaacctcaagtatattacttaaaacactaaatatgaaagttttaaacacatctatatattatttattgagctctaaaattgtgcagaattttggacaaaatgacgtttgtgcgatactaccactttcgatatttttgaggtaaaaaacgatgcatcagcgatgctccaatttttaacgatcttcaggtaaaaacaatgtttttgccaatgtttaaaattgtggatttaagcctcaatgcatttcttttttttttttttttttgtgaggcgaggcagccttaaggcgcattgtggcgtaagcttatttatttatttaaaataatatttttagagtaactaaaaataccaaggataaataatggcttataaaaccaattatacaataaaatgtctcataaaacaaaagcatggcagcaaatgtctaataaaataaaactcaaaacttaataaatataatttttgttttaagaactagaatcatattctactattctaagaacaaatttcttctagtctagaaggaggaggaagcttctgtcattttttcctttatttttctcttcttttctgatttgtgttggctattctattctaaccttcagaaaaaaaaatagtgttttcttttttttttttaaatgttgtatgtttaattgagctt

SEQ ID NO: 69623 - DNA, 3432 bp, Cannabis sativa
atacctcttcaaaataagtaagctcgctgagaaggccagaaagtagctgtctaagtttttcaattttcttctgggtatttccacgtacatttcttacatctctagtaatagaacacaactgagcagtcaattctgtctgacgaactaaactttgccataatttaaatccatcttcattcccattcacaccaggaggcaactgttacagagaggatatagttattgaactgcacaattattcagtctaccttggatgcatttttacatttatcaaactttacatatatatatatatatatattttacagatgcccatatttgtactatcaattgcagctacataaaattcatgcagtgagattagtacataatatttcctttcaaagagaaacagggtataatgcacaagaaaggtaagctatgaccttaatattaaatgtagataaaggcagaggcatagcaaagtagaactcacctttatcatgttttcttccaaaatctcataggtactgtagaaacgtttggcatatgctggatcatgaagttccacagcaacataccagcgaagaaagctggctaactcaatgttccttaatgctgtcaaaagaccaaagtctcagagataattaacaaacaagtaagctgaaaatatttttagtgttgcgtgggaacatgagtgcatgcacacacaattaacaagtaaagagtacatacagcgctgcacaagaaaataagaaagacgagatttatcagagcgctcaaatcgaagagcctgaacaagttgaagtaagtagcactgaagttcttcatcatccgctctttcaaggacactgacagcataagcacgaacctggtacaagaagttaatctaaggcactgtacaaaagaaataccaaatcccaaagataatagcataaaagatctgtcttatcttgcacactgacctcctcactttcgaaaacaggggacagcagttccaatgcatcagaaacatcaatcatttcccacctgcccataagctctagtgcctgttttgcttcctgcaaacacatcaatatatataaatcttaagtaaatatgtattcagtagtctacaatgccaaatagtgagtccccctattgaaaatcaacgatcaacgtgaagacaaagatggctcaattaatggcacaccatttttcttttctttttaaatcttcaagaattcgagatatgccttcttaacaagctcaataatcactgtaaccaaaaatggattgctgacctgaacatcactccactcaacacatcgaaggaattttgtaagagccctcttttcagacatcaatgagaaacgaaatttccacaataattgcctctcatctccactcaaagtccttgttggtgggtatttaagaatcctttgtatcgacctaaaaataaacataggaagtcatatacctcaagattcttacattaattaaaaataaatccattgacagactagcagaggaaaaaaaaaaggctaagatattttagtgtaagactttgaagcttactttctttcattggagctaggtttaaggtcacggtcaataactccacgggttaaacttcttgcaagctttagttgtttgtgctcagaaggatttattttccccacttctggatcccaaacaatgacaatttcatttgttgaagcaataggtgatggtaataaaaaatttgctcctgattcctacattccaaacaaataaacttcatgacaatttccatgaactcaaggacaatgtctttttggataagcaaacaataaagagatacaaacacattaactttaactaacaattgcctttgaattcaagaaagaacaggcaagcaagcaaacaaacacaacaactttcttttcatttgaaatgtacctgaaaaacaactcgatgctcaaagccacaaaactcaacaacaaggtataaattagaatttccatttatagtgttttcacgctccttgattttatcaatagatttgaatgcaagacgatctagccagtcaacatgcgggatttgtcctctctcatacttgttcataagcttctccaagcgctccaattccccgcgttcatgcctagggacctgtaaataagctatattacaaaatgatccataatcttaccgattaaattcaatagaaatcgctacaaacctttccaggagtagttgtactaaatgatccatctgcaacttttccttgccaaagcctgagcttctgttttcctgttttgagctgccttttgctattgaagagaagaatcgttgccccaccaactaatccctcatctttcccacgtgaaacatcccaaacctacattaccagcaatatcaacaaccttgaatcttaagaaaaaaatctaagggaaaaacaaaaaagtaattatcaataatttgataaatcaacaaaacattattacaatcataaaactattgatccaactaggaatataaagaccaacaaaaaagagaggactgctaaaaaaaaatccatcttttaactcataaatgccataagatttacaaaggagaacatttcattccattgagtaacacaagtatattaagtgagaaggccagcttactgtaaaagcaagctgtgagtgaccagttaagtctcgatatttggtgctaaatgtgattagttcattccaacaatatgaaggtcctgcagattccaacctgagaaagagtaaagaaaatataaaaatcatcataactaaaccaaacaatataacagtaagtttggcacaatagaagagtttcagatgttatttcagtagacacaattacaaaaaaaacatagataaattataaggtgaaaccttgttcttgtgggtaagccaaatggagcaccatcaatgtacaaagcacactccacatacaactccgcttttctctcatcagtagttgaatcatcatctgcagcaaaagaattaaggctaattaagaaaaaaaaaattctattttggtagaattggccaatttttgatcgaattgacgtaatttctggataatacagattgcccaatattgcaatcaagtgctgaattgcttaaattacacgctgagttcatatcaaagtcccaaacgcaaagaatttgagtaaagcggaaaaagagaattagggattgaaattggtaccggaatcgagggatttagaaggaggcaaatttccttccaacttatcgattcggaaagtcaccggaagattgatatcgcaggacaagaagaaccggaactcgttcccattcatctttctcgttcatacgcttttttcaaagcttttgtttttatcatgactagttaggagggcacgtgtaagtataggggtgatttttttttttttttctaaattagaaacttcttttaattttgacatgtatcaaattatttaaaaaaatttag

SEQ ID NO: 69624 - DNA, 1345 bp, Cannabis sativa
  modified_base (189)..(189): a, c, t, g, unknown or other
atattttgggtcatgaccatatgtttcaatgaattgtgaaagagagagatctatatctctcctttaatttaggacacaaaatggatcacatgtgatgacatcatacatacatcatacaaacaatggtaagacaaagaccatacaaaaagaaagctagtgtcgaaaaccctaggagagagagagagaganagagagagagagagagagttgtacatgacgtataaaattgtattttgtgttatgatcaaacattgaagagagatattagagttagaatcattagaatagaaagaaaacagtttcagacttttcagttgggtttattagtcggccatttattttcacttagccccacaacttcacctaaccaaattgaaactaacaccattctcttctcttctttaattacctcttttcactctccaaaaatgtttcctgttttttttttttttatcttcttacccaagccatgacccattcaaacaaaggcccctcctccactacgtacattctctcttaaatatggtaactattaattaatttttatctatatatatgtatgacatatgacattatttaatgttacactacatatagtcctcaacacccaaactactcaaatccaaaaacaaaatcacatcacccctctcattaattacaatatctctctttctttcttttatatataaatccttacattaccaaattacttctactataagttttatcacaatattatatatattgatcttcatcttcttctttttttctaattgcgtacattgaaatggtgaaaagagatcaaataggtgcagtagtaatagtagtactaacattgattattcttattgggcaagtcaattgtggaagacaatcatctgaatttttcaaaggaatgattccaaagtcttcatcatcatcaacagctcatgatcatcatcatcatcatcatcatcatcatgaagattatttccttgtttcaaagcctaaaggagtgtcaataccaccttcttctccttccaagcaacactatgacattggattacaaagctccaccaactccccatgatatatatcatcacattaatatattatatatattcttcttcttcttcttttattgatcatagatctcaccacagaacagaagattataatgcttatactaatggttggtaaactattttatatatatataaattgtattttattttatttttagttgatttttgtttatgtgatatatatataggaataaattataagcatgcatatagagcaaattttcttctttctttttttttttttggaacaaaaaaaagttccttgatcatcattttcttag

SEQ ID NO: 69625 - DNA, 3185 bp, Cannabis sativa
  modified_base (86)..(96): a, c, t, g, unknown or other
aaaaaattatgaaaataaaattaagataagtattgaaattaacataaaataatgtgagaaatttttttaaaaaaaatattaagagnnnnnnnnnnnaattatttaagtttatattttttcaaaaataatgatgtgtacttatcattttgtagggtgtaaatagaactccccatataaatcggtgtagggtgtaaatagaactccccatataaatcggtgtgggcattttcgattgatttcctttagtttgtacgacaagtcgttttatggtgttagacgcgtccacaccatattcgttcacatagagaatcacaaccttccccaccaccagcgttgttaactatattctctcccataaccaagttctctcttgattctctacccttgtctctcgatctctctccattttcgggaccacgcatcacgcgccatccatggcttctccaccgacactcccaatttcccaatccaaccaaggagccgctgcccccgctccgtctcagtcaacgatcgctacaccagccttgcgcgccttcctctcacgcctctcgaactctgttcgccatggcttctctcagcgccgcccctggtccgagctcctcgatcggagctctttatctagacctgattccctcaccgaagcctactcccggatccggaagaacgtcccgtatttccgcgtgaactacgcaatcctagtcggcatcgctctcgcactctcgctcctctcccatccgttctctctcattgttcttctctcactcctagccgcctgggctttcctttacctcttccggccgtccgatcagccactggtcattctcggccgcacgttctcagatacggaaaccctcatcggcttggtgttggtgacggtgatcgttgtcttcgtctccagcgtcggatcgcttctgatctcgactctgttggttggattcgccattgtgtgcgctcacggtgcgtttagggttccggaggacctgttcctcgacgaccaagatagtccgaacactggcttcctctcattcctcggtggtgctgcctcagccgccgcaccgtccctcgccacgcgtgtgtagtggaaaattttgcctccaccgtctcaaggtttgttagggagagaatttgttttactcttggcactttattgattattcttgctttctttctagaaagaaagtgttctgtttggctttacttaaattgtagattgaatctttaactaattttgttcggaaactgcctcaagatgtaagattttccgattttgtattgaattttatagttcttccaatgataattcagattctgcattatttatttatctattttaaatctatttttttttgtggaagatactatctgctattactttgaagtcaatgtaagtattcaattggtttctcctgtagattttaattacatgggtgatttgggcactgcccgttaagatagatatatgcacaagcaagttcgatatatggagtacttttgtttattttgtcactcaaaatcggttctcttttttccttttaggcaaatttagtttatgaagctatggtttctctaacaggttcatatggttgtattgacaatctagtttgctgtaggaagggatgagtgtttatgttttctcatcatttataggaactatggtggggtttttcaaatccagactgtattgatgataatcgagggtgtttattgtgttatttgtattttctgccagctgaaaagtgtagctgtcagagaagagacttaagtttcttctctggagctacaatttcgaattatagactgaggaaatgggtgtgtgatgttgtatttgggagatttcacaaaaatgggagagatttaatctcttcattggatctgagatttaatctcttcaatgaagcggttaatggaacttcattttgattttatctctgtaaaaatactttttatgcattgaagttgattgaaataaagcttattacttgtagttttggtagtatatttctaggttcctgccattttgttagataaaaggggggtgatagcgtatgattagaatgagagcaatgacacaaattttcaattattatgctcttcaattacttgtacagttcgtacaagtaagtcacttgaaaaggataaaggactgttgaatcgttgattactactatagtctctttttctagcagtggctcgtggggacaaagcatatcttgattcccttacaacagcaccgttgagtaggacattctcatgtcgtcaatgaagtccacccttttgcttgcactgtggcttacctgtaagaaaattctaggaaacatctaataatacacgaatccttagcagttattcattctacgcaaggcacgatacttggcaaaaataaaaattgaaattacaagttttagttagattaatcaactggtttttaagaaatgaatccagagggtgtagaatgctatttctacctgttcgatgaattgcctgtgaaactattcaaagggcattggaaacagtttaatcacaacctattttttccaagaggcttagaacaaaacgatgcagggtccctttgccggatttcatcaacgtcatgtcgaactccatcttgttttcttcataaatgtatcaaaaatattgcttttgttagttcacacactggagattaaattccccgatcgtgcaaaatactttggatgagtgcccaatttcttcttacaaatgatgtggtggtggaacattagtcctgccaattgtatctttaccttcatgtttcatgtttgttgtgatgatgtatccttcaatagcatgagcatgtgtatttctttatcttttacttctcactaaccaacattggaaatatagtttagaaacttattgttgtcgaagaatttgtaacaagtaaataactacggtaagaaaatacatgtaattaataagtaatatttactttagttcaagatttaaaattccaaagaaaattttaccttttttaccgtttcatgagattctgccaaaactaacccatccaatccaattataatcgaacgattcaatcccaaccgatccaatagaatcagatatttaatcataattggaacggatcagatgtaaatttttgaaagggaaaattatagtaaatgaccccaaatcataggaataacatatgttcttattttaaaaaatta

SEQ ID NO: 69626 - DNA, 2184 bp, Cannabis sativa
cccttggtttcttctcaaaaacccatttatatctcttccgttgagaatttctcattgttgcctaaaacccagaagcgcgcggcggctactgagtgtaaggcctacgaggctgatcggtcagtgcctttggaaatcaacatcgagttgccagatcagcaggctggtcagaaatacaagattggtctatattttgccacttggtgggctttgaatgtggttttcaatatatataacaagaaagttttgaatgcttttccctatccatggctcacttccttgctatcattagccgctggttctctaatgatgcttatctcttgggccactagaattgccgaagccccaaaaacagatttagacttttggaagacccttttcccggtaagagttttatcattcatagaaatcacatgagaaattaagtggtagtttttaattttgctctgttttttttgttaaccatattcctctgcttgtgatatatgttataggttgctgtggcacatacaattgggcatgttgcggctacagtgagtatgtccaaagttgcagtttcattcactcatatcattaagagtagtgaaccagctttcagtgttttggtgtcaaggtttctattaggtgaaatgtttcccatgcctgtctacttgtcactagtgccaataatcggtggttgtgcccttgctgctgtaactgagctcaatttcaacttagttggtatgaaaacttgtttgagaagatagtttattatttagtaccaattgtgatggttgttgttgttgttgttgttagtgcttacaatatgtttgtgaaaaaatatgtttcagggtttatgggggcaatgatctcaaacttggcatttgtgtttagaaacatattctcaaagaaagggatgaaaggaaaatctgttagtgggatgaactactacgcttgtttatcaatgttgtctctattgattctaacaccctttgccattgctgttgagggtcctaagatgtgggctgctggttggaaccaagctctttcacagattggtcctcatttcgtatggtaaataaacactcaaaaatccctctttgttgagtatatgaatgaattctcagatgaccctttacttaattatttttgattgaatgaataattgattgtaatgaaacaggtgggtggcagctcagagcatattctaccacttgtacaaccaagtttcatacatgtcactagaccagatatctcctttaacttttagtgtagggaacacaatgaaacgagtatctgtgatagtttcatccatcatcatcttccacacccctgttcaacccatcaatgcacttggagctgccatagcaatctttggcaccttcctatactcacaggtaaatatattctcttcacaatcttgtttgattttgatattttagaaatctgaaaaagtttattaggggggccaccaccataacttaaccaaacctttttgtttgtatattcattcattccttcctacccacttgtttgttgttatgaccctttagtatgaggtaaggtcacttattgaataagtgtaaaagccacaatgataaaaaaaattgattgaaaattttcatgataatttcttgtatagagattgtcacatttttgacacttttttattgaataatttttgtgagcaggccaagcagtaggtgaagaagaatagtaaagatggcacagcttgtaaaatatagagataataaatatggtgtggagagatatgttgaatcaactatggaaattttggcagtcaattttggagtaatgagaatgagtatatgtaattgttttgatcactttcacatctttcgcttgagactttgacgagtttccctttcaaaactaatatttgcctttttgttgaacagaccgttctttcagaaattgtaatattgtactcattctaggggttgcaattaaggaaatttaaagtatttcattattacttttttttctaagaaaaatatttcattatttcttggtaaaacattttgatacgttacgctatgtttagaagtattattaagataataattatatagtagtaattacattataatataccgggtgtaataattacataataattacatatcacagacaaatatatcaaatcggattattatttttaactacatacaaatttaattatacagt

SEQ ID NO: 69627 - DNA, 2628 bp, Cannabis sativa
  modified_base (333)..(346): a, c, t, g, unknown or other
aaaaaaaaaaaaaaactacaacaatttattgtttcaaaaaaaaaaaaaaaaactacaacaatttattgtatttatccttttttgaaggacttgttttaatgctttttatcaaggaaatataatgttttcttatttgatattgttaattagtatttagtttcattaaactattggatttaatcagatctttaaataattaacagggacaatccatgcagttttcataatccattaattgataataatatttgtcttttaatgtaattcgtaaacaaattttgagaacttacctatataaacaacaagagcatatataataataataataataannnnnnnnnnnnnnataataataataataatatgatacatgtcaaagttagcttatttatccggtaattagcctaatgtgtaattgttgccttggttaaactgtaaaaattacatgtaaatatttatacggcattcatgcacttattatgtttgatttgataagttgattaattaatcataatttgttaaaaattcgacagtgtataattatgattaattttttaaaaattatagcggtcgtataactgcaaaatctccttacattagtgttagcattaatgctttagttaaagtatattaattagagaagaaaataaaattaaggaataatattaagttaggtatatatatatagtacatacagaaccagacaaacgaggccaaggaccatggtcaaaagcaacacgggcggctttcacggccaaatcaatgtcttccttctctccttctgcaacatttgctaggacctctccatttcttggatctatactctcgaatgtttttcctgtttatttttaattatatattcaaaaaaaaacttattattataaaaataaataaaacaaaaaccagagacaccctccaaaataaatttgttagtgtactggtgaaacattactagtatattatttcacatgagagagggaattttctgatattattttcgtccaacaaatgatatccatgaagtttcttgtaaaatattcaagctttttctttattaattaaagtaattgaagcatttatggatggaggaggagagatatattctacggtcattgcttaattaacagttaatattgtttattttaatgagtgatgtatcaactatctgtaatttatttcattattagtggactaaaagagaaataataactattcgagtaaatagaaacacaattagcaaaaattttacctttataagcgtcatgagcttaatgttatgtttttgaaccttatacatgttgtttaagacaataacataatttacacatgtaatactaaaaaaaaattacaatttgtttaaatattgatacttatatgaaaaaaaacagacaattttaatatgatccgctcagtgtgtagatctcttatacaaaccaagtgataaaagcattaaaaacgtaacacttaacaacccaaattcaatttttctttttttaaaaaaaaaaaacttttttatttttacactttaaattagtttttcatatgcgatcaaaaatcagtcacactcacatatgcgagtcatgtattgtagccatattgtttttcatttctttttcaaaataatatatttttcttaaaaattatgttttaaataacatctatatcatctcttattaattattatatttgaaagaataataaaaatctttgaaaaattggattacccaaaataaagtggaatattggtaattattataatggagaatataaatatggtactaccatatttgatacaatttttatcattaagcttcaataaagaagatgcaaaaattaatctttatactagctagtgtccgtttatatattaatatttcttgaaaatatactaatatatattagaaaaattattttattgctgactacataataaaataaaaataaaaatagaatatttagtatttaatcagtatcacgtagctctagccacaatgtttcctatgatgatatggattcagatggctttattgatgattccgcggagattgctttgcaatcccgcgactcattatgaaaatattaagttggaatgctcggggattggggaacccgaatgcattcaggcatcttcgattgcttgtcaaacaacaatcgccccatattttgtttcttatggaaacaaagctgtcatagaattctatttcccgttttcgacaactcttaaactttccgaatggtctggaatcccctcgtaatggcttaagtggtggactgatgcttctttggcatcagaatattgatgttactcttctcaacctgggccgaaccttctttgattgtcttgttaaggctgagaatgatgcaaccttccatctatcagccttctatggtgcacctgatgcgcaacataaggctgattcatggttgcttttgcaacgtctagctgatgtttctccatcactcccttggatagccattggagactttaacgaaatactttccaatgaagttaaatcgggcggctgcctcaggagtgaaaggcaaatggaatcgtttcgtaagactcttgaccattgcaaattacatgagactagctttgaaggggatccctttacttggattaaaaat

SEQ ID NO: 69628 - DNA, 2726 bp, Cannabis sativa
  modified_base (2114)..(2115): a, c, t, g, unknown or other
ttgaaaacaatagcattaaattgtataaattaattatgagtctaaattttgttagaaggtatttttttaagcattaaaaatgaaattttccttttaaaaagaataaaaaaaaagtgaaattgattaattaagaattgattgtgagatcgtgtaattctgtggggagtcgggaccgtgtcaattgataagaaatggcaaccactcatgtggtcgctgccagcaaaatcgcaggatgacttgtcacttcacttgtgcagaagagaattaattgttaagctcaactaaacctcaataaagaccttcaaagtcaaataaaactattgtacaacaacggatatatcagccgaggatttaattaccattagatcattataacaacaattgactacacaaatttgttcacagctgaatttcaatcaggcataataagttctcgtgcttatagacaaggaccaatgatacaaaaaccacaaggtcatgaagctttaccggatgtatcagataatgtgaacccgcccacatgtggtttgagttatgcattgctttgtttgtacaactttgtgtcaagcacttgtttaccgcacatggcacaaacccctgtacacagcataatccacataagattttgtggcattaagccaaaagatgagttagacacaaatgatggtattattgattttttacctttgctgtaagcacatgtgtggcagtatttaccatcctggtgtacttgctgcttgcatataatgcacttggtatttccataaggactccacctgtaaggaaaaagatatctcaacaacattttggaggtaaattttcaaacaggaaagaagaaaattattcaagttcagaatgagtaaaagtaactcaatcattagtctgaactaacaaactacgaacaaatccttcaaagacctatatagcttattattacttttatgccaaaaaatctctcaaatttgcttttgctatgtacagtacatgcgtagaaccttatattttgtgggaggaacaaacaacagacctgaccagaccgattgagctttactcctcttggtagtgggtcaaaaatctatatacctcagtagataaaaataaaaagctttcaattattatatggtcagactgccagaggctaatgttatgctcttatgagatccgggttcaattcctcatggtcatcgagaccttcggggcaatttgctagggttttctgtaagcattagaaatagtttgtataatataatgacaataactccacctatacttggtatgaagcctaaaaatcttttaagatctaactcaacaacttcaaccaaaaacaatctaaaatttgtagtaaacaccataaccgctcactataagcccagaaacaaggtagagctagcattgtttgattgtagtctctccaaattggcatctcataacattttacaaaaagggtactgctaatgaaaaagaaaaaaatttaaataagaaaaatcccaattttgttcaccagttagaaatatgtatatagatcaatacaggcatactaaataagttacaggaagaaaacccacgaactattccattcgtataaaaaaatgtagaaaattcgtgtaaatataaaagggtttaaaaaaaaaagaaaaaagaaaccttttctttttggagagaagcttgttctcgttgatcttgcggccaccgccttctgtggtattgctggcgccctccttccatttgtctggcactatcaccttcgcaagcttcttctcacctgaaaagttccatagaaataaataatacggaaatcatcataaatttgcagaaattagagaaagcaaaaaacagaattgagaatttggagattcatgaagcggagaggaagatataacgaaagaaaatagagacttacacttatcgcacaccattatcgttcttgatcgttctggtttctcttctgtgtttcttgctatcttctattatctgagccctaatttgaccactttctcagactcgggtagattcacggaagtctcagtgcaaagatgaaaagggaaaaaaactcttatggttcaatttactaaaatagcctccctttgcaacatatttttatttttatttatttnnttatttttattttttttaaaaaaacgtgatctgaattccattaacacattctcgagaaggcttcaataatgggcgttaagacctcttcaaaccagtataatttattgtgtagcctaaaggcatgtttagccaaaccatgagccacaatattgtttctgcgtgacacataggtcaaaactggcttcaaaaatttagacaataaaactatgacatcctcgaacagcacacccttctcatttgcacacaccttcctattattgatagccaacactagtgagagaaagtcagatttaaccgtttctaggggaatcccacacgaaagagcaaaacttagtccagtcataagaacaaaaatttcaacttgaaaagccgtaatactacctgaaaagatcaaaacatcatacgatagaacaacattaatacaagctcgagaaaatattattcactaaaactagataactaaaaagagactatcaaccaaagcataactcaaccgacaccaaaactaaaactactttttacagcaaagaaatgaaacaaaataaacctaacaaccaatacaaaccaagggccacacctttggttagtaactatcaaaattattaaaattc

SEQ ID NO: 69629 - DNA, 2542 bp, Cannabis sativa
aagctttgcatagccaatatcctaatacataatattttcatatacaaaagagagttagaagaagagaaagtaccacatgcatagatctcaaattgaaaccaaatgtagtattcaaaatattaaaatagctcttgaagaagtagtagttctaaagtagacatgcctgaggaatacacaggctggctatggtgaggccagcaatgagatctcctttaaatttggcaaggctatagtccctagcccaatcaaagatagggaaaacagcttggacaccgagcataaactttttcgacttgggttgatctttgaatgagcggaaaggatcatccgaaaagaaggtctccttgacagcagtggagatttccttcaacaggttttgcttaggaggttttcccagcttgtgaatgtatggaaacctccccgaatggtggcgccgtgaagatggcgcactcgatatgtcacctccaatttccttcatctggaattcatcaccaactcttccgctcatgattaatgcactatgcaccttcacacccacgtacacaattagtactgatcaatattataaccatacaaaataataatctggtacgtacaaacaaagagtatatgaaaactcaaaacaagatgatattcatgaagatatgtttttattatacgtaccagggaaagagcgtgactggagcttgctagctagcgaagaacttataatacaacctagtgaaaaaatatattttctttgaagaatagtaaggcgcagagtcagtgcttttatagattaattttagcttaaaaatcattattagatagagaaatatatcatatatggcctaacaccaggtcaactactgatataaaacaccagttggtctttggataaaccatttgaaaatgaatgtaaatatatccatggtggtgcagctacggcttagcattgactttctttttatattaaatatataaatatgtataaactgatactgttgtacaaatataagtagttaaaatgagttaaatttgttagaagtttaagatactttctatctatctcaaaattctcaaaattaattatgagaagaatgatcgatggatctactatatattattatcttttcacacataattatacgagacactctaacatcttgggtttcatgtgaaaaacaaattaggaataagaagagtagtcatggttgttatatatgctattatttttccacttattctcaatagaagacactctaacatgtttctttcaaattattgcaaaaagtatttttctgtgtttgttagttgaagggacaaaattacaaataattcaccacgttttgagccattggaagctcccctattgctggaagatttggagcaatgagtaatgagtactcaatatattgaccttttttattctttttggaagttcctatgtaaaagcacttttttaatagattgtttttaggcattttaagagcacatgtggccccctacaagtacttagcaatttttcatatttcttattttatcaaaatgttgcaatgataacagtgtttaacaggtacataacatttctctcttttattaattattataacattaaatgtttagtttcacattcaatagtatattcatggtatctttacttggacactatacatgaaaatgaaacggcttcacatccattaaaaaaaagaggcttcagataaggttgaagttaattaatgattagagagtttggatatgttattttgtaggcaatattgataacgtgagctattaatgattcgaattgctatataaaaacctgtagaaataatccaacataaagtaacatgaaagtgtcgtggaattacaagccaatgcctagcaaacgtcactacacacaataatagtactatttaattagcaatgtctttatctagcacccacatttaattaactactccgaatacatcagaattaatgcataatattttatgggaataattatgcttcctctctctctctctctgttataacttatattacgtaataaacaccttccttaaataattagagcttttttcttttatatactaaaataataaaaatataagtaaaaattacctaggaaaattttaagagtttacttttttatggtataaataaataaaactaagcggttatggaattttttgtttttttacatttatatgggttttttttataccatatttttgtaaaaaaaagtagaaatctaatatttgtaaaacaacaataagttttgtcggtgaagtcgtcggcactggaaaagtcattggcaccggaaaagtcacaggcaccggaaaagtcgcctgaaatatcacgatcgcctgaaaaatcgtcggaaaaattgccagaaaagtcatcggaaaagtcaacattaccggaaaagtcaacaaaaaagtcacaaaagtaaatgtctgatatataactaaaaatataaccagttatataaataaaagggatattggcggctaaaccccccaaacttttgggtttgtgacagttaaccaccaaaactcaa

SEQ ID NO: 69630 - DNA, 2873 bp, Cannabis sativa
cttgtaactggtcaccaattcctcctccagagttaagaggagaaacttttaatgatttgagcaccaatggaggatttgtttcttttggtatatatcctcatattcatcaaattataatgcctcctttggctaagcaccagagaatattagaacatttggccataatctataatagaaataaagcttccctagtctggtttgcatgtaccatattggtttaacattccttaagcctaaaaaccatgtttctccgatgatgcacagatatatttccccgtcacgtggagagtaaacgactagacaaaactgtttggagcttattgaacttctatgcctatgtaaaatatcatgtaaaggtaacatgtcatgtcatttattggagcttttaagcaccaaagtacactcactcacatcaaacctttagctgacaacatttcacaaacagagcaccagaggttttattcaaagaagaatgagaaatcgattggaaagactggttcaggtactaaacaaatcaaccttattacattaattgaattactgttagacatgagcaaggcaatgacactacaagaagatagtagtgctaatgttaagatactaaactcgcaggtcctgcacaccccgagctcaggagaaatagaaaccaaaactaacaaggttaaaggtacgattgtcacaatactatgtaatgcagtaaggagttaaccaaatatttaattattggcatatctcataagaaaagttttcagaggatttaatttgttaatggttgaactataatactcttgttttttaatttttggtgaaaacagaacgtaggttcatgacaaggctgatcaaattgactaaatctaatatcatcaaacgaaaatgtggagctctcagcaagaagatcaagagaatccgtttccgaattaaaattcatggatttggacgctttcgacgacaatggttgaaattgaaaatgccaagcttttcttcttcaaaaggatataccaaattagaatagtttatattttgcattactaaatgtaaattctagagttgaacttgaaactaggatcctaagaagagcatctacatatgtactttcaagattgcatggcaacaaagattttgcaaatgcatcattccatctattgtaacaagaccttaataatgttcttctaatttaaaagtataaagatactcatcttgttttatcttactttgacactctgccaaacattttttaattttattttattaagataacttgaaatctgcaaacacaaatatcaaaaactcatttcacaatttaatcagaattcagtagtaaatttcattcatctattattgagtctcacaacataggttatccgttccaactaaagaaatctcagataaaacaatgaacaacaaattaactgacaaaatgaaaatgaattgtgtgcaaaaaaatgaatcaaacaaatgttatttcatctttaaacttatgtacaataaaaagacatacatttcactcaatctcaagctcagcactagttcgcatcagcatattctctgaatcaacctgtgaaagcaaaggaccacctccatcaccaaacctcaaattctgattctttgacaacaatccaaacaatccaaaactcaaaagcaagaccaaaatagcatgaccagtgaacaataatctcatcaaagccacagccctgaaaccatcctcttcaagatcacaacccatatcagcattctccttaccaggcaagaccattactttctgacaccctttgaacccaaatgtatcagtatacaaagacaacccagattgcaaaatccaagtccctttgaaaaccaacccagtagatagcaaaaactcagcaaaaaaagcagagggtttaactgataaatagaatgaacaaccggcacaaacaagggtcaatgctcctaataaatcataagccgtgctactaagacccgttaatccttttcccataacaaaatattcagctaaaaaagtcaaaccagcgaagataaaaacgaaagcttcattgatgtataaagggtcaacgttttctctgagtatgatcaaaaggaggagtacccagaagaggaaaaccaccatagattgctggagaaatgcgaatctgtaagttgggtgtcctgatgaaaaagtcaagaagatgaatgtctcggagaaggaggataagggtagagctatgatgaggatgtaaaagtcgagatttttccatctgggttctgagaaaaaccatgttttggatttgtatattgatggggttttgaggtagagtgatgatgagcaaaggagacgacggagaccggtgggtatgaggaagaggaatgctgagaggtgggtcgctagtgatgccattttctgtttagatttcagaaaattctctactttttaaggaattggcctctaacttccattttcaatctctcgatgttaacaaaccacttctcgacactttgttaagattttaatattaaagcaataaattattttcttctgaaaggaagactttttttttattattacaaaataatcaaattttagttattattttaattattattattattatttttttgtatttttagaaagatttaaaaaaattacactgataagtcaatatggaaaaattttcaatttttactttaacttttttatttataaaaataaatcttctataaaaataatatattttttttattattttatagtttatttgtaattatattataattgtatataccgatgttaatttcttattatttttttttacctttttggttaacaaagtatatttttgtaactaaaaaatttatgttgtaaaattgtaaataagacataaaaaaaatatttttaaaaa

SEQ ID NO: 69631 - DNA, 1758 bp, Cannabis sativa
gtgttgcaatagggacgtacctcatttggactgactgattgttccagcaaagaacttgtgttctctaaggcatctttctgaatgtccaaaccataaacacgaccctgctgtgattcaccagcaaccagtttgagcattatcaaggtatcataaccattgccacaagtagcatcaatgacagtatctccttctcgaacaattcgttcccatactctattcaataggcacaccatagtgattcaatgttgaacaatgcactcaaagcaaactaacagcataaaatgtgtctacaaaatcagatataccctttccatgttcatggaagctaaagttccaaataagtgaaagtgaaagtgaaagataacaattcttgacattaaaaattttcttgtagccaagacacatttcttttctagctgaatttacacacatataaaatgaaatgaaaaaacatacttgtgagctacttcagtagctttcttcttccccaaaatgtagctagccaaagcatcttctactcctgatcaaagcattctcgtataagattattccaaataccagaaaattaaacaaaacattcctagttacagtgatatatttgcaaatatatcattttacaccaaaagaaaaagaagaatttgtctttttttaataagaaaggaactcaagctaagaatctaataaccacaaccgcccttctgtcctgcttaagtgaaaatgcaattataaatatatataaatacatatctgaataaattcggtgacaaaaaaaatgtaccagaaaggggagaggcatcagaaacggatgccgaggctaaagaaggattggtctgagaggcgtacaaggcgaaagattgcgaaacatttctacgaacaggtaaaatgcaagaagtaaggtttgtggggatagcgtatgaaacatttgttgaagagatagaaaggggtttataagggaagcttgttaagaggggtttatgtgctgctgatataaatttgagggtcagcgccattttcactcgatccaagcctccgcccatcattttcgtggcctctccagtctccactgataacttaaaacgttaactgctttgcttcaattatcatttatattaattatttttgttttaaaatctcctctatcctttttaattcttgagtgagaaaaagaagtagtgtatgtttcacatcatacttaaaaaattattttttatttttaaaagtaaaaattattttttaagaacaaataagtttgtttggttttgtttttttaaaacaattttcagaaaacaaattacaaaaacaaaaaattttaaaacaacaaattgttgtttttggtaataaaaagcaatttactggtcaatattatttttaaaaaattttaaaagctattttttgttcgcatttctaaaatattttttgaaacaaaaaataaaaaacaataccaaacatgctttagtgtttctattaattaattatttattttgtatggagtgtgttaaaaaacaaaatctttctaattccaaatttctggggtaaaatattggattttttttttcagttttaaccaaaaaaaaagtaacaatattacaaaaatactttgagctagtcaactaaacaaataaacaacccaaataaaaaaaaaacacaaatactacttatacacacgttcaactcagaatctatacttcctaggcaactatcgcgcaaatacgtaacaatctaacgcaaccgaaacaaaaattcaaccagaaaaagaac

SEQ ID NO: 69632 - DNA, 3406 bp, Cannabis sativa
gagacaataagtatttgctcaaaaaatagattaagtatttgtgctgcaaaaaaaaaaaaaaaccaacaaaacaaaactcttgaaatgtgttgacttcttattattaaattacaaactagctcccgctattttggcatgttgtggccataagtataacttacaacaacacagactcatgtatcacaacggaaacgcctttctgacacgtgtatcacaatgcgaagcttcaaaagaaaacaattatgtggatttttttgaattgtgttactatttcttacaattaaataaatgaataattcttgctattttggcatgtgcaggccacaagtattactacaacacaaagactcgtgtatcacaatggcaacgccctcagattcatgtatcacaatgggaaccccccagtgcatcccaacaagttgcaaatcagcaccttcccaacattgcttctgaacgtatatccaatgtgaatgggaattctgggtatctagaacagaaggatcaattatctgaaccagagaggtgcatgggatgtggcgggtggggagttgggcttgtgcagatgtggggatactgcaatcactgcacaaggtaaattccaggttccctgaatttagttaaaatgaaatggtcagggcttctcatattatttaaatctaaagattaatactgcattccaaaatggttattgtagctacattagagttttgttcatgggatgatgatttgaattatttagtgcatgtgttgtcgccgctgtttttgtgttttggtttttgtttttttctttttcaaattctctttccagattattcctcaataacattttaagccattttgactcaaatgctctcttgggatctacattcagactggattctactgtgttttaggctgactcgagtgaaaggaaaaaagacaacttttatggagaaaggtctttaaaattaatacaagtactgtaatagttctcatgtgagggtatagtttttgaagaataataataagaagtcttgtttgccagccataacatggttaatgttaaagggcctctcttttttgcattgcggaaaggtgcaattgaaagtacaagaggggtaaaatataaattgttgataaaaggaaagcaagttgtaccagggccagcatgaatttttgctttttcattattattcattatgatcacgtttcccaatttctaatgatttataatactgttagctgattgcttctgtcgaagtacgttggtgctaacaggaaacatactattgcagagtatttaatcttccgcaaagccagtttttgacaccccatgcaaataatcattatcaagtttgcaaaccagcagaactgaaaggaggttctgaaaaaaaggcctctattcagaggtactgtcatttagtgtgtgtttttaataaattttatatgtcttctccctgttaaaccaagatatatctgatttcagcggttgaaatgtttgaaaactgaacatgatttggctattttttgaaaaaacaacaaaaacaaacaaccaaagaaacaaaacaaaaggacaaatcccttctcccatgtaatacttgttttaattgatggcgaaaagatgacaactggacatgaaggggtcagaatgtcatggactgcaatacaaataaaatgatgtaaaatactaaacttcatcagaatataagcaaacaacaggcacataaaagtttactaattcacactcagttgtttgagggctttggttttggtaagataaaaatttcacctatgggtgtctcccgggttatgaggttgaggggcctaactgaactagagcctggctggggtggaagcagtaattcaaatagtgattgaatttcttcttggcgtgaataaccaagtataattgttaatcttctgtggaaggttgttacatgggataatatatatatttatatatatatttattcaaaattttctgaaactaaaggaagctgttaccttgccagtgtatgtagatttttgaaccatttcttgagagaatttgttgatttaactctggctttttaggtccaattggaagcctccgatgggaaaaggaaataaaagagagagtaagaaacgagcttactcagaggatgatgagctggatccaatggacccaagctcgtattctgatgccccaagagggggctggtaagtttcaatttcaagtattctgtattctttctctattcctgacgatgtgcctgaatagttgctgttatttgcagggttgttggccttaaaggggtgcagccacgagctgccgataccactgccacggtatggtcactgccctggtttttaagtttttcttttatcttagaaaataaatgaataagggtaaatggtcttaatcattaaaaagtagtatcctttatatctttctcaaaaatttgctgctcacttttttcatgaaagatattataattcatgttgcagagctttctttgcttctttatcgccttatttgtatcctggctatacttatattcttaatacatctctatcctttgttttaccgaaattattgtatttagccagagaaattattcttgcaaactggtctagatttcataggaatttcatggttatttccttatcatatgatccaggatgacactaattgaatgataaaactaatggcctcgtggggttatcttccttttaggctatagtaatatttaaactgctttgtacctgctgtttgtttttagctgttgcaactgccaatgcaaactctttaccatttacccaatccacatgaacattatgaattcagttctttatcctgaggttttcgagctgcaagtaaagattttctatatttatgtgaaatttcagggacccctattccaacagcgtccttacccatcgccgggagctgttttgcggaagaatgctgaagttgcttcacaaaccaagaaatcaggttcaccctttacacctatatccaaaagaggagatggtagtgatggacttggtgatgctgattaagaagccatttcaataaataatatgcaaagttggaaggcaaatgtgccatttgtttctaattgaggaaagaaatgtaatcacaaacttccagtattatatgaatatcatttacttgaaatccatttttccagtacttgttagtgttagcctcgtatttggttagatttcacggccttcttttattaaattcaacatgtttgtgaaagctaaaagcaatgatcacagcacacatagtgttcggcttcggcctctttagagaccgaagcttaggctttaaattcagcttgtttctgtatagctatgattggtatgagagagattagattgtgggataacatcactgtcctgtttgacacttaatacattgggaaattgctttatctaa

SEQ ID NO: 69633 - DNA, 5852 bp, Cannabis sativa
gctattcccatacggcagaaatgcgtgaaaataggaaaacacaaagtatgtatttataatgagagagagggtaaccctagaaagaatgggccgaaaataaggcccagtgggctaatataatgtcctattacctttatcgatatagctgttattcgaccactagtagaagctatataaagtgtatcattgacctgcaagacaattagataatatacacaacacttcttaaattgaagacagctcaataaactgcaaatgattggtatatttattttatttaaaacacttattttcttcctcctttcattttccttccatgacagcactataaaaatttaaaagaatcaaacaagcaccctacaacttgcttaagctcttgtgaaatatttaaacaataaatcttcatatttggtagactctgaagctaaaaagagagctactcaacttagaaaacaaaaattcaacaacatagattcaagttatacaaagacgtgtcctttatttttagtttaaaatggcagtaagtgatcatactcaataaattaattaatcatattatagaagataaaacaaaatattcaactcactttgcctaattgtgctccctgcttagagcaaaatttgacaagctaattagacgaggcaatgactgttaaatttaccttatcaatcacaggtgatccaaatatactcccaccacatgaaaccttatagatacaacgataattaatgtagtcgagagcatataaattatggtcatgtgatccacacctacacagttttagcacatattaattttatctttaattagggggagaaaaaacaaacgaagaaatttctccattaggtcctgtaaccacaactcatgcagcaataatgattagttatatagaagcagaggaacaaatattaccagaccaattgcgttcgaatgtcgacaactggttgtgacttaaccttcagaaaatggattgattatgggttagaccaattaaaggaatccataaccagaaagacataacatagaacatatgaaactataatatacttgagcatatgaaaaaccatacctcgccagtagtttggaatgtccaacaaatattgccatctgaaaaatcaagaaaatatattttccctttgtagcatccgactacaacctaaaagagtcagaccatgagaaactgataaagcagtcccataagttcaaacagagcattaaagctcatttgctgaataacttttcaatttaaagtataacctgagaaaagtggccaagaatagttgctgaacattcaacgcgtccttccagctggattttccactggatataaccactaaaccaatttacatgattgcacaattctacttctcaagctgcacatcattatatatatggacacacacacatatatatatatatatatatttcttgaaatagcttagtgctgataaaactatactgctagagaaagactcaatctatttttcaattaatcacttaatagttgatgccaaactcctgtttttcatttatttgttgtcttatgtgacactttttttctcaacttatgcagttatgcatctatttcccatctaaaacacatcagaaatcaaacatggccgatcccaatacaaagaatgtaagagtccaaccacaatatgaaatgcagtgaagaagaagagagttttagaatttagaacgataaaacacaccttaacaaatctctactgtgaaaagaattacaaaattcccctacatggaaaagctcgtgaagaagatggcaataaacatttaaccaattttgtatagaagtaacataaaaaagtacggcccttaccttctaacattaacacatgtaaattcatgcgagtgagatccgataaacaagtaggtgtcagggcttttaaacactataagtggggatgcatcaacacaggagcccagataaactttccataatttttgcatgagaaattttgtgtcacttgggactttcatgcaggtttcttgatgaatgtcatccatcttattgtcatattcattcagcttgttataacattcgtataaaacattgttgcaccggctgaatgaacacgaaaagcatattgaagcagtattccatggagaccaattaagtgaagtgatgccttccaaagtaacatttacatttgaatctagcttcaagcgtttagaggtaagagcatgaatttcatcctttccaccatgaagggttcccaataatttattccctgagttattgtttgcaggattaggagtcctaaagtgaacagcattaaacggtttcctttttccctgtttcagatttatttcccaattagcatcttttctcaaatctagttctgattttttcctctcaagaagagtagtacaaagtttagatgggcttggaaagtagtaaagcaatctcatatcaactccaaggttattagaaagatgtgcagcagcaatagagtttccacccatcataaagaaatcgtcgtcatcagaaacctctgcaaccattaatacatcacaaaaggcctgcacaaaaccacataggacttcattaagaattttcaaaagtaaaatgttcacatttttcagctattaaattgagaagcatgagctagaaaaataattgctactaaacaggtttcaataagctattcaatcttttttctaccagtttgcattcccaacgcaaaacaatttgacatttgaaatttagtcaagcaatagatctcgaattaaaaacaagaccaaggatcacctaaactggtgttagaattaacaccaaaatatttgatatttacaggaggaaatgcttagaaactagtttacaccgcatagaatttaaagaagactgcttgataattttcaacattttgaagacatgaaatttttgctattatttcaactttttattttattttactggtttaggagaagaggaaacaatataagaaaacactagaatttgaacctagataacacacacatatacaaccacctaattaaccccaaggccacaattgcacagcaatataaatattaaattataccactatggataaagacattgtattagagccttctaaatatgattgactcccttcttttgaaaagttccttcatttagtagaaaaaaaaggtgagaaaaggtcaaggcttatatctactacttagaattgcgtatgtgtcattaaagttactatgtgcgaaacgaataacgggacaataataccatcagctttattacaacaagaatagtaaagaaagtcagcaatgaaaattaatattttggagggagaaaggcaaacctttttaataactgtcattaggtcaatattttcaacaacatcaatctcatccttgacatgatttgcaataaattcagaagtcaatgaatcataatcaacttttccactagaagtaatcggaaatgcttcagtgaaaatgaagtaatttgggaccatcgctgctgaaactttgtcaaccatccaacttttgatatgagatcttaatattccattgcttttgtagtcttctaaaattacatatgctatcagtgacaaaatctctccttgaattttattggtgattactgcacaatcaactatgtttggatgtccccttaatgtatcttcaacctcctgtaaagcaatacgctgtccattcaatttaacaatccgatcttttctacccagaaacactaagtcgccaccttcgagtctttcagcaaagtcacctgtcctataatacaaactatgtttatttgctgaaatgcagttgacatggtcgtgggacaactttacttggtccagatacgtaaacatagaatcagaatagtatccgatcgaattacaactaccagaaacatatatctctccatgattgggcatgccatcatcactaacaagaactacttcacaattagcaataggtataccaattggaacacttgttagtgtctcagactccaaaatcataggcagcctcttgcaatcaaaataagtacaatcaccagataccttgatttcagtaattcacatgttagtcaccaaccacgaacacaaaaaaagaaacacagctattaatataaataatatcatattgaaacatgactaactaaatcagaacactaaatggcatcaggaacaactaactttatccactaatccaagttttttcttaaatataggggatttatacaaaagacttatcaccaagtgaatctatagttttcatagacctttataaatcaatttcccacaaaataaccacgagtattttgaattatacaaggagaaacagggtgaaaggaataagaaaaaacagcaacaattatcttgtcaattttgcgaaaccaaacaacaaaacttcacaccatcaattggattattataaccaaaaaggttcaacttctaacctctgtacttccgtaaagattcaaaatagtagtccctggtaataacttcgacaatacttcccacaatgataaaggcagaacttcaccacttagcacaaacaacttcaatgaactcagaacatggctatcgtgctgactttccaaagcaggaaggattgttctaattaatgatggaacagcagtaagtctagtgatagaataagcctacaagagcagagcaactattttttatgagattaaaaagtagacaaaaaacaaaaaccataacagtgaagcatatttccaggctcaaaacagcaataatactaacaaaattataaaactatcaattcaatcgtaagttcagcactaaaaagattaaatcttttatatctatatctatataaatatatatataaaagaattaaaacctactgaaaacaaaaacacacacacggattataacatgcttgcattatttactaacaagcatacctgtataaaatcaataatagaaaacaaattttctctgagctgattgaaaggaggaatgaccaacgtacaagcagtgaggagagcactaaggaactcttgcaagtgatcaacaaagctaattgacgtcttgaacaacaaagtttcatctccattcaagggatacaattcttgcatccataagaaccggttaagaagccctgcagaaattgtgtagttccaaaatttgttattgaatggattaatgtgtttgaatattgatagaccaggccagtttatatgcatcatcaagtataacccaatttcacattagaaatttcacaaagtgaagaagtttaactaactcatcaagttttccaaaaacaaaaaacaaaatttgctttggtaaaagtgttaccttgctcagttccacaaacacctttgggcttccctgtcgagcccgaagtgtacatcacgtaacagaactgtctcagttttccactctcacaaggccaagccaagccttgaggctctccaccttcttcttcttcctcttctaaagaaaaccgcagcacaggacaggtggcggactcctccagccaactcgactcggactcgaaaccaaaaggagacttactcgcaataacaaaatcgacactcgaagaagccatggaggagagaaccctagccttgggccatgaggggtcaagagggagaaaagcttcgccgcacctcagcacggccagtaccgacgccacgtactccgctgagggcggtgcgtatatcccaaatattctgggtagtgacgaagaggtgaaggcgaggggtaagcggagacgggaggcgagggagttgacggaggcgagtaggtgggagtaggcgagtaggtgggctggaatcgatggtttggggttgggggttgtgggtttctggcagtgagaagaagaaaagacgaagaagaaagagaaagaa

SEQ ID NO: 69634 - DNA, 6979 bp, Cannabis sativa
  modified_base (1139)..(1146): a, c, t, g, unknown or other
taaatgttgactttaccttatgaaagtatttttgtaaataaaatgtcaatttatattttctatgtaataattctttttttttttcatttcaaatacattaatgcatttttaagaaaaaaaaaacaaaaatagaaaagttgacatgtaaatgaagtgttcctattataaaagttttgtatagtgttcctattataaaagttttgtatatatatagtcaaaggttccaatcaaataatattctaaagttaaactaataaaaaagttggtcgaacattgttccatacaagcccctttggaatatataaagttaggaacattttgtacttcacatgtcttcctactttataaattattttttttttctggaaattcatttctcattattaatagctagaagagattgggatgcaaagtaggggctctgtcccacacaacaactcaaataagtcattcttgcaatctaacattaatagctaagttgtttacaaaaggtaacttgtctctactaacaaacttgactacacaataatcgaacttcttaactagctctacatgcccaatcaaaatttaaatattgtgtaaatttgtcacaaaaaaactaataaatactatatttattacaatatttattattgtatttcaatacataataacattgagaattgctaaaaagcattattggtgcctagcaccttctttagtgtcatattgctattggcgtaattaaatagcgggctccatataacttaagaaaatatgttttagagaatatcgctaaccaatcatatagtgacatctatggaaggtgctaggcaccactagtgcccaataacaatgctcaataacattttatgatgcaaattatatataacaaaaagtaaaataacattactgattattaataaattaaacatttaaaaaataactaaaaataatattataattaaaaaagagaatatcacccacaatacagtgccttatactcttacttagttacaaccttttagttaaaacataaattttttgtgactaattgtgacttacaacaaaaagtttctcatgataaaaatatagtatttagataaaaattattgttaatttagttttagtcacaataagtattgtgactaaaaatacannnnnnnncaataaattgtgatttttgtgatacttttagtcacaaatattttagtcataatataagaataatgatttataattagtcacaactttttttacattaatcattagttttgtttcgactaaaaataaattcttttcagtgatttttttcattcacttttacgttctttattttgttttcatttttatatattcattttttggtttaaacataaaattcccttcatttttaagtttttcttacaacttttttcttttctttcccaaattgttttaatttttcttcttttccttcgatgatttttatctcctttgacgtgaatgtgagattatcatcaaattgcttgtactcttttcggttctctaggctcatgtcatttctgattctccctctttgatttacgtacattgaaactttatttgcatttcaatctctactgacatgaagatgcagatgaagactattctgaaattattctcacttgtgtggattacaagctttagtcatggtttcccacttgttcttcagtatttagtatttatatttaagtagttcaaattttagtttgagtatttatgaataactacatttacttgcaagccatttgccatgaatatgtgtttatgcaattttatgcaatagttagtttgattgaatgactgatgagtttatacagatatatctataacattgaaaattttatttgagtttattcatttgtattttttttttggtcttatttttaaatatccatctactctaatattaatgtggaaacatctctaaaagttattttcttctctagagactattaacaattaaagacaaataaagtatagtcatgtttgataatcaatggcttaattatattatagattgttaggagtgtttattaagttagttagttggtagagttagttagtactgtttcgttagttattatttttttttaactaattcgattgtatccaattaactccagctgtaatctttggctatatatagtcaatgttcatcactgaataatagattgctctttgattcaatatcctttttttactgtctttccttttctttttatctttcgcttcgtctctgtttctctctgtttcttgttcttccttcctttttgttattcatcaatggcgcaaagattcaacatggtatcagagttctttcttccattatcatctaacaaagcgaacattggagctagcaccaatgctactcagaacaactcgaacaccagcagaccaatcaaccagcctaatggagcttcgaatctctgtcaaccaagaaataactcagatgagttcaatccagtgtacttcaatcacaatacgtcaattagactaaatgatcacaattttctcttgtggaaacaattggtccttgctccaatttgaggaaataggttgcaaaatgttcatccaagatcgaacccgtccacctcagttcttgaatgatgctgatcatgcttcgaacaatttgaacccaacttttcttgaatgagaggttcaagatcagcttttagtttcctggttgttttcttcaatgacagatagccttctcacatgcatggaaggatgcaatacagcgagacaaatttggagtgctctcgaaaagcactttacactgtaggtttcctctaaaatcttggagtttcaaaccaaattgcagaaacttcaaaaaggttccatgtcattgaatgactatttgttgaaagtcaagcaacatgtagatctccttgccttagttggaggggttttgagttccaaggatcatattgtagctatctttaagggtatacccactgaatatgacacattcatcatttcaaccaatacttggattgaagagtattctatttctgagattgaagctattctgttagcttcagaatcttgaataaaaaagactgatctagaataagaagctaatttgagtgtgaatcttgctactactgatgtagatcaatactctaaagtcaacattgcctaacaaaactaccccaattgcatcagtagattctccaatcaaagtcaaatcaatccttcttcatcaagaccaagagaacaagagaaggcacccatcctagaataaaacctaaatgtagaaccagtagagattgtggctatcatgaaaggaatggggaacaaaatcaagtagcccgaaaagaccaagaagccaatagatcaaagagataaaacaaaatggtgtgaattccacgatgatcattgtcacacaacggcgaaatgcatagctttgcatttcaaagttgctggggtctttcaacggggacatcttaaagaattcttaactgacaaggggaagagtgtcatagctaaaggggacactaggcatgttacaccacctaaacctccacaacacactagaacttgcagtgtaacatcttgagggtttgaagttagcaggggattcaaccgttaaaaggcatgcaagagaagttataggaatggacggaaggccacagaggccagcaatgagttacaccagacaaaccataagcttcgtagacgataaagcctcagatttgctcaatccccatcatgatgctttagtcatttctttgcttatattaaattgtttaactaaatgtatattgatagaaaatggaagttctactaacatattgtttttacatgctgtcatgtggatggggattgacgaatctgccatcatccgtaaatcaacaatgcttgtggggttcagtggtgaacagaagcattctattggtgaggtaacattacacatatatgcagaaaaagtcaacctccagaccagattcttggtaaacgactcagccttaggccacaatgccatcctaggccatccttggatccatgctatgaaagtcgtaccatcaacataccatcaggttatttgttttccaactaagtggggaatgaaggagatttggggagcccaaaagatggcgttagattgttatcaaacaacattggaagacaaacaagcctcagcatggcagctacagcaccccacatcgtcaagtgtacctagagagcctgaaatggaagatctcaacgatgtgtgcatcaacaaagactttccagaacatattgtccagataggatcaaagctaacacctgagtcttgtgttcggctcattaagttcctaaagaagtaccaccacatctttgtgtggtctcatgaggacatgacaggtattgatcctaatattattgttcataagttgcaggtagaccctaatcatcctccattcaaacaaaaacaggagaaaatttgctccggaacacgaccgggttattaacgatgaaagctaaaagttgatagacataggatctatgagagaagtagactaccccgactggttggctaacgttgttgtggtaaaaaaaaatggtaagtggcatgtctatatcgactttactaagctaaacaaggtgtgccccaaggattctttcccattaccacacatagacatgatggtggatgcaatagctagacacgagttacttagtttcatggatgccttctcaggatacaaccagatactcaagcacccaaatgaccaggagaagacaaaattcatcactgaacgaggaaccttctgctacagagtcatgccctttgggctcaagaatgcaggagccatgtaccataggcgagtgaactggatgttcacggatatgtttggtgatacaaatgaagtttacatagatgatatgttagttaaatccttggttgaccaagaccatcttgatcatctgcagcaagcttttgaggtacttcaaaaatataatatgaaattaaatcatgcaaaatgttcttttgatgtgtttcaggaaaattcgtaagctacatggtaagtaagcgtggaatagaagcaaacactaaacaaataagatcaattcaaaatattcaaccaccgaagaacatcaaagacatacaatgcctaaatggaaggatagctacactaatccgattcatatcaaagtcatcagaatgttgtagtatcttcttttaaaaactcaggaaaacaaaacacttcatatggatcgaggaatgtcagaatgcactcgacaagctcaaggcgtatctttcatccccaccactaatggtgaagtctaaaggcagagagatgctttacaattgcctaacagtattagcagcagctgttagcacggttctcgtcagagaagtaaatcgtaagcaacaaccagtctattatgtgtctaaaactcttttggatgcaaaaactaggtacagccaactagagaagctttccttggcactcgttacagaaagaagaaagctcagacaatacttccaatgccaccctatagtggttcaccaagtatccactccgttccatactacataagctagagctatccggaagattatagaagtgggttgtagaactcagtgaatacaacatcacattccaaccaaggactccgatcaaatcataggtattggctaactttattgcagacttctctagtaatacataggtacaagcagagaaggaattactttgtctagaacaacaactaaattcaaaatggaagttgtcagtcgacggattgagtaattgtaaatgatgtggactcgggatagtactcacaaccccaactggagacatgattcaatgatccatcaaatgcaacttcaaagctacaaataatgaagcagagtacgaggctttgatagctggacttgacctagcaaaggagctcaatgtaaagaatattaaagtcaccttaaactttcaattgtggtcaactagttcagtggatcataccaagcaaaagactccaagatgacgatgtacttagagatagtcaaagaaagactaaaatacttcactgaattttcaattatccaagttcctagattagaaaataaccatgtagatgcacttgcaaacttgggctcggaaattcaaaccaagaatgggataacagtcccagtagtgtacatacaatgaccagccgtatggaagcaactagaacaatcaatgaatgtggtcaaaaatcaatcttgggtgacaccaatcaaagaatacctgctccatggcaccttacctacatgcaagtatggatcaaggaggttgaggaccaaagcctcgaggttcaccttgtacaatgatcaattatgtaagagatcattctcggggcccctcctcagatgtctaagttcattcaaagcaaagtacatactggcagaattacacgaaggtgaatgtggcaaccactcgggaccaagaagcttatgtaacaaggctcttacaattagatactactaatcgacaatgaggacaaattcgtatgaattcatcaaaagatgcgacaaatgccagaggttcgctcaagtatcacacatgccaccagaaaagctccattcaacactaactacttggcctttcatgaaatggggagtggacatcatcgggaagatgcctatagctccaagacatagagtcttcatgttggcggcaaccgactacttcaccaaatgggttaaagtagaagcctacgcacaagttagggattgagaagtcaaaagctttatttggaagaatgtcatatgcagatttggtgtggcaaaagaaatagtgactgacaatgactcacagttcataagcctagaatttcaaaacttttgtaataaatggggaatagtactctcattctcaacacctagatacccacaatcgaatggaaaagtagaatcaataaacaagacagtggtagcatctttatgttagaaatattttaccaggacctagatttactaacaagaatgtttcattaacatcctaatatg

SEQ ID NO: 69635 - DNA, 3822 bp, Cannabis sativa
tagtaaaaatagtacaattactaaaaaatatgaataattatcaattccacataaacccttgttttctaaccaaaccaaaatggtttggtttgagaatttttttggtctggtttggtttttaatattgaaaaaaccgactggtttggttcaaaacttatgaaaatccagaccaaaccaatccgtgaacactcctagataaaaccagctggagttgactattcggaactgtctttcagggagaacagccttccaggaagagtatctagctgtccagaactccttttccagagaagggctagctatcctaaagactgaattcggagtggacatgatagtcattcgggaactcccttctagactcaactatcattccacaagactcctttcgggatggacaagttagttgtcctgaaacaacattcgggagacacctaatttttcaagaacattttttggagaacttttcatttaaaaaaacaataccacaaaacagaaatgttgaaatttgcaaatatatatatgagctcaatagctatcttgaagtcgacagggcattgagtctaagattgttatgataaactcaatagaatttcgtagcactttatagtattcgatgcgtgctcaatgacatacttgcaagaggtataattttttatacttaagtgtccatttgaggtgatttgtttattgccaatttcctgatgagaattgcttaaaagtattattggtgcctaatactttcaatcgtagaggcactacttatgaaatatattgttggtgctcaataaaaatgctctttacttattcttaaaaaaattgagaaaatccataaaaatatagagaaaaccacaaaaatatttattttcatttgtaaaatcttcaataaaagatgtgaaatgactaatttgcccatagcatgaatagatagcttatccctttatcttatgtttctccaatcttttgagcttacagaacacaacaatggcgacattggaagcttcgttctctatctgctcatttcactcctcttcttcgtcttcttcatcagccaccaaactcgcttcattccccaaaacattagcctacccattaaagctcaactcacccaaacccaccattgttcttccccacaaagcattcttttctccactcacaagaaaacccagcttccaactatgctgcgcggttcaggaaatcgccgtagaagaaaacccagaaataacccaagtcgagaaccagaagagaaagctgtacgtggtcaatcttccatggtctctttctgtagtagacataaaagaactctttggctcctgtgggactgtttcggacgttgaggttttcaatcctccattctcattttcctgtgagctcatttctatggctttcttataatattttttgtatttggattttttgttgtagattataaagcaagaagatggaaagaacagagggtttgcttttgtgacaatgtcttctggggatgaagctcaggctgctattgaaaagtttaatcttcaggttaattagcttattttggtttgtgattatggctttcatgaatgaatttcttctcagatactagaaattggaagattatttgtgttatattaagttctagtttcatcattctttatcaagaactgaaaaataaatgtaatgtgtgtgttcatatgtgtacttggcagttaattgatatactcaaactttggttttggctcctaaataaacattattactttatgggcatttagttctatgtttaaattgtatagtgtttcagtttgatgacttagttttgtatctagttttacttggatgaattgtttccaagctatagggaatttaggtagtttcaagtttattgaatggtaaatcagtttagaaagattacccaagaggggtagctcaaatggtcaggcatgtggtttgctcccacaaggtttgaggttcgagtccctcgtgggttcctacacagtaattgctatagttttctagtcccaaattattacagggttaagtcgggatactagtttcagaaaaaagaaaatcagtttcgaaagattagctacattttcgaattgagattggctgtttcagctccaagcaatgagatagcaatatagatatggctataatgtttaagaattaagattatttgtagttgtagtttcaatttctgagaaggtagtttcgaagaactaggctgtatggagataatttcttgttgaatcagccattctaagtttcttattattactttatcatatttgttttcagttgatgagtttactatttggtacttgtaaacgaatttgtatgcatttctcaaatggcaacaacacattggtttggtgatgcaggaagtatcaggcagagttatcagggttgaatttgcaaagcgtttcaaaaaaccgtctccccctcgtcctcctggccctcgtcctggggagacacaccataagctttatgtgtctaatctcgaatggaaagcaagatcaacccatcttagagatttattttctgaaaattttaatccagtttcagccagggttgtatttgatgcccctaaaggaagatcttccgggtatggatttgtttctttcgccacaagagaggaagctgaggctgcattatcatctttggatggaaaggtaatagagttgatcagtgttcattttgttaggttcagtaggcaaattagcacactaaagccccgaaaaccaagaaaacatctctcttgtttatatgtacttgattcaaagtctagtgccagaacccttttcagttggataaatcacatacattaatgttagattgtggacaagtatttcaaccttctatacttcctgttgcaggaattgttgggccgaccgcttcgcttaaagtttagcgaaagaaaaggggatcaatctaaaacccaaaaggaagagggggtcaccttagagggcgagactgaaagccagaaggaagaggaaaccaccttagagggtcagaccgaaaaccaaacggaagaggaaatcaccttggagggtcaaaccgaagagtcatagactcaaagctccactcaatacatggttttggctatgttgatgtattgctcagaaagttgtgaagatcagaaattttgaccccgtcgcgcccttatgtaagatagaaggttttcacagttctaaattttgtatttatatttgttttccttctcttagtattatagggagtaatttacagttacactacattcatactaaaatgttcaccattgctgctgaaaaaacatgtttgttcaatgaaaatgtattattaataccttagagttaggcattagttgatgttgatcattccctctttacagtagcccatcaaatgttgggagtgaaattaagtgtgccttcaccaccaagtcccctgaagactccaattcatgtttgaattagttgtgcatgttcttagtgtataaatgtatttatagtgtttacaagtccattattgctattgtttttattttttggtatcaaccattttgtggtcatcttcatacatctaagaactctgtatatgggtatcatactatcatagggattgtcttctataccaaggggctggttggttgggctaatagaagttacttctgggcttacaaagcttcaaaagtgtattggccgctgtttcggttttcggcgaatttcagttcttagctctgattttttttaactagttataaaagctttttaaggaagaggttttctgagaaaagaagataaaagttgaagtagaagtttagccaaacagaccctagtgtaagtgatccttaaactttct

SEQ ID NO: 69636 - DNA, 1218 bp, Cannabis sativa
ctattgtctactcctattattgctactgttttgttgtgttcttgagcggaagatctcgggtcttatcaattggtatcagagcggaagtcttggtgatcgtcggtgactgcaataatggaatcaagagtgattggattgaagtcgatagaggcggaaactgtgagaaacagaatcagtgataaactcgaatctatggtggtcggtcgaggtggtttcaacagaagaatcagggatgctgcggaacatcgatctgagtttcaatcttcgaaaattgaattaccgctgttcgacgcaagagatgaccccgaggaatgggcttacagggctgaattgcacttcagcttacaacatttgacaccagcagaaaaattagacactgcaattcattgtctcgaaggagcagctctgagatggttctgctgggaaaatcggaggtatccttttcaatcgtgggatgacctaaaatctgtattactgcgtcgattccgttcccattccacgcatgaaggttcagtgtacaatcgggcttctgttcttcatcgattgaatactgtgcaagagtatcaccaacaatttcaggttgaagaagataaagcttctgaacaaacaaagctctcgagggataagatgaagttgttgggctcatctacattcgggttagggtcatgtgagcacaacggtaatattcaaagggaagacgaaaaacccacagaagatgcaagtgttattcgattgttagaggcgtccctggagacatttggggtcatggagatcgtcgaacagtcgactatggcatcacagtcagatttggaaattttaccagggggttcgaacacatttccgcgactagtgacactagagaagaactataagaaagaggttcaactggttgcgtcgacggggatcgcgtccctagtgccatcgccggagaagaaggctatgtgggaggtggtgacggacgaggaagagaagacgaagacgttgttattgcgagcggcagaggaagaagaaccgctggtggtgccaaggccgaccacgttgctagcggggacggagccgaaccaacagagggggtcttcaccggagacggagaagagggacgaactgctggtggcggcattggaatggatttcatcgccgttcccaaggccgatcacgtggtgggcagtgacggagccgaatccacaacggaagtcgtcgccggagtcggagaagacg

SEQ ID NO: 69637 - DNA, 8607 bp, Cannabis sativa
ggtatcatataacagaccctatcatcatcctctccttccgttataactttgtaaccacaaaccgcctccaaatccactatctcatgatcagccatgactagaaacgaacaattgaaatacagaaagatacaaaacaagaaataactttcactctataacataacagtagagcaactcaggtcaaaagtccagacaatatcttcctattttattcttaatgttgctttttagtttgttatatttaaaaaaaatatatatttataaatatttgaacagctcgcggcattgttacctagttaaagtatatgaaagtacaatacactctacctatattttaaatgctaaactaacataaattaaacaaataaattaaaaaaaaaataagtaaatttgacaaataaggaaatttcaaagatattaattatttatttattttgataaatttcaatcaaattgatctatttatcaaaaccctatcatttatgacttttttttttaaatacaagatttgtgacagaggatagaagaagagagtacaagttacaagatctaaagaagatttgaaacacaattattccaaattcactctttatctattcctaatgcagcttgggtgaggttatgtgctaatttgttgttgcttattggtgcgaatcggattgtggcaataggaaaagaggacaaagagtcgatgattttccaaatcagatcagacaaggctgaatgatctctcatcttcttaaggatttttgattaacacttagcaatctgagaccacaaagttgatagaaaaatggattccctggcaccagtgtaaagcacagagaagagcctttgctttaggaaagattggagaaaaacttgaaatcgcagaagaatggaaacctgctataactctatcttgagaatcttgaattatggcctcatatctatgtttattaacatgacttcttactatagcatctacactaagcttgttatgcccttgtaagggttgtattaaaactgagctcgacttatctacattattatcttgggaggaactatctgattggagaatctttgctttagctgtcttgtagtcctgaaagtaagatgtaataaaaggttctacatccatgtaaacagactttttatttgcaaagagagacttgttacgatgattccatatagcccataaaatgccaaaaaacacagcaaaattatctttctgaaaagtttcaaatcctcttaaaagaaattcttttatatcatagttcttattattatagaaaaaatttgagaaactagtgtacttccaacatttacctgccctagaacacactaaaagggaatgggaaagtatgggtcatcgagaatctttcttgagaaaagattaactttagaaggaagaaagtggttacaagccctccaaataaaatgtttaattttaagaggaatattcaaagactaaacatatttccaccactacttaaaggcatcaggattagaggaacttggattgggatggattgagtttacaagatggtaaattgaattgacagtgaggcttcctgaaggactatgtccccaaatgaaacagttcttagtattggggttaattggtattttgagaattgagttaacaagatcttcatcaaagtaaaagtccgctaatatttttaatgttttttatttttttttttaaaaaaaagaaattattaaatgatgaaaaaaaattaataaaagttataaaaatgtgaaaattaaaaaaccaaaatatttcaaacaaaactcaattatgatgtcacatcatcttacttagattatatagatagattgggaaaaccatacgtaatagtaaggggtaaaaatgtatttccaatttacttattgttgccaccacttcaataattttcgtttcaacaaagcatcgtgattgtgaaaactattgatttaacatacattgattcccctagtataacaagatggttgaactttacaaagagatacttacacctagttgctttatacaatttattttatattgatttccactgatattttggatttaatttaatagaattcagtttttactctttgggaaaagctttccaaaaccattttggttcttttcagagtgaatgtctggatctaaggataatgatgaatttctctcacttttcttatttgaagaatatgaccatttatttgctgctgcttctgaaaatgcagcatctcttccggacaaacataaattagtagaccgcaaattacgtgcttcattaccactttcgtagctctgtatgttgtccaccacaatagtaggatgaggattctcagagtccagtaggaaatcttctagactagcaagagacttcaaatgctgcccaagtgatgctattgttttctggcactcggcaaacttatccgcagccaaagctagctcgttttcctatcattaacaagaaaaaccaaaccaaaatataagatggaaatttctttaccacccaaaaccaagttatgaaggcagctcaacaagatgtgcaaactgtcatgtgtagaaggatgccaattttagtttagagtaatggatgaccactagcaaagaacagaagcccgtacgtgaaactacaacttaggaagcaatgggtaacagcctaggtacaaaccttagaaaagccaaaactacacagcaaatatgcaagtagttgttctgtacgtctataaaaatgggtagctaatatagcactaacagcaaacattccaaagaagctattgttattaggttcaacaagaataaggcaatcttagaaataacaaaattgtatatgattttatataaaatgttatttttcattttttaggagggcaaaagatcagccatttcggttgcactacttgtatggtatatagcttccacatttacagttaaaaaagaaaaaactttagcttaattatatgtccagattaataaaatgtaagactagttattatttgttaaaaggatttaactttaagattctagtgtgttacctgcttaatttttagattgacgccatcatttttggtacgctggaactcagcctctcgctggtcctcggcttcacgttttagcttaaatagttcatcctccaatttctggcatttggcaattttatcagcagataaaagtcgctcattctgaacctcttcctctaacgaagctgcttttaagagcaaggtgttgacctcattttcaactactctcaatcgagactctgccaattctctcttagcttgtgatgcttttacttcttcctctgcagctttctttgattcagtagcaagaaccatctttatttgcagctcctgcaaatccattgcagtttctactagctgactttgtgatgtctcaagatgctttttgcaagcactcagtgccttctcaagttcctctttttcttccacaatttttcttaaattctcttcaagttttatagtcttttgaaccatcacttcaagatcagctttcaggctttcgccaccatttggttgatctaacataggtcctgcctcaacacatctgcttccactttctatgactggcaatgcagcaagcttttccatttcaagaaaatcatccatgaaattgatatctactgaaggaaccattttgtttctttcatggttcttttcattttcattttgatgttctgtaacaaaagaagatccccgtagacctgactggcttgaatcactttcatttggttcaaaactactcattttatgagagccatattcaagtgttagtagcctctctccacaatctgactggctatcagtgagagattctgcatatactgaggatgcatacttttgatcattagtctgcgacacttttcgagctatggctttgagtctccgacaatcagcttcaagcttagccaccttttttatgctctctaaatattgcttactggctgtttcagcagctttagtgctcaggtctcgctcaataatcctgattttaatttctttggcttgagaaaggatctctaatttaagggtcgagttctccttctcagcagcctcaagcttttgttgaagatcagaatcaaaggatgaatcggtttgctttttaacactttgaagctgaacctgaagctcaactagttgatcctcgaggacagattttaaagattcccattcatgagttttctttgaaaccacttcacggatcttctgttcctgctcttctcttgcttgtcgaagttgtctcacacattccttcaatgccccatcaagatgaccaagccggtcttcaagagctgaatttttctgattagctgtctcaagtttctgttttaaagccaccacttcattttcggcattctcccatccttcaaaattgcaagaaatgtcactagcttataaatatatgaaaagataataattaaagcataaacaaatagaatatatattctaaaaaatactttgatccaggtctgaagttgctttacgtttactgacaaattcttatgaaaaaaaaaactaatttctgatggaaatgaaatactgaaaagtgagaaaactgaatacctgagacagcttcttctgcaactttagcatgctgttttaccaagtcctccttggcactaacgctaagaagtgcagcagataatttgtcactcaacgtcttcacagtttcagtagtatcttcatcgtttaatgcagctttggaagtgacttctggtgattgagtgctatgagatgcataagcctttgacgaaacagtaaaagaagaaaaaaaaagtgtttcaacacagtaaacagcattatcaaaatggaaatacatttcttcatacagggaaacacatgaggcaagctcaaaacatgataataaaagctgaaaaaagaaacctgacatcatttctacagaataaaaccaaccatacattcaaagatttaacacatactttcctccaaaattaacaaaagagtgagtgtctttatcaactcactttcagttctggttcattatttggattgttctatgcatggaagaacacttgtttttaaaattgacgacgtacagacacatctaatataaatgtcaactagttgttgaagcaatgttctgctagaataattcatcgaaccatgaatatggtcaacatcatatagatattacatgttctttggtcaattaccaacttgacttaatagcaaaaatcctaaaggaaatcttaaatttcaattatagattttaactgctagatcataaaaaaaaattgttactgaggttctgaagtccatcaccagcgaaccttgtcaaagtgaacatatttgatagataaaagatattaaaaacaacaagggtagacaaagaaagtgagaaacatgaaacaaaaaactgacaattgaagatacaggatgtgttaaaagatctacttaaagccataaaaacatcagtattgtaggcaagattggaaaattatgacacaaagaaatcaacaagcaaccggaaatatgagtgacatattaactaggtaagaataatattttcaataaacatttgtatttatcatcaaagaaaagttgcatataaaagaatgaaagcactttctttgagttgctaagggatatggaagcacaaaaaccaaactcgaactcaattattgaccttagcttgttgaaatgaattgactcggttatgagaagaaaattttcttcctttacagtgcatagatattcttaaggtataaaaagataataactaagctccatatgacttttctgcctttcaaaaacttccaaaagaaaactagccaatcagaatcaccagtaaggccttcttcaggctcagatttataattttatcaatgataaaagtaaccatttctgaattcttattaagctgaacctttacatctttaactcttgcaacttgtattaccagagaaagtaggcatacatgtaaggggatttcagtttaatcattccacattgtaatgaatctgaattatcgatatacacaaaagtgaacttagcaactatcttcaaggcatatacactagcagacttcattcaatttaggtcatatacatgttagaaaggcatttctttttactgccatttctgggatttcaaccgttactttgaggtcctatttacatagtcataggtatgtctcccagtgggttatagccaaatttcgtatataaactatgtactcttttttaagaaatttcagattttattgataaaaactacacttgttttccgacaaattgataaagcacattgaagatataaaatatacccttctatcgaaatttttatgcgagtcataaatatctattacgtgtaacaatgcttttacgctagtattcttctctttttcctctaaaccagctattgaccacgaattctaaaattagaatgaaaatctgaagaaatttcccctataactagaaatcgctagagctatttatttgcaatatagactttacactatataattgctggtataatattggattacacatacaaaacaattttgtgattgaaaagactaaacaatctgctgagcataattaacacaaattacaccaaatatgttgaattgaagctatgggcatacatacatcatcatttctacaattcaagctatctcatttctcatataagaaaggtaaaagtacagaaaaggcgtaaattcaaaactttgcaacaaagccaataacctaacaaaagtagcaagattatgatttctagcataatctcggtaacaggaagagtattgggtatcaacaaaattgaaaagatgacgataaatggagcaaagtgaatatacctgatcatcggagaatctttcagaatgagaagataaggatcccgtactctcagtctcgcctggactcttctcagaagatttcctccgccacagccaactttttctgtccatcttggcaatggcagccctttcagagggcctccaacgacattatcagagtaccatctgagatttgcataacagcttaaaaaaagtaagtaataataaccaaatcaaatctgttttaagtctaagaaactaatggaatctgttttgtctaatcttaattctgaaagcttggcgtagacttcacatagtgagtccacaaactaaaattcaaccttaacaacccaaaatgaaaatgaaggtttgtaatggttgttggtgatgtcttgaaaaacaatacttgatgacaggcctactacctactagtattttccccaattttacgccatagttagtccatccgataagatagagaaaaatatgggagagaaagaggaccacatgagagagagaatggtgaaattgacataaaatcattttcagaatatcagacccaccactacttcaaagcctgtatatatatgatatgtatgtatatatccacattaaattaccaaagaaaacaagagagaatcaagtacctttttacatctgcatttatgcagttagatcagaaagaaagagagtgagagagagaaagataactaactaattttaataatagtatggtgaattattagagtacaagtgaagaagaagaagaagaagaagaagaagagatttgacaagtgtcagagagaatgaggggagtaggagtttagagattgtcgtttacatgtcataataataataataaagatagataaataataataagaagaaaaagggatataagaggaaaaggtagaggtagctacttctacgagtagtagtagggacctcttcgatttggatgtgtaatgtaataataatatattcagccagaccattcttttttatttatttatccatttttgtgttttttttttaagagatttggttgtcgttttcgttgttttcaaatcgtaattgcgatattcccgcccggagaagtggtttttcggccaccattattcctttcacaataattgctccataccatattagactgactagtacgaatatttgctgtcttctcttacatttattctacacattcacacaatgcataactcagacctaaatcttctgtcccatttctaccctgtctcactgtcccaaaccaatgaaaaaattacaactcaatttaaatgccaccaatatattttaccattttcttctaatattcttttttttttttcaatttaaaaaagtaatagcattgaaaaaaaaaaattagtttctcttaaaaaaaaaatctccaaatttattttataatattaatcaacttacatatttttttcttttcaaaaaaaaaaaaaaatacatacatacatacatcttttcaaaatgagacaaatctttcttttcccggagatataaaaattatactatatttagcacaaaaagtaattttgtggtaaatttacaccaaattttagcatttgtactccaatgcacaatcgcaaaattttaatgtaaaatttaatatctaattaatgttttattaaaaagaataaaatctaataattttataatcaattttattattattttaatatgtaagactaaaaaaataatgtaaatgtttcataatttaatgtgatagttaaatatactaataaaataatagaaatgacataaatgtaaatgaaaaagtagtgtat

SEQ ID NO: 69638 - DNA, 2089 bp, Cannabis sativa
taagttttgtccctaaatgtttttttcttttgaaaaaaattctctggactatacaaattatttcaaatgttcccattagttgcattctattcattgttctaaaaagcttgttgatgtagtactaatgtgatactaatgttgtgaagttgaaggagattttcttcaagaaaaaaaaaatgaactatctcttcctgatatataagaagcacatgaatttcaagcataatgatgaatttatagtaaagagaaacactgctgctgttttcataccctttgcagctcaaaatggattatcattcttcaccaatgaaataggggtgttaacaatttcatcaatgcatttatttaatattactaatttcattttctctgcaaaactttcatttgtaaaatcaaagtacaaacctcaattgttttggcagctttgtttctctgcacaagaagggtagctgctgcaccaacgactgtcgcggcaattgcaacagaagctgctgtttcggggagagcagatgttctgattgatactattttcgcttgttcttgtgatttcgtatcaactgaagaacaaaatcagaattcagtgcattcattcaaggtgagaagctcacaataataatatcaactagataagaactcaccaagcagatgaattagcccatatatgtaaagatatgtatgtatgtaatatgaatatagcaaatttaatcaaatccatctgcagtctactaagacaaggttgattatctgatttactaagattattaccaaatccatctgcagtcttatttgtatcccaacaaaataaaaacagaattaccaacatgaaatgaaatgacaacaaaataatcgaagtttaaaatgaaatatagactaagaacaggtcaggagttcaattactaagcactaccttggttcaatcttgtataagatttgtacagaaataactctcagtgaatgcagtatgattttttccataagaaaattgtggtcaattatcattgaagatatgaaagaacataatgagcatcaagggaccatctgttattggtctcttataaaccttaatttgcaatgaatagattggaatggcttatcaagtgggctcaaaaatgaaatgttcaactacattttgtgagcctcacctaaaaatcctcaaaagatcagtgtatacagtatacccagaaaacttgttaaagagtttcctaccttctatctttacagttttccaagtattggaatcttagtttccactatgtctaggaaccaatcctcattgcttctattcttcatctcccttaaactaatgatattacctcttaacaatgtcactcatctaagtgaattactctcttccctccaactaaaatttactaatcaacaaatgggtttctccatataagaacaccaatctttttttgaccttaaacatgagaacccattacaacataaaccctaatttcctccccataaaggactacaatgagtaggtattctggaataatcactcttatcacaagaacccaccttctaaattctcctccccaaatgctcaaacataaaacaaaacacccaattatagttcaaataattcatatcaacaagtatctcccagattgaatataacaataataataatgaaaagagatgagaaaacttactagtcttaataaaggtagaaaatgaagaagggtagtggagagcgagcttcattattatttacaataatttctttctttctgtgggtctgtctaactaactaaggattattcattagttatctcaactgtcttatcctacaagctatagctatatcaagcctgtggtttgattggttgctgaatttgtggcacgtgtaacaatactccataatctccaccaatccaagtttttcttagaaaaaacgacatattttttaataaacgacaacgataatgtcacaagaaaactacattgttaagaaaaaaaaaattatattaatgaaaactctcaaaaaaatgttaaagatttgggatttatatttggagaaaattgctatttcacatgttgtggtgtccaataccatattataataagtgtttagcactttttt

SEQ ID NO: 69639 - DNA, 1691 bp, Cannabis sativa
ccgaaggatgattgtgaaaagaaaactagatgcctctagttttaattacactgtaggatatgccatttacctatttgggggtgcctatatgtgcaaagaagattttagggaatgagtgtgctattttggctgagaaaatgacagcaagaattcaaatttggagctccaaaaatctgtcatttgcaggtagagttgttctaatcaactctatattgatggccatacatgcatactggtgctaggtaatgattctacccaagaaagttattagggacattgaggctattcgtagaagctacttgtagaaaggacagacaatattttagggtccaagtgttgttacctaagactctatttgccaatccaaaacaataggaggcatagggttcaaaaaagttgcataatggaacaaggctgcaatgggaaaatatgtgagggcagtggcaaacaaagaagacatcttatggttaagatggatcaacagtgtgtatctccaaggtgcagactggtggagttacaaagcaccagttcagggaagttggtattggaggtgcttagtatctctaaaggatcagttcaaggaattaatgaatggacaagtgatgttgtagcaaaattacagtgtatctaataaatacaatctcttctgtccaattcaaaccaaagtacaatggagtaagcaagcttggggaaaactaaacactccaaagcataactttgtggtttagctggctgttcaacaaaagcttaaaactgaagacaggctacaaaggatggggattatagatgaacataattgtctactttgtaactctcagaatgaaacagtagcccatttgttctttgtgtgtccaatgtttgtgtactgtctgcaggagctcaaaacatggctggactggaatgcagcaaccatatctctccctaacctatttagatggattggaagagttaaactcaacgatttcaggaagctagtgctagcagctgcaattgctagcctggactataacctgtggaagattggaaacacttgtttttgagaaaaggacaactaggatcctgtcaagatgattagagagctaaaatctggtgttgttcaaagaatcaaattattctagccaaagaagatcaatgatgaagataaagatcggtttcatgctttgtaacacaacatgaaatagaaaagcacaaggttttaaaagaatattaaattgtacaaaattgcattaaggtatagatgattattttaggccctagttggggtgctattaggatgtatataaatgtttttgagctaatacaatttcttgattcataaaaaacatagtaattttgaataaattattgtttttaataattatatcaattatgaattgaataattaaactagtatttaactatttagtttaatatgatgaaactatatcaattagttaaataaaatattattattaaataatattaaagagagaaacatattattttggtgaaaataatatttattttaattctaatgaaataagaaattaattagaattagtcaatcattatctgttacaaaataaataataaatcttgttcgaactaaatatattataggataatgtatttaaattaaaatatactataaaataataaaggatataaccgaatacagttattcagttatataatatttattttgaatttca

SEQ ID NO: 69640 - DNA, 3055 bp, Cannabis sativa
tttttttttttttttttgggttaagctatatctcattgtcttaaatacgaattaatccacaataactattattcaaaaaaaaaaaaaatccataataatttagccccttttttattttttcagagcgaggtaaggtcaaaagcgtaatttagtgactgcgaacgagggtataaaagccaccgtctcattgagggctttagggttttgtggatttcgtttgcacctttttcttctcttcactccaaactttctcaaaggcaaagcttaagcgaattcatcaatcatgactgctcagacccaggaagagcttctcgccgctcatctcgaacaggaaaagcttgatgtaactaatctctatatctctatatatttatataataagtgtatatatataatcaaaatggcttcttgaactaggtattaaggttatttattaaggtcgataatcattgagaacattggaaatggatttttctattcttgctgtgttctttagaccagatctttgtttttgaaatatcttttatggaaccatgataatgaaatggaagctgtgggattcttgcctttattttctttcgtgtattttgttgtggaaaattcctagtattttatttgaccgttgaatcaggacagtggctgctttagtagctaaaatgaaaacattagtggatatttgaaatcttgttcaagaatagttcttacattgttttgttttggattctttatagaaatgtcaggtggtggtaatgggtccgttcattaatttcattgttcttgcattgttttgttttaagctctatataagtggctgctgtagtgattgcgtctggatcttggaagtcatttacagaaatattttcaaactttgtgcgaatactgtaattgtgtgtttgcgtcaaatgtgtagttttttaatcctttgattttaaagtttcttgactcgtttttttagttaatctcggtaaaatgaccaagttgcatgaaatgcgggactgctttgagtatcgcgtattttataccagcagtattcacgtaatatacatcatgtattgttttctctttgtagacttgtagtccgtgattttgttgctatttcacttaaagttaattcttaaatattatttagtttttttgggggggcgtgtgatatataatgattttgcgtagtaacattttgtcctgaaacattgtattcacagcctgatcagcctaccgttgaggatgatgatgacgatgatgaagatgacgacgatgatgacaaggatgatgatgaacttgaaggtgaattcatacagtttactactctttgcattctattatttttaaatatactttctttctctcattttcaatttgtcattctgacccctatttggacaagagctatgtgtgggcttgtattttattcattttatgttacttaagtaaaactgatataaactgagaaaaattgaatgtgagataagaaatccaatgacaactggaaaattttccctgaaaacaatgaaagatgttacagtgaacctgaagctatcagactggctgacaggctacacaattatgtgtttgtgctcgtgtaatatattatctttttttgagttttttcttaatgggttgagaaatatttgagtttttatagtttgcatttgcattgatttttattttgatcaactaattaaatgacttgccaacatcatttaatctgctctggttcatagttcaaatgttgtatgttctgaattatgtgttaatactttgtgtttaaacaggacaacatgatggagatgcaagtggtaggtcaaagcagagtagaagtgagaagaaaagcagaaaagctatgttgaagcttggaatgaaacccattcctggtgttagccgggtgactgtcaaaaagagcaagaatgtttgtaccttttccttccctggcctattttaagcttaaatgtacttatgctagaatttgtttgattgctaaattaacatgtacaatgccaaccagatcttgttcgttatctcaaaaccggatgtgttcaagagtccaacttcagatacatatgttatctttggagaggctaagattgaggacttgagctcacaactccagacacaggctgcagagcagttcaaggctcccgatctcagccatgtgatctccaaaccagagtcttcagctacagcccaggatgatgaagatgtagatgatagtggagtggagccaaaggatattgagttggtcatgacacaagcgggtgtacccaggtcaaaggctgtgaaagcattgaaggctgcagatggagacattgttactgctatcatggagcttaccaactaagaatagttgaattaattgttgtttctctcataggtgtgtttttttaagtttgagatgttcttttaatgttagtcttttttgcaattctgccctgttgtatgagttgaaaactaatatatgccctatatggataaacagtgctcctttcttctcagttttatcccccatttttcaagttctccccttggaggagttgggactagtttttggttaccatttttgagtttcaacttcttttacttgcacatgttgtagccaacattatttttaaatcaacttttacttttattcaatctatttgctttgataaaaggtattttcagacagttaagacagtttttggggtattttgcaccaaaatatttagagttgcagctctacccatattaagctactacacagaagctgagtgacgataaagacattttttccaatgaaattatttttaaaattgtcccatattgatgatttctttttgatgaattatagcaattataccagtttaaaacgattttttttttatttatttattttaattttagacctagttgtttcttctttctaaattttactatgaagttatcaaagtaataataataataataattaataagaaatggacaaaatttccaaactattacaaatttgagattttttttttcgctgatataaatttgagaatttaaatactaaaattaatatttaaaaacattttaatat

SEQ ID NO: 69641 - DNA, 1677 bp, Cannabis sativa
cgatctagtaatttttaaaaattatttaagttaatattttttttaataatagggtgtatttataattaaggggtgcaaatataactctcctttttcttaatatacttctattctagttacagattttcttttttcgtctgcaaaatcttgagatatttcaatgtgtgttatactaattagataatgaataagttgttgaattgatgaattactttaaaaaatatttttcaaaaaaaaaaaaaatatatatatactttaaaaattaatatattcgaatatttgccctgcttaacctacctatattggtattaagtcaataaattagttattttcaatattttttttaggaaataatatcttttatttatttatcaataataaaaaaaaaaaaaaaatccacgaaaacctatatatatgatcagagtttaattagcttctgcttttctacttctgtgaatatcaataatggcgaataggaagaatgaggggcagcgtttaggcattacagatcccatctctttgactggaccaacttacttcgatctctgcaaaaccaaacaacttcaaaacgtacttactttatttatcatttatatcacctaaattttatctcaattttatgtgaaattaattgatttgtttgtactggatgttgatcagtatttggaaaatgctcaattgtacgagactcctgatgaggctctcgccagggaggaggtgctcgctagactagaccaggtgatttttcttttttgagttttgattaggttataatgtttcaaggtttggatttcggtgaggaaagaaagaaaaaaaagtaaagaaacattgtaatgataatcataattctactctagccttagtgttcttcttgttttgaaatgtaacagattgtgaaagtatgggttaaaagtattagtcgagctaagggtttgaatgagcaactggtgcgtgaagccaatgcaaagattttcactttcggctcttatagattgggggtaagcctttcgattttcacatttgaatattatgactgctctgtttgttttcttgataggttaatgacaggtttctcttaattctagtttagactttagtgtaaaacaaaatgtaatggctcaagttcgataaatttatttctatcaacaatcaagacacaaacaaataaataataaaaacctttaaagaaattcaatccagcatattcaatcttttcaagtggattggtctctccaagtccacaagagtctacagtttgtctaatttcaagctctccttacaaaaagactccttcctttcctctaattatagacaatagctagaactatctaataccaactaagataagatccactatgaacaagacaactcagccccaaatttaacaaaatatacacacacacacacacagagtagaaaagtagcagaaatatcaatgaaacagtagcaagaatgtgggagccctttggccttttttttttgcaaatagagcttaattcaatacattgcataccaaatttactctcttactcacctatatatagtaattcctcactcacactacccgacacgtatacccttcttatttactatattctagctcaccatatctatcctaaggcctaacaaagaataaaataacaaaaagaccacaaaaacacaatgttgtatgtactc

SEQ ID NO: 69642 - DNA, 5167 bp, Cannabis sativa
aactcttcagatattctgggcttcaccaatgactcatatggacaataacatatacccagagccaacaaagtttgatcccaacagatttgaaaatcaagcttcagttccaccttgctcatttgtgggttttggaggaggacctcgaatgtgtccaggaattgaatttgcaaggatagaaacgcttatcacaatccattatctggtcacaaggttcacttggaagctatgtgcagacagcactttcagcagagatcccatgccagtaccagctcaagggttaccacttcaaatcaatcaaaagaaaccactgtaacatgtatcattctagttgatcttttgctactaacatggtatatatactttgttttcaagaatcaaaagagctcaatttcataatgaccaaaaacaaggacatttcagttccaaattccaaaagaacattttaattcattaactaatcatgtctgtacaatatttctaaagctgtctaccataacttgtacaagaattacaattctaatgtttgtactatcttaagttatatttacaagggagataagtaaaagcttgcacttgcatcttctaacttgcgtggcacagaatccatggagaatttacataacataactagtaagatatcggtataacatcttaagggtgtaacaatgtgaagccgtaaaacttcttctagcagttctgggatctagagtatttggggggaagggaagggcacctttcattcatgtgtgggtatggttccagtgtattatagccaggtaattccatccgatactttccccgaatctgacaaaatggaagttttaccgtgtccccatcgttgcaccactttggcaagcggttaggatcatcctcaaagaacttaagaatgtaagcatcttttatctgcacaatcagcaatacattactaaaaacagaaactctgaaaaacccttcaagaaagaaagttctacataacccaaaatatcacatctacaatgcacatccataaattctttatttctctgtaattttgttctctcctaaaaggttaattatttactatagaagactgttcatgagttctgcttatcatctatcatatttgagaaaactaaaatatttatatacagcagattttaaagaaatttctccttttacgttctgctaagttatggtgatgaatagtaagtttacattaaactatccaggatggacttactgtaaactcagtgacttctatagagctagaaattggatcaaaaagcccagcctccttatacatttcaagaatgaaagcaacacaagatgttgacttcccatcactatacaaccaatcatcttgctctggaattgtcaacaactcatcaaaagaggatccacgcttttcagtttctacaagaatgttaggaagatcaaggccctgcacgcaatagaaatttgatatcatgtctccactccaatacaaacaaattacaaattccaccaacgatatggggaaataatagaatattatcattcatatttatctagttttgtctctcaacttgagcaggaaatgtgaaatcttaaaacaaacataatgttcataatgcgcttatgttccctggtacccaggaatcccaaaaataatttattattttcatttataatatttgagcataataaatatgttgtacagaaaaacaatgaaatggttagcctaggaatccacaattggttcttctacaaattaaaactcataagagtaaagggaatggagactgttacaggacctgagttccaaggcgcttgttcaaggcttcattccacaagttagcagcatatgcaggctgcatttggttccaaactgtcataacagatgcaacctacagaacaacagattcgacaattaaaacttactaatcaagaattctataacattgaatcacgaacttgaagttgaaacaaacacgagagaacgagtgaagaacaatttaatgattgctggaacgacgttggtgtttatatgtttgggcgagacggtaacaaagtaaaaaaattaagtcaataccctttctaagcatgatactttgaatcattatgtaaattacaatgtagatagaaaagaattgtgcaaaaattaaacgcaaatttgaaatgtttcggtgtaagaaaaccaatttggatattgcaacatatgatgattggtacaaaatgttcgaattcaaaataaaatatgtgaagtttttattaaattgcaccaatcaccatacacacatcatgtggtgttgagcagggaccatagcaatattaaaccaatattaaggtagaaatgaattgataaggctaaaacacaacacatttggaatcatgttaaattcaaaatccagtattaactcttaaagggtagatgatttaccaaatgggcatccaagggaggtggataatttccctctatagtatctatccagctaaatatcatattatgatatccatatggttttccatccatgctccttgcatactcccaagcagctgtctcgttaaactttgcacgaatatcaggatgcaagggaagcagtgcaatctgaggattggagtcatccttgttcagctcaaaatcccaccactcatcccatggtaacacagcaattatatcttctccctacaaaaggaattccaaaagtcatatttgcagtaagcacaaaccaatcttcaattaacataaagtttatccccaaccccccacactccttccctccactcctcaaattaattattgaacgcctttttgtttgttccaaaaaaaaaaacataaatgtgaaactttttatgtttatatattagacaaaagttatattaataagagattattggaaatccataaaatactaagttcttgtgtacttcatctattttagctactattatatgtctacggtctacctcttcgttttcatgtcccgattcaccaacccagagcttcccttcagaatctctcaagcaaacagctgtatgaccagcataagatcccgtaacccacttctctaaagactcaaaaccaccccatcgtccacggatctttgatattgcgaggaaatctcccgagtgaatatcatcaacagtgatgtttgtcacccatggctgaggacgttgttcgaaagtagcccccatgtgcttcttcagaaatgcaagattggagttctcaccccatccagtatttgtaaatagaggaaatacttcccaaagcgcttggagggttccaagcatccctgcttgcatgagaaaaattgaaactccctttcgtttaacctgatgtacagggcaagggtcataatgcaaccaatatacttctagaaacatgaacatttagtaagttcagaattagcaatactagaaacttacatattcaaactcagctttccctccccatgcttcaaactcaagtgtatgttctcgagctaggaagtagtaatcccaagttacacgatatggagttgcaaagacatatatatccatgcatgtccaactatgagctttgctcatctgcacaagaaaaatggttaaatgaaagactactccctttgataaaatataacaaagtaaatattgaagttatggaaatcaaaagcttgaaaatgatacaaaatgttcattctttattcaataaataaatacagtggattatgctaatgagttaagattttaagtattacaattagttggataacttgttaagtattcccaattaatgacttctttgaatcagactagggaaaaagtcacgaccatagacgtcgtacaataaaactgctttaacaaaattcacaacagaattaaactgaaaagaagacaaaacactaaaaactggtgtgtattcaaatatgacaaaccttgaaagaccccatcaatacaaataacaaaaacgaccaaaaaatattgagttcagggaaaaagaaagttccaaaaatactccatgttagaaaggggaaaataaaatataaaggactggaatagttataactaacaaattcaaataaaagtagctattttttctcgcacaaccaaatatcaatcccaccaataaaaaattgattgagcaataaagttcttcaattaaaagcaaataataaatgatcactactccatacttgaataaaaagttcaagagcagcccaaatctgaaattgacattcaaaccttgatatgaagcgttccgcccccaaactcagagccactcttgttatgaaactctacccaagcgctattctcgtaaaagcaggctcctttccagttgagggtgtggttggaggataaggcggagactgaggctgcgccaacgaaagtgggcaaaaggtcgacggcgctgtggagagagttgagaataggccatgagagctgtctgggcaagagaggaagcacatctctgggatgaaacggaggattgacagcgccggcgagcgaggaggaggatgggaagaaagtggtgaggaggaggagggggatgagaatggattcgaagagtaaagaggaagatgaggccattataggttttgttggtttgttcgtacaccaaaccaaatggataggacttctttgtctctccaaaatccaaatccccatttccaatttcatctacttatgcgaatatacttaatttattttttattttttcctcaaattttttagttttattacttaatttttatttttattttttgccctaaaagttttattatttaattgttcatccggatttagtataatattttattttatttagtttttgacaaaagttttagtttcatatttgtattgtttaatattttagtttaacactcaaagttttagtttaatgttttatttgtattgttgggtgcaagcaaatttttccttttaaattttgtctccatttgcctaagaatatcatttgcattggcattggcattggcattggcattggcttttagtataatgtaagaatatactttttttcctttcattttgtctaacacgtgcacacttgcacaaaacatatattcttatgacaaaattatggtagaacttagcataaattacttactagtagggaaatttttttgaccattaattttagattatgtagttattaagatgtaaggtatatatttttatgataaaattgtatgtatacaattaaaattttata

SEQ ID NO: 69643 - DNA, 4004 bp, Cannabis sativa
  modified_base (3928)..(3931): a, c, t, g, unknown or other
cattgacagaacaagtttggagcagcccttttgaagatctcccatggtcattgcagtatgaagaagtcattttgatcttgtgaatgagaacctcggtccgtcttgtctgtcaacggtaaaaatattttggtcggaactagtagcggtcgtacgagggactagattggtcactggaactagcaaagattagtcaccggagagagaagaaaatgagagaggcagccgactaaagagaaagaagttagaaaaaattagggcttaatacacaaacttagaatatggaatttgaaaattaaatttacaaaaaagtggcaaataaaataccataaaaaaacattaactttgaacaaatgccatataagggtgataaagtttaaaataccatatttatgaaacttttttataaaatcccatatttggtgtaattttcatttttataaacacccctcgttaagactaagacaaagaaaggaaactagtgatcatgtgtttattgtgttcgaagagctttattgtacgtgttaaagagtcgttctttttcttgtatctcagtagtgtacacaactcagttggagcttgtaatctcattgatcatagtggagaaacttcttgtgggaaaagttagattaggccttgatttcaagggtgaaccgagataaattttgtgttctcttgcttttctgttattatacttgttggtttggtcctttaatcaggttgaatttgtcttgtttaatcacaaggacatgcccatttcaatataataatactgcctataaaaggaaatagatttccaataaaaaaaaacatatatacagtaaaaaaaaaatatatactcatgtagtaccttgtgtttttatgaaaaacatatttagtaccctatattttcaataatatttaattagtacctcatatttttaaattatgcatatttagtactctaaaataaaatttaatcaatacaatttataaatttaaccaaacagttcttagttatacgtaaacaaataattaaatttggatttagaatgtataaaattttagacaatttgattgtcttgataaaattttatcaaaaaaatttaaatttaaagtatcaaatatgtatgattttaaaatataggataccaaataaacattattagaaacacaaagtacctaacttgtatttagataaaacacaaagtaccaaatgtgtgaacaacctaaaaaaaaaatatatagatagtaaaaaaaaagagccttatcttttattcaaccaaagtttcgtacacttttaccatagctaattacaattgaagtttacagaacaccgtgtgatagaaaagatctcagggcattcatataaagggagatatgcagcaaaaggttgacatgaacttgaggactttgtagcaggttactatgtatatgatctatactggttaattttatggtgtaaaatttaccaatgtactaagaagattagctcaatttggagatgttcttttgctaaaggaaggtgatgagttgaaaatttcctgaccaagctcctttatcttgttcagcagaagcatttgctcggtctcgagttgaaccatgtaatcatcttgcatgtcctcaaggctttccaactcgctcaaggctgttgacaattcttcaagattgccattgttggataaagaccgacacttgatcatcatttgtttcatctgaccagagagcatcattcgacaaaacatatgttagccggattgaagaataatgaagtcattttagtaaagttgtaatgctagaatcatatctgggaacaggcatataaatataggtgcatggggagaggaatccttaagcttacatatggtttgggattgcttagattattgattggaatcaataagaaaggctgtatgactcgaatgctagcattactaagatcctacatacacttcaagaaaaaaaaagttaccgaaagaaaatccgcatcttacctgactagaaatgtcatgtgctttagctaacgaaggttcggaatctaaactgcttgtcttcagtaagtctggaacttttcttgtgacctgaatatgaatctctccccttgtcaccccttggaggggtatccacttgtcacacatctcattcggaggcaatctatcatattcgacaacacagtcacctatacttgatgtaggcagcacagcgttgtggtctttaacatacaaaattaggcggctgccattatctggaaactccaaagtctgattccactttgggttcaaagttttatacataacctgtaatgtatattcaagtatagcatgaaaagaatgcaaaatactactttgttagttttcaaaatcatcaataaaagagagcatggttctttcttagccacttcaataatatgataattgctatcaacacaacgaagaacaacaataatttgacggttaagagtaaagacttgtgctcagatgcctagatataagctcttgagttatcaattgtagctgataaaattttgttccacaatcataatacttaatgttgattgaaaagtacagtcatggctttactgctaaagataaatttaaatattaataaaaaggcagaagggggtcatcattgtattatgcaacatgttcaaaccttggttcttttctttaagttcccatattgaactcttacgtatgggtcacttgttcctctaagatcagctgcaataaggtcttttgcttcaatgagagaaagttcaatccatccatttcctgatcccattgatgaaccctgacatacagaaacaaaaaaaaaagtacaaataaaaatcggagatagccgcatccaaataattgtttaccagcatagaatatcagaaataacaaagttaaaagattaaccaggctcactagaatttgttagacatttgaatcagcatgacttataaggtttcccgtatctttttggtattattccaattaaataaatgcaaaccttattcatatatatttaatacttccatacccttgacccttcagggtcttcaactttgactgcttctatttgaagccttagttctccagaactgactttttcaagagggatccaaatgtccctgagtgacccttcaacaagtccttccaagttcacacgtgcggtaccaatgctttcatccccaaagatttcctcattacaacattttatttttaggtagtcaccatctcctatctcatcaaagtcaaacttctgattccaaacaggattgaaagaatgagctgtttttgttttctgaatagcctgaacataagtgttaagagcatacatggtgttatgcaattcagatgttttttttaaaaaaaaaaattgaaatcattctgatacataaggaattgttacataggaaaaagatatgtacctttccatattgcaatttaacatatggatcacactttccggatctgtctttcatactaagatgcttcccttccatcaccgttatgtagattttccttccagttcttggcagaaaatttgaggagccatttagtgattgtcgggagttaacacgaaaattgttcaagctgtgtgaaccgtcagagaattgccattcttttaaaacaagctttactgtcaactgcaagatccatgaaataagtggttaaaatgtataaagctgggaaagaaattacaatatacaaacattaaatttttaaattaagtttatacttgacggcagacatgaacacgtttctgtagtaattgacattgacaccgtattgtagagaaaatctatccttttagtttttccttttctgttttatgtgtcatttttgtcaaataaagaaccaagcagaaatttcaatctgaagacatgcatgctgaaaactggtgttctaacttagataacaaaagcaagaagtaacagtaaatattaagagttagtcccacattnnnnatgtgtagaaataaattgtgatatataagatgaaagggctactcctcccattgccaattggttttgggatgga

SEQ ID NO: 69644 - DNA, 2479 bp, Cannabis sativa
ttagttgaccaaagattacgaatagagtcttctatcatatgctaagttcagatcttttaagcttctcaagtgaaaaagctatgtatataatgttgtaaatgctattttggatgtaatgtaaataatacccatccgcgtattaaatgacaaagcgtctacgaaaaggaatataataacataattcagtcaaaaacatttcacaatttaagtaaatactattttaaactctatattttgttgaaaatattgattagtcttgttaaataataatttaaactctattttacaaaagaaatataatgatacctgagattaattcttgtccaaaaaaaaaacaaaagaaaatcagattaggaataaaataaaaattgagtcacaattgtttaagttagagatcaggagaatttgaggttagaaagatgattgcttagagttacataaaaaataggacttagatcttcctcacttttgcaaaccacaaagcgaccaattagcaaaattcagaactcaaaatgaaatttattctaaaatattctcaatggaagatgtaaatactatgttaaattacgataattgcataaaactaactacaaaatttttgcaagtttctccctgcaatgtgagcatgattttaaaatgctttatcttagttccttcaactgttattcgggtgtagaaatttgtacaatctcacgtatctttgctgtcacaattattttaataatttattcacagctttgccaatccaaacatgttatctcaaaaataatgtgcatgaatatcagaaaatagagagttcaccacttcatcttattaaatccttcacaggaaggaaataaaaaggattgccttgccaggctctaatccagaaccatacattatacagagcaagtaaattatccaaagaaatttgcaataaagtcaaccaatttatctgacaaacaatgtaatcaaaagagtttcacatggaatcgcttttaaatgaaccaaaaattactctagtggtgattcttagtctcgaaaaggccatctggacctgcgcaacataaaacaaatcaaatatagatattagtaaagctaacaaaccgaaaacaggagttatggagattgctatgaagatatcttagttaaatggatagataacaaaacaagtatacaagtaactggtatatgcagtacatgcgtgtagaatgatgaaccataaagtgcattaatatatccacaaaatatcctgaattatccttcatttcagccagccattcagacttttagaatctacagcattttccatatgattcatgaacagactagacacaaaaaccatggcattttaaatctacaagaatcatgttttagaatctacagattgttccttatccgggagcacaacttgttaacaccaaaataatcaacttaaataacatcactcttataggcatgatcactagtatctttcaactggagagtggacctcctaaacaatccacataatgtttatcacctaagatactgttaacagttaccaaaaatttaatccataaacaacaacactacattgttattcaacaatatgatgccacatacagatattaagaggatgtgagtacaaccgtgcaatgtaaataaaaaaaatgaacataaattcctgatatgacaaaataaaaataagtgcattgttgaaatattctagcgtatatggcactatttaacaaacaaacaaaatgaagcttcatgttaccactgtgcatatcttcccacatttgggaattgaggcacagtaaagaaaaaatgagtactgaataaacaacgatgacaaaatcataccccaggggaactccttattgcggatgtgcagatatgggtaagcctgtataacgcaaaaaaaatggttcttcaataagcatcatagacattgcaaatcaaaattgatcaaatcaatttataaactatatattctatgacttacaccttaaaataagagaaatgtgtaactggtatggtaaatggtatttatctagtgtaaatattcaattaatggaagaaaaagaaataataaaaaagagcttcattataaagatctccattggtacaaaaaacgaaaaaaaaaaaattgattcaactgaccaatatatgaacagataaagtgacaagtacagcaacaagaaagttgataaagtgaaagaagtaaactcacaggaggctcatcgtagtgggggtgaccctttgataagttgtaaattgcaaaaatggtgcaccccacaatgcccacgtatgttatcttttcccactttgcagtctcatctgtaatgaacaagagaaagagaagaacagaatcagtaaaatttccaaggaaaaccaaataataatgaccttcgatatggagcagaaaaaaacgtaaacaataccaaatcaaaaagagatattcaatgttggtcttcccaacttagcgtcacaacctaaatggtaatggtcaaacaaa

SEQ ID NO: 69645 - DNA, 2538 bp, Cannabis sativa
tccacatttagtcacattatactgtgactaaaaaattatcacgacagtttttttttgtagtgacttttttcagtagtaaattattcaaaaaattttgaaaactagtggtagaatgtctgctataattatattataaacaatcatataagataaaaattgagttataatttctctaaattcctaaaacagtgatacctttaccggtaggtcgaaaatgcacctctattgtaattgcacccaaaagtaataaatgtttagtatttgaagaaattataattcaatttgtttatttagttgtctatattattgtaattataaaaagcattccaacacttttcatataattttgaaaaaattaattataatatgattttgaaaattgagtttaaaatagttaattatacgcatatgtaaagaaaaatttatagttgtacaattgatgaatgttttagctctatttttattatttaaaaatttaagaaacttaaaaaatattgtctgttatgatattattacatgataattaattttttttgaaaaattcatcaaactttattaattagatataacacctcatgatagaaacatcactcctactggaaaaatatatctaaaaaataataaattaagtagcaatatgtggtaattaaaaaatgtctgttatatataattaatatgaatgtaacatcatataaaacaatttgaattatataatttgaccaattagggccacagttacatatatattacgttgtcatgcatgtaacaatatcatctttgacgttgtctgtaaaggcaactaattaattacgcgtttgatccatcatttgatcatcacttcatttaaagataaaattaaagttaatttactttttattccttgaccagctcaacgttcatattaatgacgttaaagtagaaagataatggtggattattggttatacaacatcttttctttggatcgttttcaaaataactagtttttaatgaccaatcttccaaatatatatctacctaacccagagctcttcgtaaacctaatccaactaataaattgtatgacagatagagcctataggtgtccatttttgaatcctttcaccttaattagtccacggtccaccttctcttatgttgaattaacgttgagctcgtcaaccatcacatatatattagcttttttggtttgaaatatttagggcataaatattttatattttcagtttcatacatttatagacatatcattttgtaattggctagtgatactcgttattacatcaaattatgtgaaattcgatacttaattgaaccaataataatattgacgaaagtgaagtagtactactgttaccttttagcatttctcatacattaaatatttttatcaattcagcgaattaattaccttaagttacaaacaaaagagtatttatggcatatatatatctaatgtttttcgatttcatacatatatattaaatacttaaaattctagttacgatgatattttcgtcagataaatcttcttaaaaaaactaaattaacacatgtcaacatattagtagtttattcatactttcaataaaaaaaaaaaacttgttaaataataaaataaaaaataactaaacaatattaaaacaattacattctaagagaagaagaagaaagagagatatatatgtaaatagtattttttttttatttttcttaattaaataaacattatttatttttttaaaaaaattaaaattatttaattaaatttttttattgaaaaatacttaaataaaaatgtatatttttttatattttatttacaattttataaattttaaaattatttaataagtttttttttattaaaaatatgtgtagatcactaatatgttaccacgtgtcaacttagtgttttttaataaatttaatgaattggtagtgacgaaagtaatataaatgtattactaatatttaatttattaatttgtcaggaaaaaaatgtggtatataaatgtatgcaataaaaaatattatttatgctgcaaatattattatgtttgaaaatgatgtaataaactggtagtgagagaagtaatgaaaaatgtaataatgtgtcgaaaaaaaataatatataagtgcataaaactaaaactgaaaacatatataaaatatttatagcacaaatatttttttcattgacgagctcagcttttttttttttttttaaaaaaaaaaataagcttaagtgtgaaaaacaaaaactttatgagagtaatatgatcaatttaattatatctatatttcacttattaataaataaatgacctactacatatagtaattattcttataaagaaaaaaccggccacgtggacgattccacatgttgaattattcacatatgatgatataatctaagaaataataattaattaagttgattaatatatgtctataaatagatgggattgcatgtcctcaaacatatatctctgcaaaatctgcacttacaaattaacatactatatttactta

SEQ ID NO: 69646 - DNA, 1802 bp, Cannabis sativa
ttgagcttctcctcgtagtcttccttctcggccgattggttgtcatcgagccattccaaagcttccttaacagcggtttcgatcttctccttgtcatcagcctcgagcttgtctgcaagcttgtccttgtcgttcacttggttcttcatgttgtacacgtatgtttctaggctgttacgagcgtcgattctctccttaactttcttgtcttcctcggcgaattcctctgcttccttaaccatacgatcgatctcttcttggcttagacgacccttgtcgttggtgatggtgatcttttctgatttaccggttcctttgtcttctgcctttacgtttaagataccattggcatcgacttcgaatgtcacttcgatttgaggagttcccctgttgaataagtgtttagtttcaagctctgagataagtagtaaagtaatgacaatatggataagaagaaaaccaaccttggagctggtggaatgccggtgagatcgaatttgccaaggtttctacagtcctttgtgagactcctttcaccttcgaacacctgaatataagagatttaatttagttgaaattctttgtttggtatggaaaaaagccaagttataatatgatcgtatgtatatacctgaatggagactgtggtctgttgatcctggtaagtggtgaaaacttgggatttcttggttgggataacagtgtttcttgggatcaacttggtcataactccaccaacagtttcaataccaagagtcaaaggtgcaacatcaagaagaaggatatctgcataaacaagtttcagttagtattttggtaattttgtctatccataaaagtgattatatatcaatgtgtaatgtgtattgtacctttagtttcttcaccaccctctccactcaaaatgcttccttgtacagcggcaccataagcaacagcctcatcagggttaacacccttgtttggctctttgccttcgaagtaatccttaagaagttgttgaacctttggaattctggtacttccaccaacaagaacaatctcgtgaatttggctcttctccaaaccagcatcatccatggctttcttgactggtcccatggtctttctgaacaaatcaccgttcaactcttcaaacctagctcgggtaagtggttcggagaagtctacaccatcgaaaagtgactcgatctcaacacggatttgatgctggctactgagagctctcttggctctttcagcttccctcctcaattttcctagagctctgttgtccttgctgatgtcctttccgtgcttcttcttgatcaatttgatgaagtactccataatcctctggtcaaagtcctcacctgaagccaggagcaaaaagaagcacattcaacaaaaatccacggaattaaaaaaagcaaatgagtgtgaaatagaataagtctcacctcccaaatgagtgtctccgtttgtggcaagaacctcaaacacaccattgtcaatggtcaaaatactgacatcaaaagtaccacctccaagatcaaagacaagaatgttcttctctccacctttcttgtccaaaccataagcgatagcggcagctgttggctcattgataatcctagcaacattaaggccagcaatagtaccagcatccttggttgcctgtctctgagcatcgttaaagtatgctgaacacaggaaaaggttaataataagtcagtcatggaacctaaaaaacataattttcagttaattgtgtaaaaataaaaaagattcataaaacccaccaggaactgtgacaacagcat

SEQ ID NO: 69647 - DNA, 4556 bp, Cannabis sativa
ataattcttgtgtttagtatgcacaagcacaacaaagagttttatggtattatttgtagctccatgaatgtgaatatgtagcagtagattaatttaatacacccaatccaatcgatagagtaagagttacctcatctgactttaattaattaccactctcagtaagtagtaaggtgtcaagagaattgaaaagaaaagtcaaagattcgagtagtaaggtgtcgagaattgaaactgtgtggtttttgttacttaattcaagttcaaaggtgtacagtaagtagcagatgcagacaatcaatcccctcacatcatcattttaatttcacacattattttcagacaacaacataatattcagtggtatgactatgaatgaactatataatagagtactactctttcactattgaatttacattaacaaatatgtatttgtttaaataaaaatatgaacaattgttccttcactaatagcttactttgcaaaattgatgaatgtagccggacttagagagcacttccttggtcctttccttcctgtaatttacaaaaccatctttttttgcttccacaaaatgattttccattagtgttttttagtttcctttgaaagggatattatgacacaattcaccagcttcatgttaatgaagattcaaagctccttttgtcgttactgatgttaaaactcttttcatctccattgatttgcatgatatctcattttggtcagtgcatgcaaattctgtatataaatcaagagaaagtacttaataatctgataaaaatgcacaaaaaagatagcaatttcactgagagacagagagagagagagagacttactactgtcagctgaggtgggcaattttcacacctagcttagcttgtacgatcaccaacaacatataaaaccttctctctaagcttacaagtggtctgcaaaattaccccacaaaaatatatttagagctatgcatatatggtttaagaacaaagttttacaattcagacctgctcagagtttcttccccatttttcagcagatatagccgcattttttaggtgagaataatgtggagagtcaaaactcaagaaataggtcgaattttctgaagcttcagctacccagagatgattcacttggtcatttggtctcttcacgagattacagaagccaacctgcaaagaaatcttggacaattcaatgaaaaggcttaactaaacaaagggaaatggttactcaccatttttcatgaaaccgcatagttctataacaaaacagacccaagatatatattggaaaattttgttgtaggtattgtaccctatcgattgtaacgtctctaatctcagtccttagagaaattacaactaaatattttttatatgactaattgttttctaaaaatttagaactatttatagtgtttaattaagtatttaaatattcagttgcacatgtctaaaaagaaataaatacaagtgcaactaacttatttggttttcaaaacagatgaaatatctaaaaaaaattgaattataatttcttgaaatgataaaaaaatagatgtccctatcggtgggaattattttatctggctacaaaatgagtcaaataactattttatggtgggacactcaaatgatggtaactaaccgttgatcctacaaggttacggttgaaaggtacagaagaatcatcatcaatatttggggagcagaagcagatggcaagcaaacaattggaaaattcttccgactgtaactcagagatggaactatcagtcacaaacacccattgtttcatctgctgcccacctttgtaaacctccccaacaaagacgacaaacgcagcaatatcaaattcgctacaaatttgaggcaaaaaaaaataggacattaagtatgataacattgtttaagaacaaacaatcagaagcatcagtatacgcatgaagtttgaagatgcacctggaaagaggaactcctcccaaatttgacagtaatactgatttgcgaggtgtgaagaatggtctgtggaggataataataacgacgtgaattattgaatataagccattccttctcttttctaaacagaaatacaatgtgaaaaattacttgaaattttccaatgcatgcagggataaagactgccaggaagtagatcctcttgcttgcaaataaagaatattagcatcagcatttgttggttgaagccctgcaactttatatgccttcccctcaaccagctcagtttgctgtcatattagtaagaaagaattttggcattattcataatcatcaggaaaagaatgagctgggatataaagagaataaaaagatcaccataactatagtatagaccaacataacacaaggctagtgtacctgcttttctgttggattccaaatagtgatcaagccttctttgggaatatcctttccttgatatgttttactcgttagaccaatcacccttaccctcataaatgggatgacttctctcttacctaagccggcattttccaaagctttctcgattgacttctccatgtcagactgcttgattgcctaagtatcagacctgcaatgattaataatctgctaacacataacattttcaatcaggcaaagcatataaaaaccaacctccatttttgcttgatattttgcaaaggaacttaattgttctggactcatctctgccaatagaacttcaggttctgaggctgtctcaagtatcttcaagattttttccccttcttcactttcactatcattataggtatgtgaatgttttatgcccctctgaaagtcagaaacaatgctctcgacaatagcagagcgtctgtaccaagcaaataatcaaccatgagttgaagagttcacttgcaagatcaatatcaaatcaacattaaaggtaagtcacatagtgtcagtgaattgacttaacaaaacagaacaaataaagatcatttgggttaagaaactttaaaatgtgtggttatgagcctatgcagtactacaatcacctctggttgtatgattgcaatactttattctccatcctctctgatctcacaactgaacttccattgcccaacctagatagatgaatgcaacattgacaattattatcacaaaagaagtaaggtatgttattcaaactaaagtaagaagaaatcatttttcaaattacctttccttgtagagaacagggtatactcgtgtgatgccaaacaaagtcagcgggactggacccccattactttttatgcatttaaatgctaaaggaagaccaacacccttacctataaaaatgaatttcagagtaagaataagagagcaagaagatcaaatttcaaatgctccagactcatagaaaaagtataaataaagaaaagtaagtatttaaaatggtgcttacagaatccaagtttatcagcccactgagctctatatgtgccatttatgtgcaaaacaagattagctgttcttggcacctaaaatgtaccaaaaacctgagaaatcccttaactaacacaaatactgcatatttcaaatttgacttcaatacaagaaacattataaaactagtgaggacctcaagtggtgaaacaggcccggcccagccgcatattcctgctccccaaatctacatatgagaattatactgtaagcaaatggagtttcaatttaatgcccaagcaactaaccaaggaatgaagcttggaaaccacagatgaacatgttacccgaattttctggccaatgaacaactttcctgaagcaagctgctttaacagcattacatccaacagagcatccattgaatacctgtacaacaaaacattcttacattttatgataaaagaattcagaagtgagttgaaaatgttggtttgtatgtaatgagcattttcttaccaaccatcagtaagttcaatttttgctgcagcagcagtatgattttcagcatcgccttgtaccgaagagttagcctcaatattagggtcggaatttgaattaattgcagaaacacatagaaccatcattgaagtaggcaaagcatccccttcaagaattcttttaatcgcagagcggtggccatggttcacttccctttcatacctgcacaaatatatatatataatataaatatatatatgggatgttcatctaaaccaaagaggaatagacaattgagttactaagattatacctatacttcaattcctcaatcacattgcccactgtgagaattcttccagaagatttagttggatagcatctttcgtagcatcccagcttccagatgatccacttgtaatgatttttgacccacctaagatgcaacgttaaaaggtaaaatacaaaactatataaacaaggacagagcatttgaaaaatatactgctaaaattacaatatagagctctaacatgcaaagagtacaagggctatgaggcccaaccataccctaatatatacatccactgatccacaaggcataaatagcagccaacctaattgtttaactaagcatgagc

SEQ ID NO: 69648 - DNA, 2955 bp, Cannabis sativa
gctaagcaaactcgtgtaattgaaatctgaccacttttcccatttggccaaatctcgaaaacaaagttcttttagcttcggaaatgactcggagaagttttcttcatcttccgacgttccaaaaaactccggtccgactgtttctagatttcccatggcctctacatggaggactctaagagagggtaacattccacaaggtggtaactttttacattcatggcaatctttcagtacgagccttgtcaaattctctagacaaactaaccaattcggaaaagttgcaccaacgtattctctaatctcaagggaatgcaaccatggaggtggctggagggcttcaagtaaagctagcgacacatgatgttttctttgtgaatcattgtttcttcgacagaaatttagctccaaaccgaccaagttttgcagggacacaatctttgccttgttggcctcgaccgcgtcttcttcgtttccaatgtcacgtatctgtagatttcctcggcactgttttagcttactcagatctccaagtttcattgctttactatttttgttaaagccattagaagaacttggaacgacgaacaaatccagtgtttcaagggaagttagtctctcaatctctataggcaattcctctagctgatcacacccccgaaggtaaagatgctgcaaatttactagctcctccattcgttcaggcagtcttcgaagtttgacacatccattcaatctcaaagtttgcagattctgtaaactgcagagctggtttggcaactccttcaaccataaattatttgataaattaagatacctcaaacgagtcagcttctcagtcccccgctgcagtttttgaaggtcgcaaccaatcaaagacaatgtccgaagattactcgagagtttggaaagcgaatcatggttcacgagatttgaaagttcatccgagccagttgcatagatcgtacgaaatttcaaggtcttagagcttcttgtggcaaaccgaacgaatccatggattacatcattcattttccattttgtaacatttccatgaaagttattggtttcgattttctgaaacataatggaccgcattaccaaactcttaaagcagttctcacccctctgaaaacttttcttatcacttcccaaataaccttgcgacatccatagctgaataagatcatccttatcaatctcgaaatcagttggcaaaatagaacaatacaacaagcagcatttttctaaaggggacaaatcataataacaagacaagagtgtatcaacaacactctgcctaacatcactcaattcccacaactgagttttcaaaacaccataccattcttcttcactgcttttcgatcgcaaaaaattcccataagctttggcaataagaggaacacccttgcagttgttcttgacaattttcttgccaatttcttttaattgttggaactggtgcactggcaacccttcagagaaagctagacttctagttatgtaccaacatgactcgttagataatctatcaaggaatatcatgtgagttgttgctttcatcatgacagcaacctttttgtttcctgttgtcaccataactttacttccctgagcaccattatttagagatccctctagtgctacccacttgctcctatcttcattccaaacattgtctaaaactagaaggaatcgctttccttgaacaagcgttttaacacaattcagtaaactttccaactcagtcaaatttggacaaattcccttgatgccgtaaatgatatcttttgcaattacagtgatatcaaaggaatcacctacatggacccaaattctcagatcaaagtaagtcttgacctcgctatgatcgtacacaaatttggctagagtagtcttcccaattccacccattcccacaataggaatgatacgaaggcgtttctcctccataaacaactccttcattaaagcaagcgtctccttttccctcccacgaactttaattctacgataacgacgaactgaggtagtcatttctggttctctttcagtggaactacttctttcaaaggccagtgttttttgttcagagataatcacatctaactttttgttgagctcaatgattttgcatgcagttgtgatcttattaatggttattgagctagtagatgatggtatacatgagaggcttattaacttctttgaagaacaatcggtattagtagtgctttgatcaccagctttgtggttctcagcaatggatttgaactcctcgaacatgctatcagcctcgtagcaaaagtcttcaaccttatgcacccattgcttaacagacacatcagagaactggatttgatcggcaatggtgagagcagtttggacctgtgcaagtttgaatgagagcttctcaacttcctccatgacacttctgcctagttttcttagttgattagtgaataactgctgcacaagcctggatatcataaattcagccatgcttcaacgtcttcaaaaaattagaaattaagaagattggtggattgatatatcatgaacaagtggaaagattgaagaaaaggagagaagaatctataacttttatatttgtgggattaaaatgaaatttattaattattacaaacaagaagatgcattccacatttccagtcgtgggaagcatctctaagaaaactaaaatatatttgtattttggacttgaaaaaaaattaagaaagaaaagaaggtgaaattaattataggctaattaggattttgacaagtactaaatcccctgaactattgcgattgttggatttaaggattttgttgaattttattcaattttactaaaccatactcctcagactttgatatctaccatattatacccctcgaactttgacatgtatttaattatgccctctgaactttcatccatcttagatt

SEQ ID NO: 69649 - DNA, 4581 bp, Cannabis sativa
gttcatgaatgtcttcttgtttcctggatgaactatcaagatcttgttgagtgctgctgactagaacagtttcctcaacgaccccagttggctctgtaacttctattttgctctctttggcaatgtaatctgacctgatttcagagtactctttaagaatttctgcattgcttaattctcgtgagctaatatcttcttcttttgtatcaaagagagtaactgagctgctcttatcctgcaattcgttttcaattggattttcatctttctctagtttgcttgtttcattatcgtcttggtttgtctcttggcatggtgtaccagaaatctctttatgcttctcttctgtaatttcagcatctcgctcacccacatcatctgccacaagtatcttttcaagtttgtccttcacagggtctccagctttattactctgactttcttgacttaaacctgtggttgagatggaggcgtccccagtactgtcgcacattatacgatctttctcatcttcattgccaatatcttcactagaacaagttacttcagaccctctcttctcagtcaccaaatcaatacacttgtcttcctcctcgacgcctttgaattccctttcttctgcatattcctcctttaaaggtgtggtttctatcttgatgttatagtctaccttttcgtctctgagattagtcttcgtgtctgattgatcatccctgcttaaggtcaaatcagtggtatgaactgagacctcattattgtgatcggacgtagcctctaatatgctgggaacatctttattaaatagctctggttggctttcctccattttctctctttcatctttctccgagtcttttgtcttcttttcagtactttcttcatcaacagaatcctgctgatgcaagattacactcacattttgatcgagaataatcttatcctccatgatttcttctcgttcaaactcaaactctgtctctccagcttctacagcatgcaaactcgttccagtattatgatttctttcatcaaaatctggctcttggtttttctcttccactaattcaccgtctcttgctgcttcttgtgaaacctcaaattcttggccttcttgcagatgctttgctttcttcgaaatctctctctcagatgaattcggttcgtcaaccagacaatgttctggtttactagcctcttctttgcaaacaatgggagctgagggtgctgtcaaaaaacttccatcctctaagttcccaaagtttttgccaactacattctttataatttcgaccttggtgctatctgaaacttgcttgttctctgatacgactttgttagtttcagaatattcacttgtctgactttcacattttttcaattccacagagatatcttcattgacagttttttcaaactgtccggtagtaaaggacacgtcttccgcttgacctttctgcatgaagaaattttacttacattagatttgataaaggcagtgtgccaaagttggacgttcaaaaaggtacttatagtcacaattttctctcaatttttctttagtaatgaaattaaattgcacacacacacacaaatacgatattatagttctctttcactttaaatgaggccagattcatagaaactattatttcagactaggcataaatgtctttcctagatcaatttaaaagattttgataacttgagaaattgtgtgacgatctgagagttgtcttagagtaagcttgatttatttagctttgtcttatgaatcaactaaaaagtgaaaggccaattccatacatggcaattggagtttcttaaagctagaatcaccttgatccgtaaatattatgaaaattggacctctttcttcttgatcattttcacattcaaatagcactttgcaggtgtaaaaacaaatttgtaatgaaaaaatgattaaaagaatctgctatagcgtgaaagaaagctaaaaggctgtattgatttgttatgcataacaaaaacaaagctttaaactaaaccatatagtttaactagtgttcgttgaatctatttatgctttgatgggtacttcatgcactggccttttcctctattgaaatcaaatttgtagactatctagtcaaagggatgaaacaaagtaaagataattccctattcttctatatgttaaatgatcttgcaattttattagtcatcatttataatgctaattattctaaaaggaaaacaagtacagaaaaaacatgatgcagtttagaatctttaggattctataaagtatatatcctagatattatatcatcaaacaaaatcatgacatgcaaaaacacaggaaaagctatttgacaaagaatcgatcaaggttctacgataacataccgtatctaatatgacatccggaataccagcttcagttgccattcatatgctgcaggaactagttgtgttcagggtgaaacaatatgaaataaatatatagtttgatcccaaactcaaaaactagcttgatggcttttgtttttctgataattctgtcaactttttaagttgacctgtgtattttgaattttctttcttaactttttggtttgaacattagatatctgtagtgttctcctggtacttaagttgcaaaaagtaggcagttaatgacaaatgctacttgatatatgttaatgtaattgatgagttggccactaatacaggggtcctacattgatcattcatatacttttttatgaatcctgctttagtgaaactccacagtcttttacatcaattttcttaggttgagaacacttctttttaactttcagaaagagactacctatacgttttaatagtttccttttttgtcaaaatgggagatcatatgtggttatagagtcatttcttgagatggtgaaattttctttaaggaccacctcagatttggactgctgatctagactttattatttatttgagttgttatttttaatatcaagcttcatgattatgaattatgtaaatgtatggtcgtattaatttgatttttctccatatttaattgataatgagattggtccattatcaaatatgaaaatatttttgagtccttgcttgctgatctcgagtgccttaaaaacttttttcacttttaactttcttggagttggagttagctattagtagaagtatcaaatattatcatcattttattttatgctcttggcatttttgtttagctgtctaccacataatacacattaatatcaaatatttcacttttcacagtacaaattggggactccttggttaatttcagagggtaatataattactatatgagattagatcttagatgtccaaaggcaattaattaaaaggaagaattacaaagatgcaggtggctctgattggctatttctgaaatgagtctaaagattttattctcttttaggataacgatgaaaattatgtttaaatacatacagaaagggttgaatcttgtgtcttgtgggacaacatatacatgtgttggagggtccaccgttaggccatctagtcatccatctcactgaatatcaactcctacttggaaaagtattagttgtccaatacagttgataattagaaattataactaaccaccattctcaacatgatgttaaattattactatgttactaatactatagttcattagtttgatacaatgtatattgagaaatactaagatttaactggaaacttgtgatgtctcttagtatttgtttttttactgtactttagtttcagaatctattgattctctttatcataataaaagcctattgatagactagttttatccagctaggtccaacatgatagtgtgctaataagttgagatttatgttatatatatgttgttcaattattcccttcacagaatttccatgtaaaagaatgtgagaaaccaaccatcggttaataattcattctttcatatgtaaaaataattgttattaagttggagctagaattatatttatttacaattcaatgacgaaacatatacttaaaaacttaaatatataataacacaggaaaggcaaggagataatgttaacttacaaaaaagtatccttagataaaagcttccttttttgtcacgcaactttatctattattatagtgttaacttggcattaaattaaatctaacacaaattgttttcaaaaaaaaaaaatctaacacaaatttctttattatgtatattaagaaataataatagagtgaagaaaataactacttgtgttgataatacatctaactacttcaattttagaaaaaaaaaaatcgaggaacataaaaaggggaaagaataaacaaattcaaagctaataagtgagaaagtacaaatttatttgatttattttcgtgttatgaatatttgaaaaagatatgcgaaaagaatttattaaattccttttaaaaaacaaataaaattaagtttcatgttagaatttagagagaaagaaaaatctataaatgaaaaattgtttaaactattaaatgaatgatctcttttctcttccattatttttt

SEQ ID NO: 69650 - DNA, 1371 bp, Cannabis sativa
atatatatatatatataacactatatctaataaaaaccctattcagatcatgaaaacaaaaacaccaccttattattattctctcttttctttctattcatcactaatccagacctagttcacatatacttctaatttaaaaaaaaaaaaaaaaaaaaccctctttttattatttctaccccaaaatccaaatgggttttctttcttcaaataataataataataataataatgcacactcttcatcctcatcttcctcttctacagctcagacaaaaatcatgatcattgatgagttagttcaaggccgtgatttggctaatcaactccacaccctgctcgctaccgcatctgattatcaaaacgacaccgtttcggcagaagatctcctcacaaagataatggactctttcaccaatacccttctcatgttgaaaaaaaataataccgttatttccactgctgctgatgcaactgatgatgagatctacgacgttgattctaaaatccaacggtccaaaaccactgctttggagggtaggattattaaatctgattatgaagattcacaggaaagtactatttccatgactaattctgtaatttcatcaaacactactacaaatcatcatcatcatcatcaacaacatttgatcaaggatcgcagaggctcttacaagagaaggtaattattatttattaaataagaaaaataaatgggagggtaatttcgtctttttcttagggatgtaatctttaatgctgcttacctatttgctgcttcaaaattccaactcatagttataattgtttttatcttttatgacgattataccccttatcccctactttatttaccatttgtgattttttttttgcttaaaataattgcagaaagacttgtcacacaatgaagaaagagacctctactctgattgacgatggccatgcatggagaaaatatggccagaaaattattctcaatgccaaatatccaaggtatttttttttattaattatgacttttttttttacaattaattataacatattatcattagtaaatattatcaagttttttcagatcaaattgataaataccttatttagttaccaatcattatttccaactttgtgggaggtttttttgtattttccttttttataacatattatcatttgggaaaggaaaatatctagtttttaccaataattatatataaatagatataaatatatttatatactttttttatttaaaaaaaaaaaaacaaaaacctttaactatttcattctcactcaaatattaacaatattacctttaagacaatgatagtattgttatattgtgacaaaataattaagaaagta

SEQ ID NO: 69651 - DNA, 2132 bp, Cannabis sativa
tgatatggtgagatattatcaagaactggtgtagggagtcgattaataacataagtggaatgttgaaaggcaaaccaccaatatgataagtctaaaccagcttgagcaagtaatgtcattcctgtttcattgatgtgtctatgcttgcgttcagccctaccattttgctcatgatcatgagggcatgaatgctgaaaatgaactccatgagctgcaagaaatgaggcaaaactcctgtactctccaccccaatcagactgtactttttttatgggaagagaaaactgtttttcagcaagtgttttgaaatgtagaaaggtggtataggcctgagacttgagggttagaggaaaaatccaggtaaacctactatagtcatctagaaagtgtatgtagtacctatagccttccttagatgggacatgacttggaccccataggtcggtatgaatgagttctaaaggacaagaggctctgctagaggagattggatatggaagcttgtgacttttgccaattttgcaagcatcacagacctttaattgattgagagtccctgtataactaactaaaggcaagattttggcaagagtatgagggccaggatgccccaatttggaatgccacatattaatatcttgggtagtatgaacattgaaaacagtataaggcacactagtattaaaagaagttgaatctttattgataggtaaaggattacaactggtggagactacatcagtagtctcattattacagtatgcactattactattagagacagacactggttgtgactccttagtggcaagttgacattgtatttggactggtgtgcttgagtgtggttgagtcagcaagtagagaccatttttgactcgtcctttaagcaaaactctccctgtgatcttgtccttcacaaagcaacaagttgagtgaaattcaaggtaaacactattgtctttagtaagtttccatacactgacaagattcttagtgatttggggaactctaaggacagaatttagttgtaggggagaattggaagtaggaatagaagtattacctagattggagatgttgagttgtttgccatttcccacagctacagagtctgatcccatgtaaggagtttcttggtccagatgttccataccagtggctatgtgattattggcaccagtatcagcataccactcatgatcatgagcaaaatcaggaagagtgttggtgtaataggcttgagggtcatcttcctcaatttcagtaaggaatgcctgattttcaccagtcttgggaggttgaaaattcttatcaaaccggtaatgacaaaccgatgcagtgtgaccaagtttatagcagacttggcacactaatcgatttgtggaatagccacgacctgagaatcttggaccatttcgatgtggaccaccaaaattagtgcccctgccattgtagctgttggttcttggtccagtatagtttcttgatgagttaaccgagaggttggctgagggttttgggatggaatcatggacagtgaaatgtctctctagtcgactttcatgagtaagaagtaaagattgaattgaatcaaaagaaagattgtcaacgagactagtgacatgaacaaccactggatcatattcagggccaagaccatttaacaaatgcattatgagatcactctcatcaagaggatggccagctacagataaggtatcaccaagaactttaattttgtcaaaatagtctgcaattgacaagtttcccttctgtatcatagagagttgggattttacctgtaaaattcgagccttagattgagatgcgaatcgctgttctaaagcttgccagagagtgtgagaagattgatgattggcaagagatccaagaatggattctgccatggaagaacgaagccagctgagaagcaactggtcttttcttgtccatgctgtgaactcgggattgataacccctgttaccagtctttctgtaggagcgatgccggtgaacagaaggtcatcaaggccgtgtccgatgactgtaggtacaacttgtgatttccatgccagaaagttagatcgatcgagtcgaactgtaagagaggaattgagggagttctggaa

SEQ ID NO: 69652 - DNA, 7076 bp, Cannabis sativa
ccttttatattatgttatgtaaatgatataataattagactcacggacatatatagcattagcatatagtaatcacgtgaacaaataaggatatagagatatattttgattttttttttttttaatttctttcatcacaagaatgattaataataatgataagaatataattatagtacaaatatacttttgattaattactttaacacattattttgcccaaataggttaggtttattcaagtaaatgctacaaaaatatatcttttacaaaatgatcaccaaacaagaggaagaacaaaacaattaaatagaaatacaaaatacccaaaaataaaataaaattgtaaatgagatataaataatatatatttatttatcaaatgtaaataactaaatgtggacagaaaaataggaaagttcccaaaattatgtccattcctttccatccttttccttttccactatcacttttgtcatttgcaattgtgcttccatgacttgtagaattttctaagtaaacaaacaaacaatataacattatcaatacaaatgtatacaaataaaagaaatataagagatatatcatataaccaattttttctaaaataatgtcactttctaattttaatttatgatcctcatattaattttttaaaaaattattataatatataaattgggattttcacttgaaatattatgtgacttaattaattattattaattaattaagagcaaaatatgttaccacttgaaattggagccaaagagccactaccatggctattagcatacccatcaaacatctttgcatcagaagaattgggtgccaaatgcaaaagttctacatacaacaataattacattaattaattaattatcataattaatatatttgtactataaaaaattatcaaaactaaaactaaaatacaatatattttccccttgaataaccctaaataaattaatctcatacactatgctaacacattaattatttggcaaaggaaacagtacatatgctaacaccataaaatgactatttgcccttagaaatgcttttggcaaacactagatatttcacaaacaaactatcaaataatatagtctaaaatgaactaaatactaaaaagactattttgcccttcccaaataaaaatcaattagctagattagatattttgtagggttaaataagtaaaaaaagggcatatacacttaccaacacacttagaaatattagtagggacatgacaagcattggggagttgcaaagcaagagttgagtttaggttgatgccaagattaggatcatttctatctttaagaagaacacaaagacacttcttgctcttctccaccaccgtcttcagcccactacaacactccaaagtcggattcttcgcctcgccgccaacgtaaggaagacacgtggcaagcccaaccaacttgtctgcacactcagctctatccccatctagactagtactacgatgatgatgatgataacacaaacccaatattattattgttattcaacattaatattagtactaaaattagtaccaaattcaatgtgttattatttgaacttgatgaacccatgtttttttagataagaaagaaagaaaggaagaaatagtgaaacaaaaatgagagtgtgatgagagatctatctctagtgctaatttttaggctcttttttatagtaataagagaagaaaaaagtgactttagaaaaaggaaagagatgtagtggagggtcatgacattattatatattatgctacctagctagacatgtgaagggatttttgtccttgaatgagtgattatttgagaatatatatatatatatataataagataatatagttatttattaattagtgttgaaaatacagagtttcaatgttatcatgtgtgttgagagatctaataataatacaaattgggatgcgattagttggttaattaataggggtttttatactacatattcaaaattataatttttaactctttttattattgtagggtagaattttttttcaaaaataccgtataaattttatactgtgtactgtgttaagtttttacgattgttttacggttattttttagttgtttcattattgttttacgattattttataaaaaaaaaatagtatttttgtaattttgtgtgacagtataattataaacttaatacctaaaattcaatatttttataaaacccctaattgtccaatgtaaaactttaattgaatttattaaaaaaattattggactaagtaatctaagtaatatgtgtgcagtgtgctataatatgtcaaaaatgtcttgttgatggtctaatttttttaaagggggattttcatttttatgatttttcaaaagttaataagaaaatatgacatttttaaaaaaataaaaaattattttatgagatttttatttttttttaaaaaaaagtacaaagaatgggaaaaacagtttagagtaattagttacattatgcgtttttttttctttatatttttcttttaactttttttttttcgttttttgaattttctataatattacatttttgaaaaaagttatatatatatttttttgcataaaaactcaaaaaatatataaatttctatattttttaattggagatgttattggataccctagagtatgcatatgagcttttctactttgaattaaatattataaaaaataaatttagttaatgaataaaaaaaaaaaaggatattcttcaaactttttctataataagtttctattattatataagatgagagcatggtggtgtggactgtggtgagttatagctagacaaaaaagattgtgaccagaaagaagtaatgaaatttttttgttaagagtaatagtatatatgggttttgattattatattgacactcttataataagttatatatgtatagggatgagtttatatggaccactatatatatagggaatatctatagtaggacctcttgtttcttccctatagtatgagataataaagtgagccaatcataagtttaaaaaattaaattcttctttaattacaatggaccatctgtatattaaaattttttaagttattaaaagtcctgagatgcaaatttttaggaaataggatagctgaaaataggtagatgtgggcccacgtacagttaatgttctttgtatttgacttgttcatatttttgctatattttaatttcattttaagaatggctaaaataaatgaaatcaagtttcaagtaaattatttgcaatgtaaaaaaaaaaagcttaaattattttcaacaaaaaaatacatcttattaattttataaaagaatagtttagaaaataatttgtttacaattttagccgctagagaacttttgttagatcctaccatagtcaggaccgtctcaaggtaagaaaaggcttgaggcgaaatttgaaaagatgtcttatttttttttttaataaaaattaaagataaatattaattaaattttaacacaatgtcaattttaattattttatctctatgtaataaataagtttttgccgtataagctaacttgataaaataatatttaattacaataaacatctctattaaattgttatatattttagcacttattttttttaaaaaaaaaaataatatgaaaaaaataaataactatataaaaataatttaaattaacttaaaaaaaataataaatcaaattaaagattatttttttaattattaatattcttttattttttaaaataaaatatataattaaatattattataatatatataaaattttaattatatacaaacagtcctatcgtaagagtatgcaccttacatcataataaccacacgatctaaaatcaatggtcaaaaaaagttccctactggtagggaacttttgttaggtcctaccatagtctatatataaattgagaaaccaagcttcccatgcatatatgtaatattacttttgtggtggcaatattgtacatagtaattatggcggtatatatggtatggaatggtcatatatatgtgatgttcgtttgtatatatgtaataatttattaccaattttaataatgaccaatcaaacaatgggatctatattcatcactttttcatactaacaatctttagaggaggtttgttatgtgagtttaagttaagagaagtagagtttcaaagaatatgaaagtattggatgagaatatgagatctgcaaactccttagcctctttccatcattaaaatttaattttcttggattaagtttgacattctcattccaaaaatttaaacctataccaaatacttcattacagttagagtattgttatggggtactaagatgtcaatcaccgctataaagtgactttttatagtaattagcggtttttataatctttattaaagtaaaataattgtaagaaaaaatgttaaaaagcacttatggtacttaacactcattgtgcaattcaatatcagatctcacttattttgtgtataataaaaattatgaaaaaccgctaaataattataagacgttacttcataattatacttgacaccataatataattttttttctcatctaaagttctcacatccacattaggagcgaaaccccacgtggcgaaaccccatagtaaaagaggttagataaataaataatgaaagacttaaaattaagtattcggtttcacaattaagatcgatcaagtaataagaatgctcattgcttttaggtaataaattcctttctatccacaaaaattatttcaccctaataatttggttaatttcctttcttagcaaatatatatttacatgaaaatattttgatgaataataaaaagaaagaattgggaaaacatcaaattattgaaaaaaaaaatgtatacatatcaaacttatttattaatttgaaatataaattataactaaaacaaagagaaaagtaaatgatattattacaaaatagatatgatgattattaatattacatggtagaaaagaatagaataggaagtagtaaccataagaaagtgaccaacaccatttgtatcccttgccaactcttaattctctcacttctgctcttgtcttccattgtagcactttttcctccactccctttaattaaacataaattattaattacttaattcattttacacaattaaaaatattaaaaaacatatatatattaaatgttttggagaaatttattgaagatatatttgtgtcaatttatctatagaaaaaaaatgagaagagataaaaagtcatatatagttgaactacataattttataaatgattaattaatgccttaattaggcataataaatatataattgaagctttaaccctaataatagaaaaacttttttaggccataaatctcttagctaaaataaaataaaacaaaaaattttgatttataataataataataatgggagtgtggttttaaaaaatcactctctataattacatttatataaatggaattttaattattatatgtctttactatggtatataacttcatgtaataatttattaattttaagtattggattgtcataaattaataaaatttaactatcaaataataaaaatctaagtgataaaattatcttcataactatttaaaaataaatattatcttaattaattttgtaatatatactagccatataaatataaatataatttattttcttatatatataatataatataataaattaaaatggtaccagtggtggttggagtagaagatgtagtcttgttggtatgatcactaagcatctttgcatatccttgaaactctttagcctctttcgagtcagatttcaaatgaagaagatctgcaattttaattatatatatattcaatttaattaataccaaattatataaaatatatgtaagacaaaaacattgttttgtaagatataaatattttttattttaacaagaaaattgttatgtatagattccataatataattaatataaactaataatacatgtttttaattattaattcactacaaaaaaaaaaaaaaaaacttacttttagtcacaaaacgtaattaaaagtaaaaatctctatttctatgttatcacgtaaatgttcgtggctaaacgtattagtcaaaaaaattataatttattgtgattaaatatatttttagtcagaatattttttgtgattgaaattaaattagttacaacttgtatttaaatactatattttagttataaattattttttattgtgactaaaaattatatttagtcacaaaatttttatgttatatttaaaaaattattactaaataggtagtttttttttagtcatttgtttgttgtgagcttaattaatttcttccctcattacatttactataatcattcttatattgttggaacttaactaaatttactttgatcttaaatctctctttaaacttacttttttataacattaacaaatagcaattaagaaaactaattatcacattttttttttatatataattatacaattagaaaacttttgaacattatgttattgatggaattagaagatctttattcttatttcctaatgtttttatacaaaatgtaatatgaagtgctaatcaaaaagcacatgatgcggctaaaatagcattaggagcttgataaagagatggtatgaaatggtaatatttcgaccaattaatgttgcaattatgggttgggcttggctaaagcggattaggcccgcatctagagcccaccgagtccaggagccaaaaaaatatttttcatttaaaattatacaaatattttagtagatttcaaaaatactatatattttataaataaatggcccaatagtttatttcttctaaggcccacccaattaatcgaggaaattacactctataccctttttatattgtccttttttatttttaccctcttttttaaaatctataatttttacctcttttttt

SEQ ID NO: 69653 - DNA, 3102 bp, Cannabis sativa
ctatttataatatatttagttatattaatttttttttttaaaaaatacaaatgttttgaagttggaccgtcgaatattatattgtatgtatagttaggaatattatattataaagcataaataatttataagtaagaaattatggaattaaaaaagagataaatagaaaaattagtaaaggaattagctggcagtaagggataaccggcctgtcagtaaccaaacccaagtactcgacctttttctcccatccacaggtcagaaaacacaacacatctctttctctttctctctctaaaaatatatatatataaaaacaatacatacatacacacgaagaagaaggaaggaaaaaaaaaaaaaaaagacacaagagagtcgtactatcgtagtatataataagaccaatttattagaattcccatttttttttattaaaaacaaaagaaaaaagagagaatgggacccaccaacacagtataactcggccgccttctttgtcgtctctgtcgtctccgttcacctccgtcgttgctttgcctttgactctctctctctctcttctctttagtcgtgtaacccattactctttctttctattttagctttgatcctcactttctctctcttgagtgttctgagcgtattctgctcccttattacagagaagaaaggaagaagaagaagaaaaagaagtgtctttaccttgttgcttattcagtaaaccccaacaccaaaacacgaaacaagaaagtgggtacaagtttgataaggaaacaggggaagagagagaaatatagataaccccatttcgggattttatttatttttgctctaatccccatctaatcttttctcgtcttcttccaaactttaagcaaaaagtggggaaaagaaggaagaaaaactataatgagaaataaacagggtttttctctttggattagtgttgggttttaggcctgtgtttgtggattttgaatcattttttttggtgctttcggtgtggagagagagagatataagaaagggggtgacttatggctggtgataatgaagtcaacctcagtgaatctaaggtacttttgttctgtttttcttctttccttatctagatcaagcattccatcttcttctctttgttctaacgctttattagcttgtttttggctcaatttggagaaagtggggtgattaggttcatggggttttctctttctttatatggtcttcaaaaagtaatggatattttcttactgggtcttctttttctgattatagacgacctcggcaaacttttattctttctacttgattttgcaggggccattcttgttcatttccccatctttttttttccttcttcttcttaaatatgacctgacacaattctgttttcatggggctagttatgatctatttcttcatgtctttctagtctgccgtggttgtatccaaatttcttgttcaggaagctaaacccgctttatcagagtttctattctcgttacgttctaaagtctcaaaagttgttcctaacgagttttttgagttactcccatgcctattttccataccctttcttattttttttttattaaagctttgaagattctccaagcattgtttgatatttgattaaagttctaatctttcctttttaattaaacttttgtagagagtggttccgcttaatacatgggtactcatctccaatttcaagctagcatataatcttcttcggcggtctgatggaactttcaaccgtgagttggcagagtttcttgaccgtaaagtcgctgccaatactaatcctgttgatggggttttctcatttgaccatgtcgatcgagccactggtctcctcaatcgagtttataaacgtgcccctgaaaaagaagctcaatggggtcttgtagaccttgaaaagcccctaagcaccaccaagattgttccagtcatcgtttatttccatggtggaagcttcactcattcatcagcaaacagtgccatttatgacactttttgtcgtcgacttgttaacaattgccaagctgttgttgtctctgtaaattaccgtcgatcacccgaacacaggtacccttgtgcatatgatgatggttgggctgctctcaagtgggtcacaacaagaagttggcttaaaagtggtaaagactctaaggttcatgtataccttgctggagatagttctggtggtaatattgctcatcatgttgctgtgagagcagctgaatctgatgttgaggtattgggaaacattcttctacaccccatgtttggtggggagtgtagaacagaatcagagaagagattggatggtaaatactttgttacagttcaagaccgcgattggtattggagagcttatcttcctgaaggagaagacagagaccatccagcttgtaacatatttggcccaaggggtcaaagcttggaaggtgttaagtttcctaaaagtcttgttgttgtggctggtttggatcttgtccaagattggcaattagcttatgtccaagggctcgagaattccggtcaggatgtgaagctcctttacctaaaacaagccacaattgggttctacttcttgccaaataatgaacacttctattgtctaatggaggagctgaagaacttcgtcaatcctaactgttaataactacttaactttacctacaggcagccatacatagcagaagaagcttgacatttcacttgggtcttttttttcccccccttttttcacagtgatggtgtgtagatgtaagattgtgtagtattaattcttaccatatttgttattattattataattatatagatcatttggtggtggtgtttttgagagttctgctgcttggactagtttgttctagcttcatcagcttggaaggatcagaactcatcaatgggatttggcagaaccaccattaccagaactacttctactaccctggcttaacttttggccatgaatgatgatgggaaggagagcattgtgggggtaatagttacaaaagcaaaacacacttggtggtttgctgagtctttgtcttagtaaaatgcatacatataagcactaat

SEQ ID NO: 69654 - DNA, 2640 bp, Cannabis sativa
aacctttaaccgagtcaacaaaaatagttagcttatttaatataaattaagttagttcacttgtcagaattagattagtttaacaaaatatgagacaatactttttattaggagatcttgattctaatccttctataaattgtaggttttacggtcaatgaaaataaagtttctagaactttatataactttttgcagctatctctgttgcttaagtaaaagataatctctttgactataaatgaagtaaacagcataattagtcaatgatttgaacttgtcttcttgaacacaggactttcttcaacaacttctagatgacagagataggaagtcagtaagagatgaacgtgacattatcttgcttccaaagcaattgtggtgttcagtgaaagcatgtgaaggtggtggtgatactctctgtgaggtgggatggctgttcaacaatggccgtgcaatcacatcagaatgcaccttctccagcaaagcaactttaaaggtaagttttgtttgaccaatcaatagattacacaagtattagaactagagttctattaggattgaacaatgctacaaaatcatagttttggcaacccaattaatctttttcaattcaatttgcaggaagtttcaatagcttgtgaaactacagccttggagggtacatagccccctcgatattctgtcaactaaaatctttgtttattcttccttttctccttaaaacacaatccaaagcttataatgacaatgtgaaacagcccatgtgcgtgtcatttgtaagtatatatagatatacatatacaaaaattctactccaaattcatagtattgtaatgtcatactcatatgctccatatttttctctgccagattctcttggtatttgtttgtactgtgagaagttgttatattggttactgttttctgtgtcattgtttgattctatagtaaaattcttctcatatattcaaaagggcatttacttttcttggataccagttttggtgtatatcttatctcctcatttagcataacggtcttttcagtagaatccaaactctgcagtctccagattatgtggctgacaatgtcaggctttgaatcattaatgagtcaaaaacacgtgacacaaccaaaccaacataaatcgtaccatcccatgttagaatatgacaaaaagaactagaccccaaaagttggaaccattgtaagcccgtgaacaacctcaaagttctggtaaacacaacaacctttctttatcatattattgaaattattgtattgcttctaattcagtatatcaacttcaatgaacagatttgaaacataatcatttcatagtagtcatctcatttgtcaccaaaaaaaatctgaaaactacaaagtgaataagattggcaaaatatctgcaggtgaaattgctttctttccacattatatatatttatatataaacagaaaagcctcaaaaatgaaacactgcaaaataatttagatgcttgaatagctatgacactactacaacactccataattcagaaaagcttacaacatatttcattattggtcatacagcaatataggcatcttagtgaataaaattctacataaactcccatcacaccccaccaaaatctttcagtgacatcatgatatgatgatccaaagtcttgggagagctgaagataattaaaattggttctcaaaatcctactgccaaatcacctcctttagctttgctgtacaacctaatcaatgagccaagaacaacagtattaaacttcaatatagatggaacatgttttctataaatagtgttttcgaaaacattcatgccggtattagttctatcgagtttagttatagatattgcaaaacaggtcaaactatatccttaaaagattatgttcttcaatgtgacctatctaattttgtttaatcatgtttgtcctattgattatatgactaaaaatgggaataatttagatgtttagtaaaagaattataaatacctgtacaagacatgaaattggatgctaatgagcacttggtggtgcatctctcatgcttatattcacactgttcctcatagttcgtcttccaattcctgcattgcccttctgcatcatggcgacaaattcaccataatcgattcttccatcctgcaggcaaaacaaacaacaatgaaaattaatgatgcagcaatggagtagcgtaaatctagtttaagtgttgaaccgaaacagaactaaagatcttaatgaaagacaacatcaatgttatgttacttacattatcttggtcaacttctctgattacatcttcaaggaaaacatcagtcatattatgttctgcacaagcttgctggagttcatcgacggtaatgtaaccacttccatccttgtcgaagtactgaaatgctgcaagtagatgttcctcgcgttctagtttgttaagatgaactgtagcagctatgaattctccatagtcaatagtcccgctgttgtccacatcagcctgtgtcattacagacagaacacaacatggatcaatgtcaacccgaaaaacatcaacttcttatcttattgagaagaatgtttaatgtcataactccattcacagctgttttaatttttc

SEQ ID NO: 69655 - DNA, 2105 bp, Cannabis sativa
aaataaaaaagttagcttaaaaaaatatggttatgctcatcatagccaacaatctcctcatttattacacaattatgcaaactcatcactttgtgtagtccattcaagatgtcacatctagtgttaattaatactacttaactaactaccaccactgccacctgtatatgctgtataatttaattgcaattataaaagcattgttgtatacctgtcccacagtgacaagtactaattagcattacagattaaaaccatgttatgcaccgattttgtttcagaagataatgtttatgacagctcaagtattagtattaaacaaatgaaacaaggcaccccaatgagtgtgagactagtacaattaagcaggtcctaatcaaactgttccacctcccacttttgaaattaatggcatgcatcaattttcggaggtggtcccatgattctgtacattaaaaaatatataaaatattcttccaacattgtgtgtatttaacaaaaatttgagtaactgcactgttaaaccaacccttgtggcagtagtatgtgtatgagtaaaccatccaaataatatgcctctttcccatttgcacgattagtagtggttttgctctcaaaaatgttttgagtcttggtacttggacatgagtgtttagttttgtaactatctctaaatatatgccatttaattctcatattcttgtttgcccttctgaactgttggaactagaaatctctgtagaggtgtaggaagcttcaactctagtaatgggggttgaatttgatactaagctctgtgagctgtaagagccagtgaagctggttgggtttaaagcagtggcgtttagaaatgggggttggtttggagctggtatttccttttccttgttggtcagcattgaaactacttcagtcattgatggtctaaaagaagctgaagcctgggtgcaaagaagcccaatttgaagaactttggctacttcttttgctggaatctcacctttcgtgcttgggtcaacagcttcggctaacttatctgacttatacagcttccaaacctgtaaaaagtcaaaaaaaaaaaaaaaaacaagaaaacaatctcactaagatgcttaagagtcaaatctcaaaagaacccattttgataaaccaagtaaagatgcttactgtttgtaaaagggagcctgaatcttgtgtgaaagcacagtttcttctaccgcaaacaatttcaagaaccaacactccatagctataaacatctgctttttctgtgagttgtcctctaacaagatattctggagccatgtatcctctgtttcacattatggtattcaagcattaatcattcggctgaacccaaaaaaaaagtacttaatgggaaatggtaggtcggcaaagagaaaaagtaggtgcaataataattatgggcaggcaaagaaatgtttattttaaacaggccaccaaacttttttaggtacctgtaaaatcttaaagagaacagtatcaagggcacagaaagaaaggtcccaatgaaaaaggaaaattttaactcacagtgttccagcaatcccagtgctgagatgagtcttgtcagcaccaaagcaacgaacaagtccaaagtctgcaacttttggagtcagattctcatcaagaagaacattactgcttttaatgtccctatggattattcttaaattagaacctccatgaagataggcaagcccctctgctgttcctacaatgatgttaaacttctgcttccaattgagaatctgaaccttgttcttctctgcatttcacaattcaaataataataatattaggaccatttgttttgtattgtaatcactaaagttgagaactaatatagagaaagaaaaattaccgaagagaaagtggtccagactcctattgggtacatactcgtacaccagcaaactctcagggccttcaatgctacaaccaagaagtttaacaaggttcttgtgttgcattccactaatcaaattaacttcattgaagaactcatctacccattcccttgtattatagatcaatctcttaactgctacagttttgccatttggaagagtccccttatacac

SEQ ID NO: 69656 - DNA, 1143 bp, Cannabis sativa
  modified_base (490)..(491): a, c, t, g, unknown or other
accctaaattaaaaaaaatagtatatggaataatttctaaaaaattttagggtgtaaataaaatttctctaaaaaaataggtaaaaattaacttaaaaaacttttgagggtaaatttagtgaattaacccctaaaaataaagtaattatcaacttatattcatggtacaatatggtggagtggagataaaataagatgtgtacataggtaatatgtatatttttttttgacttaatgattaaaattactcatgaatttacggtgcagatatctacaaaaagcgtaagaacttctttgaacttggataactcatcgtttaactgaaagacatgctttgtcaaaccgtaaacagctaaagtcagcgagcaacatgggacaaaactgttctaaaaaatttatacaataaagctataacgttcccaaacaacacacttaaagaactagagctttaatttcgtacatttatcctttcttccaaaaaaaaaaaaannagaaagaaagaaagaaaaatgagatttgagatgattgaatggtgatttaataattatgtatgatttgcgtgcaaatataggaaaacaatagctaaaattaatggaaacaatccttgtcttgcctaggatatttgggtcccaatcttaccgattttctatttttaaacttcttcaccaacctttatgctggcccactcccaaagtcaatcatattattgagaaagtctatactaagtaggttttttttttgtgcttttaattattattattatcataagtaacctataatatgtgtatataaatgttattattttggtgccattaaatttatatatatatgaaaaaaattatatgtttattctatatatgtaggtttgagtaatttttagaatttatattaacagcagtacttacgataaaattttaatagttggataaatattatgatttaatctattcaagttttttttatttttaaacttcaaaacattttgttttgtattttttacggaattttacctaaaaattcctattagaactagcgctgcagtctaattaattgtaacaaaaaatcgtatagaaacttatattgcaactagcgctgcaaccattttaaaaatccaaaccgtaaattaaaatatatatatatata

SEQ ID NO: 69657 - DNA, 1416 bp, Cannabis sativa
aaagtcatatttagtcacaaaacaattatattttaactaaaaaattatcactaaaagtagctgctttttgtaatgtttcctcttgagtgttctaaactgtaaaaaaaaaatccaatttttcccaacgatttaaaacagtcacttaatattattagtgacggtcctctaaaaaattcatttttgaaatcatcgcgaattttgacttagtaatgtgtgttccttattgtaaatcctctattttacaaattggattactttgatcaatatttgcttgtgtagattttgttggtttacgatgttcttaaatctgttgacatacatcacctcaatatatgtgtataaaataaaaattcagaaaataaaacataacaagaattactgttaattatcctcttcatatatatggtgctttaatgttggtggttatacagatacaaacaaatacagtttattacatatcttatttttttaagtaacaaatatatttatagcgagagatattatagttaataagtacagtgaattattttttcagcaatatgtccagtgtttaaattaataattcttgcccagaaataactgttattcttcaatagttacctattattacagtgtcatgcatgctacggtggcgccgtttatgagcagtgaaatttctactatttcttctgaaaagtctgaatcatatactaatattattaactgatcgccctcttcggcttaactaataactaacctaatcactccctatatatataatatatcaatcactatttgtcaagtacgtattccagatctaattaatacttctcgattattgcattgcatatatatatacagaaaatttatggtagaggctactgtctttacctcaggagaagaaattaaaacaatcacaagttaaagaaaatgaagtatacaaaatatccattacagtatgtgtatgagatttatttccttactctatttaattattttttccttttttttttcttagaatgatctaattactttatttagttgagcactggacatagacgggctaggactgtgcttaggcccacctagtttatgggctcaaaaattattttttctttaaaaattatatatatatttatttactgattttgaaaaatatcatttttttttaacataaggcttcaaaaatatttttttttttgtggcccactttgttttagggtcggccctgagtataagcatgactttttttaagcgttatgttttttagcatgagttgatttaagtagaaagatatacaattaagaacataaattgttagatgcacctcaatattgaaaagagataagttgaagaatacctcttttttgtatccattaattaaaaataaccttatattatattttattaaaatatactcacttttatgagtgagtt

SEQ ID NO: 69658 - DNA, 2096 bp, Cannabis sativa
gaatagttgaaatgttgaatacacttttattttcaaatggagtctaactagctatatagtatatagcatcaccattattcactatatatattatatttattttcatataattatatattacactttttcccactttcaatattattcccactatccaataatatatacctaaagtgaaactaccttttataagattgtaacctcacgaggtgacactatagtttttcccaacgcttgcttttattggttatgatattattatatatattattgtaataattaatatatattaacaaatatgaaatgaatggttaaatgaatcatacgatgatcagtgtttggagttttaattaagctccatattacaaggctttagtactacattgaaaagtacaaaatagtaattgttttaatataaaggaaaaaaaaaagtaccaaaaagaaaagcttctataattaataatgaaattaattaatgttaaaacaatttatattatgaggttacaccaactacttgtattatatattgtatatatacacacaacacatgtgatcatgtttgtaataatgtagtatagacaacctcttttgtttcgttttagtaatagtttttatttgttaattgtgttttattaatatttagaatagtgttgagtgggatctaaagttagtagtttaaaagttttgttttcaattaatgattattatttttaaaaggattgtttagagaaaaaaatacatgagtatatattaattaattttccacactagatatgcatcatgtgttttaaaatttcatagttaaaggatttatttgtcacctataatgtctctcaatacagtttgtcatattcaggatgaatgtatataaattgctcctcaagaagagacaaattgaaaaatgttagaaaattatgatagctgatatataatgtaactattgagaaatttgattatttatggatacatttagggaaaattaattttatgttgggtacccaaaatgcccttgtatacactctcaccttcttcagtcgtcccctctctttctctcctcactctctttctctcaaacttcattttctctcatcctctctaactaattcaaactaaaattttatttttaatatacagttaacccttctaagctactacaaagtactaaaagttagagagttttcgtgtgagactccatttttgagacaccgaacaaacttcggcaacaatgaattggtaagtgatttttttttttttgttattggttcttatatttaatttagaatgttattttcacgattgatctgtgagtttttgctgttatttgctattttgtgttgaaatggttgttgtctagtttttttttggtttctgtattttttcatctagttcgatgaggcccgatactagtccgatggagatcttagatctaaggatagggatgatggcccgatgtgatcttagatctaaggatagggatgatggcctgatcggctcgatgtcagcctgatgctagtctgatggtctagttgggctaagggcaaagcccgatgggtctgattggcccaatgtcgggcccgattctagtttgatggtcgaattggacctaagggcaaggctcgatgggtccaatataggctcgatgttagtttgatggtcattctggacctaaggtcagggatgatgggtccgatagtgggcttgacgtggtctaatgaggtccgatgcttgatagatttatggcttttgaggaatcacttttttgttagatttttttgttctaaatttttaattatgcttttttttaatgtctgtgacagatttaactgtttttgcatttgatatgtataatggtgtttgagagcttcagggcatagattaggtttataaccaagttgaaaatttgacattcgagatcgatacgaatgtaacctactcacgtttggttgatcttttgtacgaagaactcgatgttgacaaagtgcagtatgccttaaaattgaaagtgaattacaagtatatgaaaggcttaatatatcaccctgaagttattgaaaatgataagcgtgtaaggttatttttgtctatgcttgcgaaga

SEQ ID NO: 69659 - DNA, 2295 bp, Cannabis sativa
tgatcgtaacagtgtagattttagtctgaactgaactcaaatctttggaaaggtgatactgccatctttttattcgtttaacttttcaacagttgatctctcaaagttttttttcttggccagcttatctatttgctagtgtgtcagattcccatgtatctgtttttatgtaaagtttgtttcaattgcatgttttgggtttgaatcatttgaaagatttggagttgtggtgtcagttgataaactgggttagtagttaagatagttcattacagggggaacatgttcatttgattcaatctaagtatgtatgtaattgggagtgagtaaaagaatctttgttttgggatgtggacattattgggctcaacaacatccttgcctccttggagtcatattgataatctatatctaagaacattacattatttggaggagtttgcatttgagcttgagaacttgagtcgtctaattaagcaaaagtagtgtggagttcaatgacaagtggcttctgacaatcaatggaagtaagtacagaacaaaaatttgtctttataatttattcttgtccatcataaacaaacagcaccagtggtctagtggtagaatagtaccctgccacggtacagacccgggttcgattcccggctggtgcaatttttttttttcatttataagcaaaataaattactctggagttttgatttttaaaactgtaatttacctttttgactaagtggttggagaataaaattcagatacaatcatgagaaagtatcaacattctgttaaaagatgttagtaattaattgcttacctaaagaaatatttccaagcttgatagaataaatagaacactttcaatatatatattgaacttggattcaagtttagaattctattaaagaacatttattataaagaaaaacaatctaaatagctttcactggctttggttcatttgatcaatggaacttttaacctacaaatgcttttgatgccctctcacattatacaagcttttcaaaatataagttaagccggcacaagacgcatgtcactcatatcttaagaaatgtttggaaccttataattttctcattgatatcaatgaaatgccaatattctaaaacattagtgtatcaccctacaagccagaatgtaattgaccagaaaatataaaaagagagaagaggaaaaaatatcttattcaggttgtacaaagttttagattttattaggagggaaaacagaacatgggagaagagggtcatctagaataataccatcacaatgtaaggaaagaaccagaaaaatagtaagtgcaaaaacgtttgtgtcaccctgtgagctcttccatcaagccctgttcatagagtaacatcttgaaatttagtaaaagatagaaatatatatggttttcgaaaacaggggagcaggaaaaggatctacccttgagatgaactgctcaacatcagttcgtttaagaaaatgcattgagtgccgagtgaaattggctatcttatcatcgcttaatactattccttcccctatatcatcaaggaccctcactttaatgtagggatcttttggcggtatcatatcctggttagatgagaaaccgaaaccattatagttgataatgtaaaataggccttgaattatgttaacaagttctatggaaatgtaatatgtaaggctgaacttgtaagaacaaggaacaaacaagcagtacttaccacggccaactcaagatcgatatttgactcataggattttaaggatgcataatgtttcttgacatactcttcctcgtagtgactgagcttctcttgaatttcttgtggaagcactggcccaaccttccaaatcaaatttcgcataatttcagctcggttgtatctacattgtcatcaaaccataagtgcaaaattagctaacttctgggtatcaaaaccaagcctcataagaccagccagcttgcagaaactgatctatgagtaatacaagaccaagacatactaacagatatgacattaagcagcgtttgttgcgaactaaagaaaggtggtgaatgagtgatccataatggtcttcattttttgttgtttgtacatccaattctttctcctgcattttcctgttgcaaatcaaaccatttgaatctaactattaagtcatctatctcattgtaatcataactataaaataaaagaacacagaatatgtaatcatagcaactacaaacatcatgtcaacattacttccaactttgtttcaaactttaggtgtcaa

SEQ ID NO: 69660 - DNA, 3625 bp, Cannabis sativa
taattaattaattagttaattaatgtgattttaaagtatactagaaatgaatttattttgaaatgtattattgtctactttacaagggagtgcacaaattggacgcatagtaatgactgcggctgctaagcatttaacacctgttactttggagcttggaggaaaatgtcccaccattctagattccctttcaacaacttcagatttaaaggtttgtttctttatatttatttacataaataaattcagtttttataaggaccaataatatatgagatgagatacaatacacaatttgttaatttggttacctatataaaataaaatggtattttttttaaaaaaaaaattcaaacaattttgtatatcagagtctaattacagcacttacatcaatttctttactctattctttaaaatattacaaaaattttactttttatattttaccttacacatttacattacaccatatatccgtttctctatatttttttatatcatttaaaaattatttattttaatatattttattcattttttaaaaataaataaataaataaatataataatattacacacatacattcttaaaaaatttgaaaaaataatataatatttataattcaataaataatccttctttataagcactattcataaattaaatttttgagctataatatatcatttgatgcaacactatttttacctcttagctaatcccttttttttttacctattaaccattttaactactttaagtgttgattctaaacgtagccttgacccgcgtttatttagggtgggcttaatagggaagaaagcctactttctttaggcatctttctctattaactcaaggttctaattcaaatccttcataactttactttaagacctttaaatctcgaggacgagtaacaacacaggtctaataaatattatagcctttatattaattgacatgcccttttaaaatctaaattatttgaataccaaagcgaaaattatataagctatactcaaaggatgcttgccatgagatcttttcctatattggtagtaaaaaagtaatgcttgcgactaaaactagttacatgaagcaaattaggcataaaatctaaataggctcatattttgttttaatgaaagacacacaaataatatatacataaattacacatatatctatgacaaaatatttgaagcaattattcttatttaaggtaacatgaatgatacacacaaattgagaaatgacaatatagttaattttgaattcatcatgttgtaatatttatatatatacatgaattttgttttccataaaggttgcagtgaaaagaatagctggagcaaaatgggggccttgtagtggacaagcatgtatagcagttgattatcttctggtcgaggcaaactttgctccaactgtggtaacatattaattaattttctcattttaattaactatttttggctttatatgtataagaaatttttgataatttattgtatgtactttagattgaaatgttaaagaaaactatcaagagattttatggtgagaaaccaatagagtcaaagagcctagccagaatagtaaatcaacgccattttgagagactaacaggctttctcaaggaccctcttgttgcagcttcaattatacatggtggctctttcgatgaagataacttgtaagtctctttattaattcttttccaaattttattacattatctatatacaaataatgaagatatcatgttcacctaaactttagtagataaatgtgattggtttataaaagtgacatttttttggtacgtagtatcttcaaagaagccaatttcttttttcttttaatcacgtgaggttagcttaagtagtcagagaaagtatcggggtgcatgtgtggggagtccgagaatcgaaccccaaattgtacaatataatgtatgtacatagacgcttcaactaaaaaaaaaccaattttctcttctttgaattaaatttcaggatgattgagccaaccatgttgttagatcctcctcttgacgctgccatcatgaatgaagagatatttggtccatttcttcctataatcactgtgaggactaaaaaaattcaatataagtttcacaaaatacttttcttacgaaaataacataaaagtagtatatttttttttaccaattattctaacaaaaagttaatgtattttttttttttttttttacagttgaataagattgaagaaagtatagagttcataaagtcgaggccgaaacctctaactatctatgcattcaccaaagatgaaaaattcaagagaaggattttatccgaaacatcttctggaactgtcatgttcaacgatgttttgattcaagtactatacattaccttcttcaatattctactttaaaatatatagagtaatttacgacataaatacttaagtttaattattggctgcatataaatatataagtttaaattttaacggttaggtattctaaaaatataatttaattattattatagtcaaaaattaaaacttaagtatttatctgcaattagaaattaaatttaagtatttattccataaattatttaaatatacatatacttattgtctaagaatatataggaaacttgtctaagaatctatatgacgatatatagattgtgtttataacataaattccatttatttttcagaaaatttcaaataatttacgttgttaaaaatagagttttaatttatttattgttttaatgtgaatcaagttgttttaatttgttgttggtaattaattatgtgtgcagtttttatgtgatacgctgccgtttggtggtgtggatcagagtggttttggaaggtatcatgggaagtattcatttgacacattcagccatgaaaaggccatcatgcaaggaagtttcttgattgagattgagccaaggtatccaccatggactgattttaagatgaagtttatcagacttgcttacaggcttaattactttggcattctcctgcttctacttggtctcaaaaaatagatacaacaatattaatcaacatacaataactttattttgcttatatatccatcatcagtatgaggaggtttatttctgagactaaataaaacccaaaacaactgactttacttcataatatgtattgtttggatatatatatattcagttttgatcaagtagtctaagttctcatcatggcttaaataaaaaagactatttaaacaaatatgtgagacaggatgtgtttgaatttgtaatccgaacttaatttttgaatttgttaaaaaaaaaatttaaaagtaattaatgttacatattttagtccaaaccaaagaatataatctagatagtacatcaagagtatcaacatgttgcttgtacacatatctttcaatgtcaagtaatagaattcattttcactatttgacgaaagtgtgaagacttatcaatttatgagattgtaaagtctcctatgcgaattaaaggggataaaggattataattaagttttcatgtttttctgtttaacacaataaaatacaacaaaaattatagttttattaatatt

SEQ ID NO: 69661 - DNA, 5971 bp, Cannabis sativa
ggttaaagggtgttacagattagaggtgaagaatcagattaattcgaagcggaaacacagtaatcaaactaagaggttttagccataacaccccaaactcaagaccaagagtggagtggaactgggttatatatattcgtaagaaacaaaagagacataatacatttttgttggaacaatccgtacatgttggttgacttgactttagtttgatcatattcatagacacaatacaagagaagtgttagtgaagcttcgatttcttagggagctcttttcatctgaatgacacgtggctgaaaatgccatgtaggattagcggagcccaccacctcaaaactcttgtgtggaaaactcgtaccattgtacaggggcttaacgcgttaactgactgcttttattactttggacgtttgttcttacttccttttattttttattttttttaagagacttctttgagaattttctttctttttcttttttttttgaatgaattctttgagaattttacgtttttttccatcaagaaaaatgtcatatcaaaaacttgcagcaaccaatccatcagagctttatttttttttttaataataggaaaataaaatggttgaagaggtgtagccaaaaaaaaatggttgaagaggataacagacaaataataaaagttggatgtatgatatttgagtttaatgatgactttggctcaaaaaattatttgtcttgacgttgtaaatatatgatttaatttttaagagatttggaatttgctatttgctatatttgtgttctttcaaatagttggaactatttctcatgttgggagatagttacttcatttattacataattgagaaataagctatctcataaatatagagctctagaagagcatagcaattcgaagtgaggcaattaaacacatagtaatttagtgtgtacgaatttagagtgaataattcgagtacagctttgtacaattagatttattaggacatctgaaagagatagtatttgtatatctaaattttaggaaacactttggtgagtttagaaaacactttgagaaacactattacttaaaaaaaaaattatatttgtattctgtatatttcctatttagattattaatatcagttgcctcatgtaaagtaagaattgtcaaaccacataattttatatattttattaatcattttaacatatctttatcgctatctttcattatttattgcttttacagacaatattaaattctagataattcgcactttgtaaaagctgaagctcgtgagcaaactttttttccttccaatgagtgtaactaatatcataatcgtttctgaaaaacataatatatatttatactaatatcataatcataattcatcaagtgttcatttaactttaggctaactttttcaattttattctcttatgctctccactaccctttgctttctcttaatacattatgtagtcaaaagataaaaggttagatcactaagtattaagttgcttagaaaattcaaaaggaattgtcgtattcggttgtgcaaagccttaataattaaagagaaataatttatatgataaagccaaacaaaaaaaaaaaacaaagaaatacactttggcctgacatgaggctgaaacaaaagttttgataaatcagcacattattcatcattctttagcagttgagccatgaaaaattgcacataaacaatccaaactaagaaaaataagagcattactacaaaatggatttgccatcaatgagcctgtacacgtatttttttacaaactccattcttcattcatctaccaagtttctcacatgtttaatttcctttacaaaaaaagtaaaaataaaatttcttgtgtcaactaattcgctcctaaagagtgccttctagactgagaacattgcatttttactgcggaaagcataacagtgagacgagcgtgatcagaaagtgagtaatgctcgggccacagtcccttctccacctcacgcggaaagagagctgcactcttaactttaaatccaaggtatgctccttcctcggtgcttagtttagagctatccagattcccattagactcttcctcttttacttctcgatcagatgacattgcattccaaattccctgctacaatatcaaggggaaagagaatactcttataaacaaacaggcatttctagaaactaagtgaaaacacgatacagagatcgtagtggaagaaatataaaatataactatgctcttaaattttatgacattctagatatatataactatgtttaatacgatcaaagacagatttagcatttacaagcatagattcctgacattcaaggacagcaaatgaaactataaacataatgattgggaacagagggagacatagagtgcaagtcaccttaaattcttcataatcgacaacaccattcccatcagtatctgcttggatccagagatctcttgtttcttggaaatttagtccacttggtacaccaatcaaattaacctgcaaaagtaaaacacaaataagtcttatgtttcagcagctttgtaatcttacattatgtaaaactttattatctcaaaaaatgaacctggcggagtgcttcaaggaaagccgagtacgtaatgaaatcaccacagttgtcaccctttaaaaaggcgaacgcatcatgttcagtcattgaagctttccgaagttgatactgaaaatatgaaaagaaaaagacttatcaacctccatttgatcctactcagcatgattagtttatacattcattagaaaacaccaaagacaaagtaggggaaaagaagcactagtgacaagggatgagaggaaatagagaaattaaggaaccttttactcagaatctcccacgtgtcacctgagacttctcatcccatcactagatgttctttgacgttataggctttggccatgacaagaatattttctacatctagtttctaaagaaattttctcaacacgaacaaaaaacacatgcacaaaatttagttagaatcagagttgtgagtaaattaattacctttagtatactaaaaactgattctccccaactagtcttcagtggttttcgagatgtattagcattacgaagccatatgaaatcaacaccacagatgtttcccctatgatttcggtgactaacccactgtagaaatatagaaatgtagagaaagcaaaacaatggtaagaagacagtgaaaaatcacagcagccaattgaaaattcaacataggaatcaaataatgcagaccttgtgggcatctgtatcatgtactttatcatatgtagattcaaacccctgggaccgcaggagcttatatacatggcctcgtttgcttccattccagtcactgcagagagcataagacaaaagaacatatataagatcagtctcatttggaagaagaagaaaaagaaatgcgaaagaactggaaaatgcccacaattatctcatatcttgtaacctttcacactatttgtgaatgagaacaaggaaatccgtagcctacatagtaagacaccagaaaactttacaagccaagctggctaccagtcttcaaactgaagaatcttggttttcatcatattcatattccaatgaaaaacttaaattaattatagaatatacaatgcaagatatataaaaactcacccacaaagcatgatgggtatggaattgagctggttttccttctgataagattccaagtattgcaaaattttgtatacctgcttgaagacatgtactgtgcttaatggaggttactcgggtggctatcaacaaatctactactatgtataagaacaatacagttcaataattacaaggaaacatcaactacctgttgcaatctcactatacacaaactagaatcgtgaggaaataacaagtgggtgttcacaactagaatttctctttcaaaattggctctttggttttgccaaagaggaacatttaactgaaggtgtaacaattgagcaacacgatccccaaagtcattaaacagcagctctcggtggtgtagaacactaaagtagtccttgtgcacagcagtcagcagacctgtacgtcacacatacaatacaatgtctctcagaaagatcactaactgatgattacacttgctttacttaagcctgtaacctgtttttcttatcagcttgaaaaaagaaacaacaaaaacctatgtattaactactagaccagtctaaagagagcaaaacacaaaaacaattatattgaagagaatgcatgaaagaaacaagcaaagacaaagttcatgttcaggtgtaaacatgatcaaaaaatcacgcaatggaatgacaacggagtaaccaaaagggactagattccataaatcacataatcaataaatgaagctcaatgatcaatcagaagaatgtaccatcaccacggttgttggttcgtccaagcttgaaggttgtgtagcctgcatcatgaagtctctccgagtacatacgcacaagctcttcattcccaacccagaattcctatttccacagtaaagaacccagttagcaaaatacacataaaaacaaccatgcccaagaccttagtagagtagagtccatttatttatttactaatattaaaatcgtctcgctgaatcttacaaccatcgagagaccaaaaaagaaaagtatgaatctaacaaagctattgagcaagcaaaagggtacataaaaatcacctgtaaacatataatggaagacgcctcgtaaagcagccaatccaaaatcctctggttcctatccagccagaacgctttaaattcactctctcgaaggccttgattctgtttcactcacacccatgaaatagctaagaaaaagaaaaacaattagctgaaaaaagaaaactcaaagagtggtaccaaaattcgcgaagaaaaataccagagggtcaagccttttgtaaatgggagccagaatattaaaagtagtgcatgatactaagcaaggcaatgcctcttgttccgtctcacgagtctcagtctcaatctccggcaccgacggaaaactggttgctggtagtcgtgaatgtgaatccatatcgtgatttgtcacagccacctgaatagtgaatacccataaacgacgttaaaacaaagaaccgaatgaaattgaaaggaaaaacaaagatagaagaaacaaaaagcaaccattgtcgaaattccagagctggagatggttttggaaagtgagagattatggaagggaaaacagttatggaagagcgatggagtgtttttgtgtggtgagtatgtaatcgatcattaaaattaaaaattatactcacagaaattatataaaaggtattatttatttatttattaaagatatttatttatgatattattacgaaggagtgacggtgagggccttttctttcttaaggcttatattatttgtacagctggaacttctcaatccaagtggactttaaaaccaaataaattaaatgcataaaattaatatttattttttatgggattaatttaataagttttcacccgttataattataatcaatataggtatcacgtattaatacaaaaaataaaaataaaaaagataggtatcacgtatttggtacaaaagtcgtttgttgcattctctgtatgtatatttaataaactttgtttatgatttctaaaaaataatagttgtttttataaattttctgaattagagaaaaaatatctttattcaatagtttgtttttgttgtagtatgtatctgatcgtaatctgaggtcagaatatgtgtggttacttgtgattggtccaaactattttgtttttacttttagtttaaatttatttaattcttaaaaaatgattattttttaaaaaatgaattcaaatcttgaagaaaaaatcaatttaaaaaatt

SEQ ID NO: 69662 - DNA, 4645 bp, Cannabis sativa
  modified_base (156)..(156): a, c, t, g, unknown or other
tagggctacctaccaaaggttagtcaacaagatgttcaaggactagattggacgtaacatgcaagtgtatgtttatggcatgctcatcaaatctaggaaggctggggccacataatggatctggatgaatgcttcaaaatcctcaaaaaatacaanatgacaatccctttaataaagtgttcttccttcagggggtgtcagagctcgggtaagtttcttggattcattattaatgctcaaggattagaacctaatacggagaaaattcaagctctactggatatgaaattgtcaacaaaggtgaaagaagtgcaaagcctggctggtcggatagtcacactaagcaaatttgtttcaaaataaatatacaagtgtgttcctttcttcaacattttctgaggtaaaagatgtttgattggatggaggaatgtgagaattctttattaagaactaaagaagcaacttgtagaaccacccatactctcaagacccctagacggagaagaataaggaatctaccttgcagtcaccaaatacattgtaagtgttgtgctaataagagaagagaataatgttcaacatccagtctaccatatcagcaaatgactagttgaggatgagaggcaatttcccttgattgaaaaattaacttactatttgatcctagccacaagaaagttaaggccctacttccaagctcatctagtttgggtatacactgaccaacattcacgccaagttttgctaaaaccagatgcatctggacggctgctcaagtgggcgatgaagttggggcagtatgaaataatctatcaaccccgcacagttgtaaaaggacaagctctggcatattttgtggctgaatgcacatgcaaggagacagaccgttcaaaagataatcctaagccagaaaaggagcaagcgaaaatacccccgccaaaaaaattatttgaattgaagtttatgtttgttgtaaggtcttatattaggataacaaagacaaccaaagattctaaggttttatactcaggtttgatatgaaaaagtatgtcaatggagaactttaagtcaaaacaagtgtaagtaatctgttatgaatgtacacagcacacctaaaagcttcatcccaaaactttaatggcatagaagcctgagcaagaaaacttaggccatgttccacaatttgtctatgttttctttccactaaccattatgctcatgggttgttggacatggatgtctgtgaatgataccaacatgttttaaaggctcagtaaaggacctatagtcacccccaatcagtttgaagaactttaatcttttttacctatttgaagctcaatttttgctttaaaatttgagaaagttttgagagcttcagatttggtttttaataggtaaatccatgtgaatctagtgtgagaatttacaaaggacatgtagtatatgtagccattatgagagactgtatgagaaggtccccataagtctgagacaacaagttgtaatggttcaaaatactcagtacaagaagccttaggaaagggcatcttatgaattttaccaagacaacatgcttgacaaatagaaatatgccttttattatttccaatagaaatgttacaagactttaacacagattgcacaactctatctgaggaatgacctaatctattatgtcacaattcaaaaatagatacaagagatttattacagttgctacaggaactaacattggaatcaaaggtgcttgtactagaagtgacaatgcaggcattttctagtttataagactagagacagattgggatgagattggtggagttgatgagacttgaaattggtttgaatcaaaagtatataggccattgaggagagtcttagtcagtattattgctttggtcacctagtccttaacataataagcaagagggtgaaactcaaagaaaaaattattgtcaagagaaaatttagaaacactaagaagattcttagtaatatctggtatgtgaaacaaatttttgagtattaaggttttatcagaatgtttagacataaagcaggcatagccagtgtgttggatttccaaatctgaaccatttcccgcatacaccattgtactcagagctactcatctaattttgcttatcagccgtgcagtgattggttactcctgaattagggtgccaatttacatctgcattttgtgatgtttgagcgacatgtgcttgaattgaggtagctccattagagggtggtaaagctcctctgaagcttttatcaaacctgtaaaagcattcaagaggcatattttccaactttgtgacatagttgacattgtggcttatttagtgttgtaggaaaccttccaccatgctgagtactatggttgcctcttccatagttgtaggaaggaaatctaactaactcgagacatgtaactcgagttagttcctctattattgtagtaattaggcgggctggaagatggatagggtgaagagtgaaacagacttttattgaatccttatcctctaaaattgcgattgtaatgagcaaggaaagcttcatatggcagttgattctctagatcaggattagtatcagcaatagcaagattggcactcagatctacctctttgtcagtcttttcaattcttgattaatttagaggcaagaaggagtgcttcgatttcagctacagaatatccctcaattcgagtagttgatgatatgatgaatgtatcatattcacttggcaatcctttaaagatcgtagcaatatgatctcgattagaaagaacatctctcaatggtgcaagcaaatcaacatgttgcttgacctttgaggagaaactcattaagagaggaggttcctttttcgaagattctgtagtttggtgcgaaattcaagtatcttggatgaaacttaaagagtgaaatttttttccagagcactccagatttgtcgagcagtgtgacacccaaccattctgataagcaagctctcagtcgtggaagaaagaagccatgacacaagcagttactcttgctctattccaaaaatatagggttctgaacagaggctgctcaatcaacatcacttaagaactaaggtggtggagcaagctcctagatgaacttctacagtggattccctcgaatggctgcttgaacttgctgcttccatagaagaaaactgtgatcattaagtttgatcgacagtgtattgttaaaatagatcgggctgttttcgatttcacgagattgatttcttcttaaaacttggaagaatccttgtggagctgtcggactagtattctcttagctgttgttgcctatatttgcatgttcgccattagaggaggataaggctctgatactatattggaactattgttcctcaccattgttgcagaaaagtcaagaatagagaaagaaagaaaaagaagaaaagaggaaagaaagagagagctagaaagaagaatctcttacattgatcaataagcaatgtacattatatacatagatcaaaagagcaaacaattaaactaaaagttgtaacaaactactaaccgaatccatacaaatcaagacaatgatagttaaagactaactatcttaacacctttcaaaagatagtctctatatcgaaaccaataccatattataaaacttgtaataattaaataataataatatgaacattttttataaaataataatataatcttaattagtaaataaattaataatgtaataatttaatcttaatgcttatcaaagtattatgaattgattatataggagtgtcattaagtaagtaattaaggaataatacaaacaagttataaggttagcaaaaattgtactaataagtactctcaaagcattgaagcaaaacgacaattattaattattggtatataatatatgaagatacaatacaataataacagttaatcaattagttgatgttaatatactaataaataattatatatattccttctcattgttaataaataagttcatcacgtcacaacttgaacaaaattcttaataattgtcttgatatacgtacatatatatataccatacaatacaagtcaacaaaaataaaatcaataaggaaattttttttttaaaaaaaaatcaaatatgtatatacaatccaaaacagtctctttcctgaaatagacgatgatatataaatacataaatatataaaaatatatgaatataaatgggtattgtgggggccggggagatgaataataatttagttgattagaattttttttttgaattttgaaatatagtaaattatattctaaattttttaagttgttaaaattactagattgatcaataacttatagttatctttgtttaattttacaactgtatcgatttttcatatattaaattgtgtcttttaaactttaataggtactactctttctgaactttcatcaacatcagatttctgttagaaaatttagacagcgtttttaaattcaacaatctcaatagtttaagaataaatttttaaaaaaaattaaaagcataatttaataaatattaaaatttaaaagaaaaatctaattaacttaataatattgatgagaagggtcccttaata

SEQ ID NO: 69663 - DNA, 5275 bp, Cannabis sativa
  modified_base (5018)..(5022): a, c, t, g, unknown or other
aaaaaaatgaaattttatataccaatataatttttttgtatggttatattacaatgtttggaattgtgaaatatcaaaattcagaagagaaactagcagccttagaattattaaccctaataagccaagtcggtctgcctgagtcaattgatacatctaatcggtcataaatcacttaatcttcttcttcttcttcttcttctttttctttttgaaagagcacttaatcttctttagtgtggaactttttatcaattacaatacagaatagtacacagacaatcatttatatataatacaacaactatagcctttttaaaaatctttcccccctttgattttctagcatagaaaaaaaattgacgtcaaaaaatatacaaaaaataaatgttcgataacaaaaacatcaatgaaaataaatgagacagctgtgcacatgaaaatgataaagaagataaacatagatcttacctaagttcacatttaattaattaactactaattataagtactaaccctgattgacatcatgtggtgttcgtagatccgagagacaaatgttgtaattttggaaggacaaaatctgggtgccaataaatatatttatatatgtatatacatgtttgtatatagaatgttttggatatccattattgtaattaagtttgaataaaaatgagatttatagaaaggataaagaaatgggtagagagactgaaggtgatgacagaagcatagagagcacaaaggagtgagatgcagcttggagttattggctttagtttttgcatattatcatctgtgctctctatcttctgtcaacagcctcaaacaatgtctcttgtttccctaatctttaatctccttcaaataattaaaagaagttctcaataatgaaactttattaataacagctccatatatatatatatttttgtaaaagagatctagggagagggagaggatattgtttgctataatagactgctctcaagtggcctctatttataggaaaggaaagatatagccagtactcactgaaaagaatggtaaaattatgtgagtgtgagaaaagagggataaaggtacttctacttatcatgtactatacaatgactttctattgtaccatcttttttctgtaaccgtttttcacgagataaaaatatctcatacatatatataggacactctcgttcatattctaacaaacacctaaacagatacgtactcaaaatccatgcataccatttcaactcacacaaaaacccattccacatttttctctttttacccacattattgtttaggacacaagatattcaagattaaaaaaaaatcataaattaaaagttggataagtcagaaataatctctcaatccacaataatctatcttattattactgttatcgccaaggacaacttttttggatatggtccatgtgaatagggattttttacaatcttctagagctagcttatattatatttattttattttttagaatggagaaagttttattataaatatatctgatatagtatcagtttataattacatggccatatacagtcatatgtgtatatatagttctatatttgctaagttgttatacttcacatcttggtgaatgctgacccacgaagatatggggccaaaactagaggatatggagcagccttcaagtggttgaaatattttcaagcggttgggtaaacatttaagccaaaatctttaattgatctataattctgtgtgtaatgtagacaaaactaattaatcaatatgtttcccagcacggttaagaaaatctagccaataaggtaacatgtcttggaatttatcatgatcaaagaaaaagacacttttgaatttattctctggccaggcaagaaccttgataaaagacacctccactacaattgaatcccagccacatatggacactattggctacacctaaaagtcttaaatagtaggcagatgcagtctaatctggggtgggccactctacattatctaatgcgtgatgttggctcaagacttacatttgagttgctctcttataaaattaacattcgtatcaaattgttttaatttcatgtaaaactgttataaatgagtatgagaaatgctaaaaggtagagtagtacgtattttttgtttgagaaaaagaatattatattaatctgaaattaaattacataatggtcatgagtaaaggttttctccaattaaatacattccaaattcactgtaaaagcaaaattaaccaacaaatagactttattattagcaaatctaaaaatatgagaaattacttgagctcctagaaaattgaataccggaagattaacatcattaaggatagcatgaaagttgtaaggtactacgctaaaatctttaatccttgaactactttgagcgaatccgtttcaataaagtcaacagatagttgaagagtgaggagcaatttaagacttcaggcaacagctaaagcttccatttctataaatttaacacattctctaatagactttgccattgcagcaagaatttcatcattagagtttaggaggagagcaccaagttcaaacacacctgaagaaaagttgactgttgtatcggtgttcagtttaaatcaacctgaaggtggagttagccatttaggtcgctggcaagttgtatgtgatgaagcaatagcagatattgatgggggtaactagacttttttgctgttgtgaaggggtagcatctttgagttgagccctcttttaatctgacaagtatgttgcagcaaaatcaagtaattttcctactagtttagccttcttaccatgaaattcattgtttctctcagtccaaatgcaccacattattgtgataaaaagttccaacaaaccagtagaaagatgcgtagaggcatgtattaaataattaaagacatttgagtttcgtgatagctacaagtcgatagccaatccctaacttttttacaccttttttgaacaagtacaccagaataaatcatttttatagtctctttgtggtttttgcaaacaggacattgggaattttgtagcaatatgtcaatgatggagaacagcagcagtaggtaatgcctcgtgaaaaactcgccaagcaaagatacaaattttacaaggcaacattagactccaaaaagttagccaccaactttcagacaaattggagctgcttggtaagttgtggtttagagcctcaaccaccagaacatcatcacttgtggaataagttcaacgagattgaaagtattctatcaatattgggttgacagaatttagcctgaagtgcacttacaacctcacgtgatacttaaatttagattactaccaagaaaaaccaaaggcttgaaatgagaatgaccagagatccaaagatctttctttctaagagcattagaacccattctaattttccatctcaaacctttttgaagtagttctttacccaaaataattgatcgctaagtcaacgagagagaatgacgaacaccagcatcaaaaaaattcccactcaagaaatatctattccttagaactctgcttagaagataattaggactttccaagagtatccatgcttgtttagctacgagagcttggttaaaatgaacgaaattgcgaaaatctataccatcatagactttagccttgcaaaaaaaattataattcttataatgaatggggtgaccagatactagagaaccccacaaaaatctagccatgagctgctcaatttggcaacacaatttaactggcaacttgaaacaattcattgcataagtaagaattgcttggactacaactttgagaagtacctctttccctccaatagaaaaaaaattatattctccaagagtttaaatgttttcatattttttcagtgataccactaaacagttgatgcttatcacgaccccaaaatgaaggaagtctcaaatattgctcatgtcaatgatgaataggcatgccaaagagatgctgaaaaaaaacttttgtctgaagctcttgtgtttggtgaaaaagatagtacacacttatctggattgatgactggtctggagcacaactacaaagatcaatacaacgatgaacaactcgtgttgaggatctagaggcacaacaaaagaagacattgtcatttacaaaaagaagatgtgaaactggtggggctgttctacaaacttataaaccttttaatgctccaataatttcttcatattgtaacaaatgaaaaaaagtcttccgagcaaattagaaagaggtaaggggataattgatcccctttcctaacaccaccttggggagatacagaaccttgtacaacaccatttaagagaaatgaataagatattgatcttaaacatcaaaggatcaataggactaaggtgctactgaaccccatcttcaacataacttgttccacaaaattccattcaacccgatcaaaagccttgctcatgtctaacttcattgcaacatatccttttaatcctctcattctatttttgagcaagcgtatgacttcaaaggcaacaagaacattatccgtaataaacctttgcgaaagaaaagcactttagaattatgatattaccatagagaggaaaggttgaagatgaagaatattagtgttggagataagtttgtataggacattgcacagacttatgggtcggaactaagttatattagttggcttatttactttcagaatgagagtgatcagagtattatgaaaaagagagggatcacaaccattattgaagacatctaagatagcagaagtaagaagagaaccaacaatattccaatattgtaaaacatcactgacattccatccaaactagggctgcaatcatcacacatatatttcaaggcttggaacacttcatctactgtgtaaggtattggaaatccatataaaatatttattatatgtgtttgactgctcattagattgatgatagttgnnnnntgcaaaaaagaatcattagtttcattaaagttcctagccattgaggagatatgctggcaaaagaattgattaattgtctcaattagtggggtattgctcaaccttttctatcaaagtttataatgcctcgtcaaatgatgtagatttgagaaaggtaaatgagtatttcacagaaaaagataaagatttagtgtttgatagagaaatattttatatgcgttgctgtgcacaaatcctaaacttggtagtttat

SEQ ID NO: 69664 - DNA, 2570 bp, Cannabis sativa
ggttatgatgttatttgcgtaatgttaatttagtacatagtaatagatttttgaataagtatagactgtatagtatattatccattgcacatgtatttctggatatttcacatttttacttgatggaactgattttgccactttccaggaggggtttgcatttgctcattgcacgacctgtaaagccccttaccacttgagagtccatgttgctgctgataggaaatggagaaccttgaaattcagattctttgtgactagagacatcatgtttatatttctgactgttcaacttgtaggtcattggttattctctcgagctgtcatttttagagtttctgataattttactaaatcccatgtttctttcacttgcaggttatagcttcattggcatatctggtgtatttgacagatggctaccaacaatcctggcttcgtcgtgcttggggttttgatagtgaggttactttctattacatttgtggtaaatctctttcctaaaccctcaagtatctacattaatcatctttaaattcttatatatgtatgcttcttatagatgatgcttgttatttatacccgcatgtacttcacatttgtattgtatttttgaagaggggagagaggaatgtactagcttgttgttgattgaactgtttatccactgactaatggtaatgtttttactagcaatgtttctcacattattgactactgtactgaatacacacaataaggacgttcatgaattatatagtattaatggggtgtttggtacatgagtgtcttaatgggaatagactttaggttccttagaagttgcaaatgggttactgataattgccctgtactgtactgtttttgtgactgttttggttttctttggttattcaggtcctgattgatgattttcgtctcttacactcttatatctagtccttgttttttgctttattcacattattatcctgttggatgcaggagctctattgtttttcgctttgcttggtttgtctgggtgcttcattacttgttacgatcggagagtgcgcaatgatttggcccagccttgcagagaattatgcctttgttgctgtcatcctgggtatgtctattctgtatttccttttggatattagctgtggttgattttaattattactctcggttcggtttatcattattattatctttcctttctcattgaaatattggattgaaaatttcgaacaagcatctacttgtttttttttctctttattctaaattcattatttaagccattggcatagctgtatgttttcactgtaagttaattatcaaatctaaagggttgtatgctttcatggtaagaaattattgatcaaatctagagagttaaatttctattcttctttgcatgagcatacgaagctatggacgaaggctagcacatctatcttttattatgtatttatttatttgagaaggaaagtagatttctattatttatgaagtaggcctgagtgggataggggtgggaagaatcaagatagattttctgctctgaaggggaagggggcactgcagacgcactttgctgtcctttggttttattgcaatttacggttgctctcaggtagaccatgataataaagatacgaagtttaggactacacctttatgcacttcctgctggcttttgctttagtccttaataatctttgcaaaattgggaattttcatgtttggataccaattcaatgagaagtccaatttttctgttgagagtgacaccaagtcccaaaagtttagttttgagctcttttaggctgtactttgtcatcttggaatctttagagagcaattcattcacttaatcaatgttggttgggactgtttttgggtaaaaccacatctttttcatctttggttgttatgccttcttatttttattttctttatttaattatttatcttttataaaaatgaatatggttaatgttttctttttttttttttttgtgaaattctgcagagtctgtgcagactgtcatttgcctggcacactttgtatgtggactgactgcaccacatgctttgagagctgtgcaagtatggcaggtgaatgtggttgcttaggaggtgctggtgaagcagggttaccattactgtttataatggcattggttgtgcttggactatttactttgattggaatattctatagtgtattggttgctacaatggtagggcaaaggatttggcagcggcattatcacatacttgcgaaaaggatgctaacaaaagtgagtgagggtgatcagtattctgtccttgttatattaggctgcaatattacatgtttctagttgccatccattaatccaacaagtgaaattcaataggttaagaatgctgctcatttattatagttgaatttgatatttagcctatttgataaattgtagtttgcatctattaccctttgacaagattgaatagctaaatagggtttatagtgctaccacaaaacgtgattaaatgctttaatgagttttgtttggtattttgagaacatttctttt

SEQ ID NO: 69665 - DNA, 1695 bp, Cannabis sativa
aaaatttccaactaaaagcactatttttctttcatttatgtacttatttaattaactttcatgcataaaccattaaaattaaggtaagaaaaagaaaactaacattatgctaacaattataaagtttagtgatttttttttctttcttttattctctaaatgcaaatgagtccttcctaaaaaattcaaacaccatcaactattcatatatgatcattctcatcaagtttttcaaaatgacaataatagtaaattaatagccaacaaaatataaatgatttctttaaaattatatatataatgagcttaaaatatagtgttatataaattataaatatatatggatataaatatttaaattaccaattatctggatgaatgactaaacgatccaaagttgaattggaattggaattgtgtatagtattttcacttaattcaacaccattttcatcacttctcatcaacaaactataagcccttttccaccattttctctttggatcaacttcttcatcaaaattatcatcatcatcttcttcttcttctctttttctttcatcttcattatgatgatgatgaccttccatgattattttttcccaagaaaatcccaatatgtgaaagtttgaaattttgatcaattttattgatgaccataaaattatttatggggggacaaagcattaaatttgggtgagtgtttatgcttttatgatttgagaccataatagacaagcttttttttaggccatggaataagaatatatttgtagagtcaaaatatatatatttgtggtgatgaaaggaatctagtacatgaaaggtttaataagatgagtgaaaaataaattagtggtgtccatttaattttactagattttataaaagatttggagtttaaagaaagaataaagagagattattttctaacttttttgtttcattaagaattaagagtaataatttgtaacgtaaatacttaagtttaatttttagttgcaaaagaatagctaagtttaattttttacggtaataatatctttgttatatttatggaactttcataggtacttgatcgtcaagtgtcaagttactatacacgtgttattagtatatttaaattaaataaaaataaaaatttaataatctggacccataggcagacctacatagagctcaggaaggcttaagcccaccctcaaatttcaaaacagaatatataaaattagaagggatagaaacaatacatgattgttagacagcataatttgtttaggtgtttgttcgttactcggtagacctagttttaaatctgattcccctcagctttatcttctatttttatttatatatataaatctacccttttgaaaaaaaaaaaaaaaactacacaacattacatacagtattcaaactacaaataatatttctgttagaaaaaacttattatattaagaaattaagtttaattatatttaatctataattaacacaagtttccacataaaaaaaaactaaaacaagaattataaaatctcatattattatatgctaaatttgtccaatttatataataattttatttgagatttaagtaaaaaatgtaagatatatttttaaaaaattattattttaaattgggtaaatacaattttggaccctgtgttttgcaaaagttacagattggaccct

SEQ ID NO: 69666 - DNA, 2561 bp, Cannabis sativa
gtgtgtgagagcaataagtgaggatgaatgctagtacataaagaaaacactggactcatattgcttaccatgttttacattttgaggaactcttttgaagctgtagtactcgcctgcagaaaagttgtcgcttccattagaactcaaaaagtcctataaacatgaaataaagcttcaagttgattcaaaaccaacttggaaagtaccaagagtattgagacaccatacactcccttcttcacatgcccttgaacatttctaatatattatgattaaaaaaacaacagatttcaacaatattacttccaaatttcatattcagcaaacagagcatggatgtaaccaatgtataaactccacacacagaattaaggaagaaaaaagaaacactaaccgaaatatgacaagacaaagccatagccagaagataccacagtccacaagtgaagtattttcaaacctgtataaatcaaagcacataaaatgcctaaattgcgtagcatagtaattgaaaacagcccatgtagccaatagccatgttaatcaaatgaaattttataaagaaaaagaaagaaggaaatgtccctggactggagcaatagctcagctacatctacagttcctcatatgcaagtttagcaataaagatttgaactttctaatataaatcctaatatcatcactacacttatactaaaccaaacacaaatagagaaaacaacctcaaaaaaatgaaaacaccacagaagaaaggaagattaaacatcaaacacataaattttactactttgaggactttcatcaaacaattggacttcaaaaatttattcaaatctcttttacatacctgtcctgagctgactacaagctaagctaaacaaactttctctggttcaaaatggcctggatttggaggtagctaagcgtggaatacagaaccggtggcggtggtggattggtcaccggagcgaggccggtccggctgtgtggtggtgaagaagaaggactagtgtcaagggctacagagagtaatttacaaatgagatttttatggaaaagcttttttatttttattttatattaaatatatttttattttttgtcaaaaaaaaatatattttaaatgaataatttacatctaataataagttaaattgtaacattggtccatcttattaaattattattttttttctttaaatatatcaatagaaaatgatatgtatataatgatttaatacttaccaaaatttattagtgtgaaaaaaattaaatttaaatatatagagttaaccttaagtatttacgctacaaattattttttttaaattaattctcacttttttaaaaataaaaaacaatttttagtgggcaaaaaatatttttaattatgtattttgcaagagtcattacaattttttttttttgttaaattgataatttaaattttgtatttttttaaataataccatgagtaagttattttttttttttaatacaactaacttgaagttaatttttataacacttcaagtaaaattattattattatgtttgatgttgacaaaagttaatcacaaaatattattttgtgctatttttaaaaatacaataattaaattattatttaataaaataaattatctaataagcaaattttaaaaaatacaaaatataaaataatatttacccattagttaattttcttaaacaatagtatttattaataatttggtagatattgattcttccttttcaagttgtttgttccttggttttagacattaatcttagaactaatttggtaatgtatataaatacacataaatttatattaaaaaagattcctagacaccgtacataaaatcataagtacacattattttaattttatttttagtgtgttaaattattttaaatttattttttaaaaatttaatgaataaatatattcaaataatccaaataataaaaacatacaaaaaataaaataaaatatacctcaatacacctatgggaggaaaccagccacccatatgccccaaatgttggtaaaaaaagaatatttgttgtattttttttctttctcaaattgttattgaaattgattgttaagtatttatgcaatatgttatacactctaaaagaattcattgtttgggttgattatttctaattataagtgtctattttcttctttaaacaatgtttttattgtctctgttaaatgatctgtaaataaaatagttaagtatttgacttgagctgcatttttttttaaggtcattagttcaataaggagtttatctcaagtgattttcatgctattttattagtgaatttacaaatttaataatacaacaaattttcagtcaaaaaaaaattgtaatttgcccccctaattttctaaaattttattgctcatcaaattataagaaaataattaaaaaaaataataaaaaattaatatcgcaacaactataaataaattataaaacaatcttatgacaattatattacaactataaataaattaagaaaattttacaatgcaccccctt

SEQ ID NO: 69667 - DNA, 3327 bp, Cannabis sativa
taactattgttttttgaggtgggagtgggactaaaattctccttaacttttcaaaattaaaataggtgttcatgtgtgtacttaaagcataatatctcattagtgtacatatgattatattgagtatataccaatttatattttagtataaataggcaatggtcgagctagatcgaaatttagcgaggagccaatacatgtaaaattatataaaattattttattttattttttttaattattttttacatataattttaaaaaaattaaaaatatttgggagatggggccatggcacccttcgggcctcctagctccgtcactataaatagggttgaccgagcaaaaaaaattaggacttttattataagaataaatgatatttttaaaaattattaaaaaataaataatatttttttatctatatccctatgatggataggctctaagcgcaggtctagcccgccttaacttagaaccagaatataaatatataaaattaagatattcactcaatttctcaatattaaaaagaaaaaaagaaagaaagagagagagctagtttagtaggatcaaaagtattgactacccaatacctagacttattatagatcaataaatgagtactcaataatgttctttccctaaacacattggatctgatgttgggagtatatttttgtttattttatgttattatttattttctgtcattaaatattctatcaaagttaatatttaagggttatattttttagggttattaaatatagacctagggttgtttgtatagacttgcattcatgggagagattttacatggccaagaaaaaaaaaatcacagatagaacaagagaaatttattataatgggtctttgaaagcaatcaaaaattaggtggtcccaaagagaaaatttggggcatccaatgaacaatataatatatatttatatataggtgaacttgaactaacttcaaggttaggctattatgcatataaatatagaaatggaatactacctatttctttttttcttttgaaaaatttcctttataaagtcataaaataatgaggcaattaataataaattgacatccaactctctttttgagagattgattttatggtgtatatatattatggtaaatgcaacttcaaaagatgagtgtgatgtgagaatagtaatagtaacttttcataagcaatggctttaataaattaaatcatgtgagtgagtgagtgatagtgaatccttctttcttattttcacttgaaaaatgtaccattccaattcccaagagctcaaagttaaaagaaaaattccctcctaagataaattatatatggatacatattcataaaaacctttgtctccttttgtcttaaatcctctccttttttttatatgttgtaattttatgaatgttagtagaacttgtaactatgtagcccataatgtggttaagtaggcgtttacccactagatgtatggatcttttccggtctcctctttcccgggaaacctgttttgtaatgaccgggaggtctaactactttatcttattaattgaatgatgacgctggttttcaaaaaaaaaaaaaaaccctaaagtattcatggttaccactttataagtgaaaaaataataataaattgaatcttttatttaaaaaaattatacaatataggaccctgagtttaatttttgataattttttgttaatataacacactcatatacaaacatctaacacaaataaatatcgaaaatgtatctaattttatcataataactctaaattgagatattattaatttttattttgacaaaaaaatcaattcatgtattattttgtatcattttaaaaaatacagagttcaatttatcatttaacaaaatagagaatccaatcagtaattttttcaaaatacaaagttcaaaataatattttccccctaatattttgtcctcaatataataagggaccaaaatcctagtttcacaacaaatatttcttttagaaaaagaacaataatttaaattctacattaatgaatgtaagtttcacataatacccaaagtaacattttaacaatctcattttaaaaaataaataaaataaattgttatgatttatatttgggtgtgaagtgaaagtggtttgagttcatgaaaagcataaagaatgatgaatacaactactaacctctcttttttttcacccactatctcatacatatatacagccagcctttttgagctggaagttacacaaaactgtcacactaaaaaaataaaaagaaaaaaaaaagtttgctcctcattcatacaacacaaaagtttcttttttttttttttatggaccataaaataaaattaataaaaaaaaaaataacctcaaaaagtaaattgataaattaatcttgacaagaaaaaataaaatttgtagtataaatagttaaatttaacttcttgttgtaattaaatacctaagttaactttttgacgataataatacctaagttataattttaaaacttttgtgctaatagttatccttaaacttcaatgaatgaatgaagctatgatcgtactcgaatagaggtgattgtcttcctctgatgtctctaagctggccataatagaataaataggcgaaggagtctattctcgcttatcgatagttctgactgatctctttattgtatcctcttatatatatattaactcaggggaggtagagacttatattttgactcattattaggttacacattcccatttatcgattttaaggttagggtgacacgttggttaagtgttaagtaaattgtcacgtggtagtccttgattagtctaggttattaaaattttattttatttaaaaattaatttaaatataccaataaaaaaatgataagtggataataatttgacattaacggccaagtacttacgaaatttttagaaaaataatttaagtattattacaattaaaaattaaacttaaatatttatctgtaatcgaaagttacacttaaatatttacacagtaaaatactaaaaaaaattgtacaatagtgcttctttttcttttctttttttcttttaacaaaacaatggtgcttggtttggttgcatgcttctatgaaataatgattgggtttttcttttctttttttggttgtgggccaattttcaagtgttggggggaccatataagaatgtgatgtgctctaagatgatttcaagaatgggattttaactctacttcttttatgctttttttgtttttttttttttttttgaggtttttttttttt

SEQ ID NO: 69668 - DNA, 1944 bp, Cannabis sativa
taaaaactggaaaatcatcatataaaagaacatttttctataaaaaccaatttacccagaaaacaagtaagaaggttttcttcgtgtctgggatcttagaggcttggcctatcttctcatcttgaaacccagaaacggggctgggactaatgggtattgtttctcctcaaactgagttgtattggctgtgaaaatcatcgaccccagaagcagcccaaagcccttgaatgaactcgtccttcatctcatcagggacaaaaggcgttctaccaacgaccaagattggggccaactgagcttagttgagctgagtgaagtaaactgtgtatgagaattgaaaagaagaagaagaatatagtgtgttgagtggccttgtaattgtaaatagttcatgaaaacgaatagaacaatgttccaatgcttaaaccagaaagcatcgcctcacttttgcaccgttgctccattgttaagctactacgaggtggtctttctctccatgctgctgtatttaagacgggtttggagtctgatgttttcatctctaataatgttctaaatatgtatgcaaagtgtggtgacatttcctctgcacgccaactgttcgacgaaatgtcccataaaaacattgtttcttggtcagcgttaatctctggctatgagcaagctggggagtgtctgctggcacttcacctgttttctgagattgggttttctcctaacgaatatgtatattccagtgccatcagtgcttgtgccaaactcatgtcattatcacagggtcaactaattcatgctcaagctctcaaagttggctatgcatctgtttcatttgtttctaattcacttatctcaatgtacatgagatgttgtagctttaatgatgcattgttagtccatgaatgtgcaccggatccaaatttggtgtcttacaatgctttaataaatggatttctgaaaaacgaacaacctggaaaagggttcgaagtgttcagattaattcaacaacgaggtattgttccagatagtttttctttcacaggagcattggagatttgtgtagtgttggacagtttacaggcgggaatctcgttgcactgtcaaacaattaagcttaatctcgactccaacaatctcgttgggaacgtgattgtcgcaacttactcaaggttcaatctggtagaagaagctgagaaggtctttagagtaatagaagagaaggatgtggtttcatggaacacacttctcattgcatgtgttcattgtgctgatcatgctaaagggttaagagttttcaaacagatgaatggtttaaggccggataacttcactttcacgagtctccttgcagcgtgtgctgggcttgcttcaattaaacatgggaagcaaattcatgctcacttaacaaggacaaggccgtatcaagatgttggagttggaaatgccttagttagtatgtacgctaaatgtggttccatcgagtatgcgtacaaagtatttgaaaggatggccagtcataatcttctttcatggaatactgtaattgtcgggtttgcgattcacgggcttggacaaagagctgtagaagtctttgagcaaatgaaaaaaattggtgaaaaaccagactctgtaacatttgttggacttttaatggcttgcagccatggaggactggtggatttgggaatatcaatctttaaaactatggaggggacttatgggattaaacctgatgtagaacatttctcatgccaaattgatatgttgggacgagcggggagattggtcgaggcagaagagtatgtgagaaaatctcccttcaagcatgatcaagttgttctaggaagcttactttcagcttgtcggctacatggcgatgttgctgttggagaatatgtagcgagacacctcctaaatctcgagtctgttagtacatcgtgttatgtt

SEQ ID NO: 69669 - DNA, 1214 bp, Cannabis sativa
tggagatgctcttaactggatgtggattttgattctacaagttgcttttggaaaggttttcgctgttgattggagtccggatggtgagaaggtagcttctggtggtaaggatagaatgcttaagttatggatgggatgagtcaaaaccagataccgttgttcttccatttcgaagtgttgttattaattgttttggctatcgaggcagcaaggatcacactatgtagaaagaaggaagtatatctgagctggcgtcttcactctcagaaggaaaaactagttcatctaaagaagagattgagagcttgctcacgttggaagtttctcttgttctttttttacactgaaattaagatttcactttcagttttgttgaaaatatcaatataattctagccccagtatatttgaacaaattcaattctcttaaagaaagaagttacacatttttgtttgaaaactttactaaattttggtaaatattagattttgatatttgtttcagatttatatgcctcttggcactcatatattaattgataaaacgaccaggaatagataattccacaactgtgatactcaacttgtgccaacccaacattataattgttgttgttttattttttgaaaagaaaattaaaaaaaaaataagagaacttccattaaagttaacgaatatcatacgaacaaattcctcagtacaatatttcagagaaaaaaagtagatccgtagtacaataagtttggaacatcattaacccttttggctgagttacccaattataattagtagaggctggaagatcagttctaaaagtgccttttctaaaatattctcttttctccttgaaaaaatatataaatataaatattttaaaatatgctcttttccacctaataaatttataaatatagaacttggttgtagtttaaatgaagaaccagtccatgaaagcgattcataatggctatctaaaatatcggtctcaggacttaaaatatgaattattaaacatgagaaagagtatacctctatagtgacaacagttctcctaatccactacaactcatcttaatgaacatcacttaaatacggatgaaaaaaaaccgcaaggcagttattcttattttttgctgaaaaataaaaatgaaggcaagagtttcgtagataagatactaccatcagtttttctaattctttttttaaaatacct

SEQ ID NO: 69670 - DNA, 2169 bp, Cannabis sativa
atttctttttatatctctaattataattgtgaccatcgacaatttgtagttccataaagtttcattttggctcttccaaacatgataaacactagcacttatatatatcacacgagtaaaggcttcttctaataccacttccaagttgaacagtttctttgattcttactgtctcaatcatcagttgtattcttccaattctaatttttctatgtgcatggcacaataagcttggccaccctactgctagaattgtaaaattaaatctgagttcttgcaataatataccagtatcaaataaaatagatcaattcaaatttttgttcagtttgttgtgttgtcttggtaaacatcacaagttacctttttttatttttctacaacaacgtttcatgagccattacaacttttacattgtgatctatgaggaactccacccattaactctacaaatggttatagatattatatatgttttgtggatgcctattctaggtacaccgagatttgcatgctaagaaccacagatgaagcattgcctacatttataaagttcaaaactcaaattgagcaacaattaggtttcaaaatcaaaactttacaatatgattggggaggagaatttagagcctttacaaatgcacttgaacagtgtggtattatccacaaattagcatgtcctcacacacatgaataaaatgaggtggttgaaaggaaacataggcatatagttgagacaggtagccaaagcatccctactcttgttcttttgggatgaagcctacatatatgcaaagtatctcatcaatagaatgcctactaaaacaatacaaaacatttcttctcttgagaaattgtttcacaccaccagattacactaccttaaaagttttttgttgcttatgctaccctaatctaagaccctatagcagaaacaaacttcaatataggtccattccttgtgtttttcttaggtatagtatgggtttcaaatgcatgtctaaggataaaaggctatatatttctagggatattgtgtttcatgaactcagttttccttatgctgagtctcttcatcataaagactctattattcttccttccctctcttcaggcgtgccacctttgtcatctgtgcttccagcatgtgtctcaacctaaagtacccatatttcctctaactgaacctactactcatgagtcacagtccttgttaaataattcttccaactcaagtggtagttcatcttctccatctaatctagtcaatattccagttttgtacaaaaccaatttaccaaaactcacagcaacatcatatgttcatatcactgttgccccaattactactaatgctgttattttagatgcagttgttacacatacttcccatgctgcaacagaactacgagtaacttccactagtcaggccatctctattcatccaatgactacaagactcaaagcatgaattagaaaaccaaaggctttctttgaatcatgagtttcatgctctaatcagaaacaaaacttgggtcttggtcaaactctctcctaatagaacacccattggctgcaaatgggttcttagagtgaaatacaatggtgatggctcagttgacagattcaaagcaaggcttgttgctaagggatttcatcagcaaattggttttgactactctgaaatattcaatctagtagtcaaatctataacaattcgaattgtgcttaccatttgcatacaaaatctagatcctctaaagactttaagataatgattttctcctttatttgactctcaagttccaatagttgcattattgcagaagaataaaaaatagctaaatatgtgattatgtgcattccaagcacatattcaaatgtttgaatttgaatttctattggtgattttctcaaaaaaaaaaaaaaaaagacattctattggagattgtgcctttccaattgaataagaaacatacccgtatccatcaaaaacaacttttactgattacttttatcagcttccatatcaagaatttagctggatcgtcctcgtcaatttcaatctcatcatgcagaacaatctaggtaagggaaaaagaaacataaccattagaagttacaatatttataacaaaccaaatcttccaactaaattatagaaaaaaa

SEQ ID NO: 69671 - DNA, 4170 bp, Cannabis sativa
agagagagagagagagaggggtagaatgaggttttaagaaaaaatgacatattcgatctaccaatattgaatagtataggcttacaaaaaaaaaatttgtctaataaatgcataagtaatcaaattttctcttcttttataggtccacaaaaataagaaaaaaatacaaataaattgtcttctaccgtttattatgatctaacagtaaaaattaacttttattggtggagattaatttttggtgcccggtgggtgtctcgctgcgagttatttgaagtctattttcgtaattcgggataaatttagaggacaatagcttcaaaattatatttgaatgtgtgagacataaattaatagaacgtttaaataacttctaaatacaagttgtatcacattaaatgttaatcgtataaaaattgattgagttggcatgagcaacaacgctgtcttttattttagactacaacgctcagtcttaattcttatgcattcataaactctcttcatttcaaattcacattatgacataagtaaccagaaaacaaaatagcattcaatataaaaaataaatgttgtgctaatatgtttatctcactattatcacgatataacttttgacctcataatatatttgtatatgaattatatccacatgtataactaaacaagtcaaagaaatgaatttagaatcgatgtgattatatggggaccattcggacaaaatattaaaacaataatatataaatataattatatatttattatttaggaggagtggacacctattttattctacataattaatttttattttaattctttatatacactaagaaaagaaagaaaaaaataaaatagcataagcaagagccccatattattcttcattggatcagccactaggaccatcaaacatttaagaaataaatattttcaaataaattacaaaatttataattaatattaatattctaaacgtgtctttcgcatgtcaaaaaaagttattcatcttctatattttgcattgaagtactgtagtagttatgaaaactaaaagtgtaagaatatttgaaaattaaagaaaacgatattagatattatagttaaaatgtgcataatattttctatcgtaatatataattatattcatacatatgttaaaaattaattatttacacaattagtatggtttgaaataagaaaaaaaacaaacaatgatttaatatctctatcgagtaagtctttaattttttaaatttccacttttttgttttatatatataataaagatgatacaccatcatataagatttgattatacactaacaccatcgtatataacattgattaattatctcttaagatgatgcagtgatacctaataaattaaaaacaaatcaactatacttgaaaccaactgttcctttaaaaaattttacattaaattttgtgttgacttttattatgaagggccactatactaagaaatagactagtacttacctgaaaagaatattacacaatataaatgaatattaaaaatattacaatatatatgaaacactttctttaatagattacttattgtttattaaataaatttaaatataaatattaattttaaaaatatataacaattaaatttgattcgattgtaaataataaaaaaaaattgaattatatatacttcatttcactatttaattaaaaaaaatatcaaaaaaatatctcttttacattatatatgttaaaaatattttttatatatcatactcaactttttttatatttttttgcggaatttaatttttttcaaaatcgatgttattcgtgtttctcaacgagtaacacatggcataaaaaggaagagataatctcgtaatttccctaattgaaatccccataatagtctagtcatggagaagcttcacgaaactaagaacagtcaagaccaagagataagtggaagtctacctcgcctcatctttgcttctcgaatgcaggccaatcacagacactgaccgcccaagagtattgcgaacgtctacctttagaataacctggatcgcccagcgacggttatacttttttttgacgcaggatcgaatcttgtcccctgtctataggcattgtagtgcgtgtacctcatccacctttttgccagactgttattctatgcctctacttttaaaggttaaaccttttggtgacacgtgtctacccagtacgatggtccccagctgctgcatgcacgagcacaattatttttaaggggccctatggtcagctctttttgcatgcaatgtaccccattagtgagcctttcgcaaaaaaacgtaggtgggtcatgggcatgttcataccttccacacgacctatatatacccttctacttccatacgaaggggcgatcacaacctaaatagccgaagctcttccaatattgctctaattcttcttcaagagagagaaactaagagtacagagttaagatttcttgcaaaatactgtaaactcatcaaataccctcttacaggctaatagatttactcgtggactaaggttaattaatacgtgaatcacgtaaaaatctccatcttattaatttttgtattttgttatttatttagctcctaaatatttagtttttgaaaacttcagtaaacattttggtactttcatttagagctgaagaaagacctaaacctatagtgttgctgtaaccatggtgtttacgagaaaaactgttaccaagaagaaccctccttacggaactgacgctgtcatcgaggatgtaaatcctttgtctttaggcctcgcccacccgagcaatgtggaaaaaggggatacatcgaactcagacaatcgagaggctaaccttgacaaacaggacgacagtttcaatgaagaccgggatgttaggaggaggacgacgatggagaatactcaaagatgaatactacaaagatggctaccactatgagcaggaccctgaagtgattcgagtgtcgaaagagttattggagactcagcaaaggctaacccatcaagagaagttttctcaaaaaatggaaagaatgatggctcgccttcgaagtaagttccaagacctagatgagggagattaagacaaagaaccctcagtggaatgtgttggaggaaacaacagggaaaaccccaataatgctggaaccattgctcctactcaggacaggtgttacgaattttgtaaatagtacgtaagtgcacgtaatcaagtagtaagctcacacaggtgaggtcgaaccacaagaaattggactgagtaccactagattaaatctatgtttctatttggcaaatcaatatttttcaagttcaataatcgaataaaaattcaagaagctgaaacagacaataaaaattaatcagaaatgagaagataggaaagagaatcctgttgataggtttacccaattgttaatgcctaattactattccagttcttattgtgaatgacagattgttctaattaacctagctgttttcaaatcttctaggttctaaatctcatgcattttaattaatctcttaattagaattgcataaaatttgcattaagcagtaatctaaaaagtcacaaaagtcatgtaaatacctttgttctacaaaaacttaggttatccaaattttagcattctcaattctcactttttaaatttcgaattgagatcatagacatgcaaaaggtgatcaaattttaacatgaaaataacacaaataaggataatacacaatcaaaatgaacaggaatggcaattaacattaactagggcaaactttaacaaacattcatcatcttccctaaatggaagattagctcatgttcaagtccataaccgttcctaaaacagaattcaacataaagaaattaaaaaggaagagagaaagaaactgttggtggaatgactctagatcttcactttgctcctctagtcgctcttcactgcgttttaggtctcaaaatcgcttcccttcatttccaatcgcagttttctttttatttctcatttttagggttcaaaagacgaaattaccctcgcttgtacgggctctcgctgcggccatggcttcctccgccgcggcgagtgatgccgtggccacggcggtgaaacctctcgccgcggctac

SEQ ID NO: 69672 - DNA, 5021 bp, Cannabis sativa
  modified_base (4759)..(4760): a, c, t, g, unknown or other
ttgacacgacccttcaaatcagcagctaatttatccgccactctagagctaccggtaaagagggtcattcgtggattagcctgttaagcaatacaagtaaaagacaatcttttatgggcaacatcatttctaaacatacagtattaagtgataaattgtggtcaacatctttgagcaattcttgtttatcaaaaaatgtgaacaaagcttaataacacatttggagccatttcaacgcaagtacacattaaagataaaatggaaagaatacagcttcatatcaactattacaaacaagaagaaagaaccaaacaactacccgaggcatcactatctttcaacctacatgattatcctagacactattgcagctacttataaaagtcacatgcatttgaaggaagaggtcaggataatgtaacagaaaaatatgaagctaaagtttgatgagaggaaaggaatatgacaaagtccaacttccatacgagatcagtccttcactggacttgtcgcgggcaaatcccaggaagagaacaagcaaggacaataaagtaaaaaagggattcaagacatcagtggatgtacaaatatttttgaccaggaaccggacctatcacaagaatattttttttagtggggcgatagctctgaaaagacagatttccttaaataaaattactacacatgtaaatttttcttagaattttatgcaaaagcaaagcaagaaacaataatgattcatcatatttcctatttaaccaacctccaacaacagcttgttcattgtctttccatcagaatttatgaagtccacatcgccctctggcaatccacagtaatgcagaagcctcaacatttggtccatgacaatgctcacctacataatatggaatatggttacacaacttacacttaaacaggagaataacataagaaacacagaacagaattgatcaaatgtttaatgaaggtttaccaaaaaacgataactccaaagccaagaaacattattacattaaaaaaaaataatatatatcaaaatttactctaagaacatgtttaaatgcatgaatcatctaccccaacccatcccttttctccaaaaaatgtagtaaatcccaagccttagatgtgttcactcacactaatttaatatttatgatcaacccaaaacaggatgccaatagactatagtataaaccttcagcatacttaggttcatacaatgatataccttgctatcaactttgagaaggggcttgttgcccatataaagtgcacccatcaactgaagtacaggtatttctagtggaaaattgaatggagtaataagggcaacctgcaaataaattctttatattaaacaaattgcctaaagacataaaattatataataaaagaattacaagacaaacactcaaaacatgcaaaatatagatacataatagatacatcgtagtcttgtgattaattattattaaagaccatccattaagatatgcatattattccaaatgtaatagataaagtttgtcctaatggaatggcttacaggaccgtaaggccaacgaaatccatgactctgctgtccaagatgatttccgggcactgcaaaagatcttgctagaaaacgaacctgcaggatcaataggaggtgaataaaattaaagattgaaaaccaactggacagaccgtcgaaaaaagtaataaaatctacttgattcaatataatgacatatttattctccgaccacacatcaccctgagactccattatagcagaaactaagaaacccgagctcatttaaatgagataaagacccattaaaaaattgtgaaattcagtttatctaatttcaataaatgcaaagtaacaagattgttttcttttctttacttctcctaatatatagaaagtaaaggatcaatttgtttataatttatacctgatcaccagaaaaattttctagaaatttttgggtcacataaacttccccaaaagcttgctggtaactctttggagaaaccctttgtattaaccttgtgaagaaatcagaaacctgaatgtaagaaacaaaggagttaatgcaaattttgaatactgttaatctccattacaattagctgcactggttaagaagggtagggaaagaaagtttctcatatgtttttagacatattaccttcggcagggaaagcatgtgagctgcctttgccgatatatctccatacataagatacctgtgaaaatattgttgttatattagcttaaataacacactttaacttcctaactaaaagtttattctttgggaattagaaaacaactatgtaaaatacatatataagatgtagaagaaaataaaacacaaacctttccggatctttgaacggattgtgtagcccatgttttggacacttagacaagctctcaacaaatggctagcaaagtaatccaataatcagaaataatttctaagatgcaaatacaatttcacataaatgttgatctttaatctaagcattttcacaaaaaacaaaggatcgaaagaagatataatataaaaaggcaaacaaaagaaacgccagatgccatgtgccatgtgccttactgagcgaaaaagtgtaatccaaataatcagcttcagctaaaatattacagaactaaacactatcatacactacatggtatacctgaattcctttttcatcaatctcagcaactttaataaaaggttccccatttaaaggatccacaattgtattccaacttggagaacctgtccatttaccctgcactaaaaacaaaaataaaatatcttctacatgatttcttttgttgtttgtactactttaagattcatgcatcaaacagaattcagcagcacaaatattagaatctaaacagaaaagattagaaagtaattccaatgtatgcacttaacaagtcctgtaaaaaaaaagttccaaactttagtatacaatttagtcctgtctaacatcaatttcaaagccaagttacaaggtgaccatttactaggagacgcgacattatgaaagtgaatcaagttcaacgatgaatgttcatacattgctgaaaccttacccaagttgtgtacttcggcgggttgtgaacctgaaatctcttcaacttctaaggttgcaaagggcatagaatgaactgatctgccattagacatggggcaaaaaatcacatctcgtaaggaatttaaattagcggcacatttatcagcatagcatcaggttagacgtccctcatattagaacagagaaatcacttaaactaattaagcaacaaaactttcaattacattgaactcataacattgttatctgatctgaatcatctggtcagtatgagaaaatgctaaaggaccagaatcaaagatcatgattaacataactccgtctgaaatagcattagtatccaaaacttgttatgctccataacttgattcagaatggggaggaagagtgacaaaattaaacaaaaaaaaaaaacacaattcgaagaattcccgaaacctttgtttctgtgttcatagaataacaattcaaaacaaaaccattttcaatcacgggaattgaaaagcaaaacaaaaagacagccactttgcatctgttcaaaaagggaaaccagtatcataccttgagatactaaaagaaccaaacaagcttgaaaccctatgaggagctcttgacgctattttcccacaagctagaagcttattcatggtgattaccaaccaagcaaaacccacaaaccaattagtcagaatcgaaagggtgatgattctttctagcccttctgataatatatatctatatatctctctcactcctcactttatataatattatatttgtgtgtaagcttaagcatttataaacgaaatcactcactttcccaatatctcattactcccaaatcaagaaactatcatcgtaccttttcaaggaagacctttttgttcaaaatatattaaaatattctaattttttttttcctaaagtataatattctaattgatacttatcgggtcaccattaaattgcttggtaacacgtgttggaagaagagaatagcaaatgaataaaacaagtctcttctcttcctattctctgtttatgtagttgtacgatgtatataattattataagtaatatagttttaataatggatgactctgcattttgtcacattgctttctttggagaaacaaaacacgcaaacatgactcatttcatagtgggcaaggatgataatgataagttaaaaaatacattttataggttggtgctagtgctgagcgttttttcattttttttatattaaattaatctaattataaatatagaatttattttttttaattaccccatatactattttttttaattttttcttttaaattacaatttaagtttctaaagtggttgcagcgctagttgtaataggaatttatgtactattttttgttataatttaagttacagcgctagttatgtagaattccgtaaaaatgcaaaaaaaaaatattttaaagtgtaaaaatgaaaggaaaatttgacattatatgcttaaaaatagcatatggtatttttatatgctaccttaaacaaattaaaagtaataccctccaaacatccttaatcccaacaataccctccctatttcaaactccactctctctctctctctctctctctctccctctccctccctctctctctctcnntctctctctcaatctctctctctctctctctccaatcggactgaaaccgaaggccacaccactcagtagctgcctctctcctttcttctctctctctgaccaccgatcagtggtagctccggcgactaaatcccttctcgaccactgccttttgccttctctacaagttttgccaccaccaccaccatcaccttagtttacagcaactgaagtttacatcaactgaagaggatcaacaacagtgtgttatgccttcaaaaa

SEQ ID NO: 69673 - DNA, 4054 bp, Cannabis sativa
aatttgagagctagcataaataattaatacaaggacttactcagggtcaagataaccaggagtgccggcaatacttgttgatataccaggagtggtgctagttccactttcgagaggaaaaatcttggatagaccaaaatcacctaatttggcttccaacttttcgttcaacagtatgttactcgacttaatatctcgatgaactattggtggtttacacccattgtgtaggtactccaaacctgtacattattaatatattaacacatatgtatgtacagaaaaaaaaaataaataagcatatgacaaattaaaggcctgaaatatttggaaagggacaattgagaagaaaaattattatatagtactaataccttgtgctgcatctcttgctattcgaagtctttcttcccaagtcaagacgttttgattattattacctacaacatatttgttaaccatgcaagttataaagaaaatcgacatctatccattctattctaggttgttttgatatatacacaaaccaaatgtttttaatattacctataaataggaacttcctatatataatttgatatgaaatgattaaaactttatttaaactttcaaacctgaaagatgtgttcgtaagtttcccatagccatgtactcgtagaggagtccaatgttggatccctcattgcaatatccaactagtgtggtcaagtttttgtgatgaactctcaaaagtagttttagctgtaaaaaaaatatcagatatataggaaatctctgtttaaattaaataagatctctctctatatatatagtgaagagtaatatttgacatgcctctgcgtgaaattgacgatgcccttgaatggatagtttagaaagcatcttaacggctacactattcccatttaaggagccataataaacctttccaaatccaccttcacctattaccctctcaaagttgttggttattccttcaatctcagacaatgtaaattgctgttttttgcttgtaaatgttccatctacatcattgaattcgtcctttacgtcatcaacttctacagatatataatcatatatgacctgattagaaaattagcgtaaaagatacataaaatattctgtattctacaactagaattctcaccttttgtttccaatttcttttgctgcagtcttctcctttttactatccaaaagaccagtactgcagttgagatgatgaaaactaatccagcgagtgctgcaaccagtggaataacaaactttgtcttttttccacatgattctaaatcactgcattcagtagtattcctagttggatcaaccctgtttcaaggaaatgtctcaatattcttggatcttattgaggtaaatcattaaaggcaagagattttaatcagtaaacaaagaaataatgaagcaaattaaccttaatattaaaccattcttggatcttacagaaagtgcatccggaattggacctgtgaattcgtttccctgtaggtatctatgtaaaaacagagcaataagtacgatacagagcaatatgaggcaatgagtagttatgaatgaatgataccaattttggaacctaaaataactcacagttcctttaaaaatgaaagttgggctaaaaattccggaactgtcccacttaagttgttatttgataaatccctgaaattattgaatggttaatagtttaataattattctgtcaaagaacttttaataattaaacatgtctactcttggtataatacataatgaagtaaataattctatgatcttgaataaatgggatctggaaagatgacatttaaccacttacaaatgctttaacattgtcagacttgcaatggaaggagaaactgtcccacttaatccactcgacgacaattttctagattgcaatatgtctaaattattagtatatcatatccaccaaattaaaacaattcagttatatattatatgtaatataaattgaaagaggtgggtacgtacaaagaaatgattctaggctgttcattgtcactgaaactgcaattcaaaccttcccacatgtaagcttcaggggcacaaggatctccttgccaactaattttttctaatttgtacaccgatttcacactcctgatggctttcactatgcgtagatatataaatatttatataataggagacaatcaaagaatgaaagagagaaaaaataaaacaagagaaaaggaggaagttaagtcatgaataccatcattttgatttgtctcttgtcctatgagcttaatgggcacataaatgtccaaagcatttataaggggcggtagagtcgaagtgtccgtactgttaagccatatattaagatttccttgatcatctggtttactggcttttgggatgttcagtgtggtagttttcaaatactcgggagaaactgggccggaccaaaaatctccattgatgtaaatattgaactctctagattggttggctccgaggttttgtagctccgcgatgtacatgtagaataaatagtagctggattttgttaagttggtccaaattaaattaatattgttaccttcactttgggtatatgcattgctcatgacagtgaatggtagtaggtaatcgtcgtttttaatggaatcttcattgctagtggatatatttaaatttgggctccattcatctgcaaaccgtggtgaccacaagcgatcatattcatcatccttgtacctatacatgtaattggatcagaaaaagaatcaaactttatccaaccatgaaccacccaatcaaaaaggaaatatgactagctgacaggggagtgagtcacctcattatttgattggtttctgaagaaaaatctaaatgatcatatagtagtagtgatgacgatctcatagtgtcatcacctggataaatatgactatcaataggccttaactccaagaccgatatgaagggagttcctttgcctatgtttacaagacaaacatgaacataatcttgggaagggatatgtatgatttccatggttgttatagtcgaatcgttatcaataatgactgtgccccagtggtcaactccaagatgcaaatcaaaaacagggattacgccttggttatcatagtttccatacatgaaccttgctcggatcaaatatctggtactttcttcttttgtaggattcagagtataacagtttcttctcccttgagggaagcttcggacactataaaactgtctgtcaacgtttggagctttgtaagaagctaatatttccctgttttcacctgtttctgtgaactctgcgtctgaatggtaaacgaagccattttgtgtatctacgtagtttgacacgtctgctatcccacaatctacactgatgaagcctgaaaaatagcaacgtacgtatgtatatcattaattatttccaaaagaaaaagctgtagtacttagatcgaacttctggtattggaaactaagtaagtgagatatattattatctaaccatgttgatcgtgagcttgaaccagaacttgataaaataccaaagcatgttgcagtattgcaacaagaaattgcttgtggaagagcattagtaagtaatatatactcttttcctgatactagctagtctagaatattatattcttgattttagccttttatatacacgactacggtagcagaaatatttacgagaaattatcttatatactgtttttttaatatttttttaaaatttacagtttgagtgtttaaagtaattgcaataggagattatataccattttttgttaccatttaagttacaaggctagtttcaataagaatttctatataaaaatattctctaataatatttctaagtacttttaaagtagaaaaaatctcttctataaaaaaagtgcataaagaatacgttcatggcggggtatagtttaagtgaggtaataattataatatttgcttttctaaatattacaatcgggtttgattgtgtattagttttatgatttggattaatttatcgttgaat

SEQ ID NO: 69674 - DNA, 3256 bp, Cannabis sativa
attgaaacacaccggggttgattggtttgcttataagtttcacttattactattattaagtttatagtgagaaggaacaagaaatttagaagtggtgttgatcctaattattagtattgataataaaaggaattgtttttggtagtttggattttaatgctcttccttttgtatgttctcaatagagatattaccaatatggaaatattatttggccccatttgtttcaaattcaacttagaaaattatcaaacctagaatttcattgcaaaaagtcataaagacagaatggtgagggaatgttttgcattgaatagttactatacaaaagtagtagaggctcaaagagaaagtgtttgggaaaacattcaagaaactctcaatctcaatgtatcaaatgcttgataccatgtttagatcaaagttgacaataaaggtgcgaatctccattggggcgagttccacaactagttttgcaggatcaactggtcgacccctttttagcttagaatcgttgctgttttcagaggaatggccttcgactttccacaccagtctcttcttctccatatctgttctctcttggttggcagataaactcatctccgtcactttgcttatctgagaaagaaacacgaggaactcgaatagtaagaaacaaaatatcaagaacaaaaaggctggctaatgctgaggagtttcaactatgctcttctctactaaccttctttcctggaaatagcttctttagttccacattcgactttacagatagatccgcatcttctccaatctttgtatattattaacaatcgaaacaagtagccatgcgaaacatcagaagattaacaagctgaacattcaaatattatcaaagagtttttaaatagaagaacaatgagaaagtaaaaattataacctcatatagatgcgctaaccgaagaagcactttcccactttcaagttcctgtaaaatttccagaaaagcagcagtttttataaaataaaaaaggagataacagggctaatacaactactttgtaattgctacataaattcataataagcatcaaacaagaaaatgtagtccaaggtaaaatcggtacctgaagggtaattatagcaacattatcaggtaaactgtaggagggatcaatcccagaaaaagttgctctatgagaattaatactgctatcactatcctgcaaaaaataaaataataatagaaaaaagaaatgacctatgagtgaccattttagcaattaagaatacttgaaatatgaagtgtactcaaaataatgtcctttgtatttttgatttgtttcaattaatcatcacatcacctgctctgaaaaggcaaatagaagaggagaatatatctcttgcccaaaagaacgacgccacttagcaccttctccgacggggtcaattctgtaataaagttttccttgaatctgaagaaagtaaataagaatgaataaaaggagggctttatgttttgaaagtttatgacaaagaaaagtgtagcaaattactgaatcctgaattattaagaatgagaagaccatttgtcaagaaagaagaaggataaactcagaacgaatgcaggccctccagaagctataacaactaactaactccattcatttgagagaaaggataatagatataccacataacctattacctatggttcaatgttggaagaatggaatagatgctgattaaaaatcacgagtacttacgattagtcctttgcaatcatcgaggacacacactgtctcgtttagagcctcagcaacacctctggagtcatctaaaagtagtctcctgtattacaagagaaaccagaggaatttcaagtatgacattgagtttctatattaaaaagtctgtaaggaaagaattattggtttcctaagtaattatgttttgtgatggagaagctttttcgaatatcaacatacctgtggagcatcagttcgatttgtccatccaataaactggatcccccaactgagcgatctaccaaaactgaaaattcttttttatcatcttgcatgtaaattccaagattaatctgaaataataacacaaaaatatgtcatattgttttgaactgaacatttaatgaatttcaaattcatagtgctatagtgtaatgtaatatgaacagcaaaacaatgtttagagatacaagatgatcataattactatcccaaacttttcatacataagaaagtccatctaggcatactaagtatttataaaaattaaaggttgaagtttcaaaaagattatcaatagaaacagagaaaaaacatgcaaagttggtggtttttcgggaggacttaacatactggataataatttccagcaacaggttggttcactttaaggtcccaatctgctcggtagtcacgaatctgcaaaaagaaattcaaggatcaatcgtatggacataaaagaagtagatatttcactgaagtagaagaataagctaaaatacccgtttaataaaatcgcgtccattagaatcagtgtagaatgttttgttgttatccaccgtcgatgttaactgagttacaacttctttgcctgttccatcattaatgggtattggtccaacctgaagatgcatttagcgttgttatcatgagactaaagtatcgggtcaggggagaaaacaagtagataggcaaagaagtattcttacaatgtattcaacttcaacatgttctcttcccttgtgaagcctggtgatctgcatacataattgacacaacattaatgactcgaggaaactcgaagctctataccatagtaacaatagaaagatgtatggaaagtttaaaaatcatcatataataattcagaaaatagaaatagaaaagagcaaggcgaggttcgggatgatttttcaatgttttatactaggtaatctagtgtcgaagataataaattccgtcgttgtgattggactctactatggatttcagaccacattcttcatagagggcccttccttttggtgaagaattagtaccaggttatcaaaccaaatactcagggatcaaatttggtttattctacattgattcctatctcaacttattagttttttcattatttgtaaaagttctttacttaggcggttgaaattttttgagtttttttgaaataaataaaacatatggtgtttatctttattatattagctaatataggacaaacttataatgaaatatcacacatt

SEQ ID NO: 69675 - DNA, 3900 bp, Cannabis sativa
tattttattttttaaaaataatggcaacaaaattattcatgttcccaattatagggctatttttgtccttacctttcaattaataaattattatcattagaggccaaaaatctatattgtaccataatctaatggttcactaatatgttgaggtgtgcaatccctcgttgataaatgagggattacataattagccatataaatatggcctcatttaattataatggtatagttcaatctgttttgctgggatgatcagttgtctataatttaccatgccaaaacatatttaaatgaataaatcaaatgaaaatggtatataattaaatagacagaccatcattatgtcttttagcaataataagtccaaattgcatgtaaaacaaaaatacataaaatgagagccaattgtacttgatttattctactaactcatttattcactaccaacaatattgttacagtactttaaatttataggtctctcaaatcttcaggatcaatacttgtggccactattggactcctgacaacatatttaccagtttcctctacccaactcagtgagcctaaaaccacttctgctttcaacacctttggaccctccaaactcagcttgtaacttaacttatcatacttcttcttgaaaactagcttcattggctcaaccttcacttttaactctttcatggcagtaactttcacactataactagagttttcttttcccacattggtcaatgtccttctgaactccacaactttggaagtggaaccaccaattccattaaaataagcaataaaagatgggtagttgagatccgaagacagtggtccaacacaagtgtgattagactttgttatgatttgaatctgttttggtgtgtatttcattccacatagaagcttaacatagtcttctgatgttgtatcataaattagtccaggatcaattgccttgtttggttgaataaggccagaaccagtatccaaacccgggatttcgaagttgtcctcatcttgaatgggattttgggtgttgtccaatgggttggctgtggtcataagggctgatctaatggctgctgtgctccaatcaggatggactgatttgatcagggctgcaactcctgcaacatgaggtgcagccattgaagtgcctgattggatattaaagtcactgaacaaagaccttgattgaacttcagccactgagcttattggagaccaggctgccaagattgatgagccaggggccaagatatctggttttaacacatttgggcaattcagaaatggccctctagagctatagccatccacttttggagctggttttgatcccagtactgttttctgaaactctaatcttccagtgggatttttgctatttttgatgtagtttataacagtttcaccatcctttaagccaataaaagcagctctaaatgagcttctggtataaaaatcagataaggagtagttacttataaagacagctccaaacactttagcagactcggccttctcaacttgatcacttatactcaagttgtctttacatacaacaatcttgtctctaactttcttaatttgattcaaatctgcacacccatctaagaaaacaaggccaacttggtgttgagaagagtttccgggatacaatgaatcgaaattgatttgaaaaccgttccccaaagtcaatgttcctttgaaaactctatctacagtaccagctgctactgtggttatccatggtgctgcattgattactgtccctgctcttgggccaatgtttccagctgaagctgaaacaaatatgcctttctccatggctgcaaatgtggctattgccatactatcatcctccaaactataatcaccatctcctaaccccaaagagagtgacaaaacatcaacaccatctcttattgcctggtctattgctgctagaaaatcagaggtgtatacagagtttctccatatagttttatagattgccaatcgagctttaggcgctaagccactggcagtaccggctgcatagccaaagtaagacgcgccttccacataaccaccggctgcagtggaagcagtatgcgtgccatgtccatctttatctcgtggagagttcatggtgattttaaacttgggaatgttagctaaaagacccttgttgtaaaatcgagctccaataagtttcttgttgcacaaggaagagttgaattgttcacctgactcacatttccctttccatctagagggcactgctgtcattcctttgtcactgaagctcttgctctctggccaaattccagtgtcaactacaccaattatgatgccttcgccgaaagatgaagctggccataaaccagaagtggggtttaatccaagaaacttaggagtatgtgtggtgtggggtttaaggagatgatctggggtggaatgaatgtaaccaggagattttttgagtgcttcaagctcagaaggagtgagtgttacactaaatccatggatagagtttgtgtaagtgtgaatgagttttgagttgatatggagttgggaatttttctctgatatggtagaaagagtagacatgtaccaactttggtgagttgagaaggcttttggcatagctgatttgtccatgtgtacaatataggtttgtgactttgctgaaactaagtaaaagaagaagcttatggctaataagattacactcactacctccatattgagtgaactagccatggctgaactctgacttgatgatgaaacaacactagctatttatggccattaatatctcacacttctgaataagggaatgaatgaatgaatgagaggtgttttggaccataaggggaccaagccaatgggaacagaaaaattatgaatactttatcagcatgaactattccacttccccaccttgggaaaataatggtacggtaaagttaatcaatcaagtgttttatttggtcctagttcttcttttccagttatccacatagtttagtctttattctttattttgtcatgattaagttggaagtttacagtggattttggttgttcaagcatgttcatttttctgtctatttattcctcattttatgtgtgtcaaatttcatatcaataacatctgagacttgaaatttgatgtgggaatgaatgattgaccaacagacatgcattgttttggtctctttttttcttagtgatagtggaaactcattgtgtctttttgttggtggagtggctttgcatgacaccacaaattattgatcactttatatgcttaaacctatgattaaagtagctaaaacaatattgacacattatctactttcttattaatatccaaattcaaaggtgaagtaagctaatattatatggtactaataaagaaaacaaatcataaactatgattggaatttggaaacttaaaactatactttcattttaaagttatctatataccaactttgatacaagaaaacttgatgggcacatattatattagactagtttaatggtaataactaagggcttaaatctttcaaaaaagaaacaaaataaaaagtagtcagctttgaaagagctttatttagtaccaaattgtgggaaagaaagatactgatttagtgatttcattttctttatgagatatagcatttgaatgggtggaaaggaaggacctaattgaatttgattatatggagataagtagggtcctttgtttattttaatattttacataaactttattaagtttatataatagtactgatattattaaaaagaaaaacaaatagttggttcaagacttccatttcaaattcaaattttctgagatataattgttaattaaaggcctaaaactctttagatatccca

SEQ ID NO: 69676 - DNA, 2677 bp, Cannabis sativa
caattatattatatgtaataatatatataacatatcacaattttaatcttaaacattatattatataataaataatataacattccttgtgtgtggtggactgatttagaagacactggtgtgagttcaattgcaattttctcatcaactggattaagggatacaacatacgagaagtttcgaggataccctgacaggcttcaagaggtataatctaaacttattgtttttattgttttgatttaatgtatagacatctggagatcctaagaggctatggtacaatgataatcagataatacaaaactatttcgttgtgtacctaatttagtacaataaaactaacaccgctttcttagagtagcgttccagcctatagaagcctatcttctccttgtggcccctcattggatgagacttaatcttgtagaagtacaagatttcctccagtgttagtgctgctttcttatgctaagcatagaggatataccacccagataaaaggcaatgcacctgaggtatgaactgaaaggtgtcactccggctacgacacataagttggcaaagtaataccttaacggaaggtgtgcacccatctccacatgggcccagctccatatgccaaagctcccaattgcacatttgcttggcttctctccatgaacggagagcctattccatatagtcccggaacactctcaagccctcacaaggtctcgtacttcctaaggttattgtatattctaaatttatttacatactagtccatctcccatggagtatcattcaacaccagtctcagagcattctcttgctctaaaatctcctcttccaattcaacctcttcttgttggatcctcttagacacaatttctatatataaaaaaactaagcagttagctacccaaacttgctaactcaaactacctaatatagaaaggcagctagaaagtcctctcccataaacttcttagagaggtacctactagacttactatccgtaaacgaaaaccttcaggggtcattcgttccaaataggaaataaaaaacatcaagagggggaatggaaaagaaactaacaaaatacccaaaaccaaaaggattatgggcatggaaaatttttgtcagcacttttgtagcgaaataatcattcccaaaaatttataatgctaaaacctaaaagcaatgcagtccattgcgtctaatactaccaactgtatcaatcataagtccacactgatggaatggggcaagcctccaccatacgcaacattctggaagcttaaggagtaaatattatctgtgttttcgacaagagacatgtggattctaggtcagcaccaaatccctaccaatgggtcctaatgttatctgtgttacactttcaacagtcacacattcaaaaaatgaaagggaaaaacacttgttcgatcaaaattaaattataagacttctaagagttaagctcttacaaagaggtgaaagattcacaagtggaggaaccataaagcaacgacgatagtaagaagcttggcagcgtctaaggaagaggataagaaagtttgatttgcttggaaattcctctagtgtgaaagttctaaaaatttgaagcagaatgtaaagtgtgaagtttgaggacgagggggctatttatcgcccaaagtcacgatttagggcattaaatgatcctacgacgttcctcgtttctcaagaagcacattttcaatgcaatggttagggacgattcataacaagcgcatttatgaaaggacgtttgggtactcaagtatccggctgacaccctgcatttatgaccctctagggcttgatgtcaaggaagcaaatcagcatcatcaaaaccaaggtaaaaagacatgctgatgacatgccaactcctatataacacgtggcttgtgtgtacggatggaggcttttcacttgccactgacgtcatacctcacaccctctgggagcgaactaaagagtcagggaattaatgcaagtcccaccttaaagttgtttttgagctagaacttggggggtaaatgttgagcctattttttttaccaaaatacgtggtgaacatatgaagttccacgtggctgaggggccccatttgtggggatattaacattccttaaagagtgattttgcacttgaactcgttgattgtaaggcgcgtctaggagcaggtcccccatctccagaacaaagggtccacacattactttggccattcgggaggcgattaactcccaaaatagagattcttcgggacttaattgtttgcataacacgaattccaatgtggatcactgtatatttctaatttggcacaagattaacatcattactaagccaaactactctgacaatccatttacctaaacaaaataaagtgatgactatgcactgtcccgtcagccgcacatgggacaaattttatctcactaaattcctactacggaggctaggcaacacctaaagacagaagagagatgtaatgccctaacaaataggcacgttacccaagctaattaagaaaccctaatcccctaatctgggattagtagagaaataagtgcaggaaaatttaaacttttatctaaacagaatgaaaattaaacttgtaataattttaagctttacaatcaaaagttacatattttgggatccc

SEQ ID NO: 69677 - DNA, 5395 bp, Cannabis sativa
atcttttggccctcttattcttaacttctgcctctatccctgatcatgcttgtgttttgttttagtgaatagtgaatagtaacgacgaaagacaaaagcagcaaagcaatggagtccaataaggagccacaaaatgtttgataattttattttctttggttgaaatttctaatcagttgataattgtcggtgaacagttacacaatatgatatcattaatgtagctttgggtttggcttcttatgtttgcttggacaatcaacaatacaagaactctgttttgagtgtcttgttgttctggagaatatttctgtaacctgctgtggctggacattcatagagacatgttttgttttctttggttgtctctaactaactatgaattatattatgatcatctcaagcactcaccactcaccactactcggatagtccaccacaatgtctgctgctcttgttacatgggccctggccttaaccataaatgggccaatccatggttcaatccatgattaagatagctaacttttgaacgtgacaaaaataatctcattcacactttaaaataataataataataataacggaaagaactctggccccattaaaataataatatggggtaatgtaattgcatgattacatggtactgctactagtctaaaatagatattactaaaaaagcattttaccattctggtgtgtaaacatctgatgcataaattaaacgtatattactcaaagttaaaaaacagaaagaaaaagaaaaggttaatgatataatgagtggttgctttcagtggaagcagaaacaatagaaatgaggagaaaacagagtacatccagagccagcatatcaatgaagccaccttaagtccggttcaagaggtgtattatatgaaactattccaaagaaacattaagttttgtccatataaagtaataagatgacaaaccctttttaagttacgttagatggaatcagttagcttaataataactccaactctgacatgcttgcatgcagtactgacgccatgcttattcaaattaatttgacaaaaaaaaacgaaaaaatggacatagcaaattatttatttatttatttatttttgccttttattcttagtacaagaacccagaaaccataagctaatcacattaactaccagacccttaatatacggatttttcttacattaaaactctgttttgagggtccggtcaacaggagtggacagcctgaaacaggaaattgctgtgtcttaaaatgttatgtggtttccagttacagtcaataaagaatacacatccatatatggccctatatataaataaccaataataataatactgctgaacacagtgggtctccctctcccctacactatatgcccttaaggtaaatattcattcaatgtcttttactgactcacactaacactaagtgtagcaatatctaaatgttatagttatttttctttcgtagtagtactcgtacaaacgcagaagtgaattgtgatctttggtgggattttatggtgaaaaattgtgaggtgcacagaaaatttcagtgcaagttcgaagataagggaggggtctactttttttagcttcagaaaggggagcagggtttagctttagcttattatttcttcacttcatgaaaaaccagaggatacaatgatttgactggttttccatgtagaattattttggaggaatttatagtgagaggaagaaaaagagataaaaagaaaaggggtgtgtccccacacttctgtggtctctgtggtaacaatttatcaaacacctaaaagtgtcacatcaagaaatgtacagttttgcaattaaggtatagataaagtgtaataactgaggatcccacctcttctatgcatattaaagggtaacgattaatgcacgtgaatttgttggaggggagtcactagcccttctcctatcctatatttgctaccaggctttaacatattttcaggaaaattacttcaaattttatatgttttaacacttaactataaaaattaattttcctttacaaaagctaccaaattcacattatatatatttttttttaaagaaaagcgaaacttgtattacttagaacaaaccgttaaacctcacgatcattacataacatttcaagaggaatggaattaacgggaataaccctaaacttctggctagtaaaagctcaattacaattaggccacattatgagcaacaaaattacaaagcatactaatattactaaaattcgcagtatgttttgctctttacacttttatccaaaattcttagttaatgccacagtagactccctacatatacacaagagtacacatggtataattttagtagtccacgtaattttaattttaaatacaataaaaataatttataaaaataaaaaaaaataggaaactttttcttctttctctttcttctcgaaccagaaccccataacccaacttcttcttcttcttcttccttctaccattacaaccaccacaccaccagtatcccaccacaacaattgtcacacctcaactaccattattactatcattgtcccaccattatccccaccataccacaatagtcaccaccacattttcattatacctaaaatattttcaaccaccattatcaccattatcatccaccattatcaccatcagaagtattttctctaaatcaaacaaaaaaaaccaataccgagagagaaagggcaagttcatcgcccaacgtcttcaacgattgatgaccggagataaggccttgtggcccactgcctttttttgcaaagagataaatagatgagagaggagagtgagcgagagagaggccaagaggagagcacggaagcgagagagaatcggggtaggggtttttgggtcggggttttttaggtatgggagttggtcgtcgatctgagtattggggtttgggggattcgttgatggctaacagagaaggagagggagaactacgagatagagagaaagagagagattaggattcgaagaagaagaacaaaaaaagaaaaaagaaaggaaaagtaaaaaaaatattttaaatttttaaatatttatattaatttttaaatatattttttctttttttattctttacatttttaaatatttgattttttttttatttttcaaatttaaaatttttaaaattatttttatcaatatagtgtagatcactaaaaacgtgtcacgtgtactatgtacacgtagtcagtcactttgacagttaattgagacttttggacgaaaggataatgatcaaagtagaagtacaattcacgtagttttactgtcaaaaaattaatttttgtagttatgtattaaaaaaatataaaatttagatagttttgccgccaatatatatatattttaaagcagctttctttttcgctacatgtagcttagctattttaaatgggaaatttcacaatcaagacataataatacatcccttatcaaatttgactcccccttctaatttttattaaataattcctttgattacatgtacttcctatttatgtttgtcgacaatttatcgaatgaatgtcgatagattatcgacgttaatacaaaaagattaaaaacttttaaatagtaaatacgaaataagtgaaaagttttaatcataaataaagactaagaaaactttaaaactaaccactaaacaatcataacaatttaaaagtctccactgtgtgagcgatgtttgcaatacgagcacaacgatttaggtttgaccggttcgccattaaaataacctaatttgcaacgacgacattcttcgaggaaccttggtggtggatatggataagcgaaccactcatcatttttttgattgtgtaggaacctttattcattcaccaacctttcattttcaaaacatttaaaaaaatccaatatattcttgcatttttggagtaactttgtccctaggttccagtttgatctcttcactagatagaagtttctgtttgatctctttactaaacatttagaactttcatgagaagaacactgtagggttaaagaataagaaacatatgtaacttatgatgtagaaatttacttttatagagcagaatagttgttgggaaagtaggaaaaatacattagcattaaatgtccaattgtacatgtggatggcatgcaatgtgaatttatcgatattatgtcgatatgttgttgatagtttatggatagaaacaaattgaggccacactttatcgacctaatatcgatgatatgtcgacagcttgtcgactgcctcgacagttttataaagcagaatttggaaaggtaggaaaaaataattagcttaaatgtccaattatacatgtttatgtaatgcaatgtacatttatcaatattatgtcgatacattgtcgatagtttgtcgagaggcataatttttattcacaccgttgtctatatgatatcgatgatatgtcgacagtttgtcgacgatctcgtcaattttataaagtagaagtttggaaggtgggaaaaattaattaacattaaatgtccaattatacatgtgtatatcatgcaatgtgtatttatcgatattatgtcaacacgttgtcgattgtttgtcgataggaatgatacaagcttaatttgaagtcactctttatcaatatgatattgatgatatgtcgatactctgtcgatgatgccactgctcgaaatcatgacacttcttatcgatggtatatcgatgggatgttgacagattatcgatcatgttaaatttctgtcatttttagttttttataattttttcgtatttttccctaactatccttattttgtttaaatttgtaggattgactgtgttttttgttgtattgtataatggtgtttggtgtgttgagagttttaattgggtttataaagctgaaggcagtttgacgttgacagttagaactgacacaaccatacgacaattgcgcctgattttatatgaagagttcgaggttgatcctttaacgtacaatttgaaactggagatttgttccttgtacatgaagggaaaattgttctaccagaggttattaagaaagaacgccaactaataacgttcttagagatgagggcaataatgtcaaatatatattttatgccattatttgtgactaaggtgagaaaagttgggaatttggagcctaccccgcctgctaatcctctccctcaaagtgtggtagggtctttcattcctgaaaaaagatgtttggattggtgtgaatgaggaggttcctaccaatgtagatcaatagtaagaagcgacgggatttgatcagtttgaggagttcgatactcccttctacaat

SEQ ID NO: 69678 - DNA, 1138 bp, Cannabis sativa
ttgacatgtactaaattatggtcttgaactttcattcatgttagacttttttaataaaattggaaaagagtctttaaatccaacaatctcaatagttcagggggcatgtttaacgacattaaaagttcagggaacggggacaaaaatcgtaattagcctaatattaatattaatatggtggatacaagtatgtacctggagtccaaaattgctggcattgcagtggtggattccttcttcaacagagctaatcctaataactggtaaaactggtccaaatggctcttcccaagcaattctcatatcaggcctcacattatctaataacaaaggccaaataagattaccttctctcttgtattcctggcaaaatgttgctcctttctctttagcatccttaaccaatccttcaatgtaattagctgaagattccgaaacaacaggagtgatatcactgtcttcctcaggtggtccaacactcaattttgctacccttgccttcactttctcaacaagttcatccgcaaccgattccatcaccaaaacaactttaacagcagtacacctttgaccactgttgaataaagaaaaacagaaaaaaaaaacaataaatgggaatctataacaccatcaaaatgactatggtttaactagtttgacatcattttcacctgtaagaaaaacctccttttataatgtttgcagcaaccaaatcaagatcagcatcctcaagcacaatgcaagcatcttttcctcccaattccatttggagaggtatcatccctgccttctttgagattgcaataccggtgtctccaccggtgaagctgagaaggaaaaacgagttcacaattacctaaaaacattaataaacaagagtagtagaacgaaatttgttagaatttgaggataaggtgaatataattggcaatgggaggagtaccccattcatctttttggacgtggctctgataccatgttagaatttgatgataaggtgaatggggttctatttcaaaactaattggcaataggaagagtagctcattcttcttatatatcacaatttatttccacacatcagcaatgtgagactaactcttaataaaattagtaccttatacagtttactccaggg

SEQ ID NO: 69679 - DNA, 1804 bp, Cannabis sativa
tcttgaatgttttgttgattattttttcgagttttgtgcaaagagtacaaaaaatcttaatttagttcattgttcttgttttaaatgtggtaatatagagtgtatgaaaattgtcaatataaaggaacatttgtttaagagttgtataaacaagagttataaggtttggtatcgccaaaaggaaagaattagaatttcaaggtagtagctttcaagaatgataagtgtggtaatttatattatgaagataatcacattacgaaaatgattggcagtgcacagtatgaatccaatgttgattcagtgtaacttcaaactgtttaagaagatactgaaaatcttatttatccaaattataatagatttactaaattatttgcacttgttaaattatacaataattagagtcaacaacctttgtaagcagccacaatggcaattctcacaatcatctcaagctttttattagccataagtcagaccacaactagcaccacaaggtccacaagtgaatgaacctgatgctcaatctagccaatttatgattgagacaaaggtatctattcatagttagagaatcaaatttgtcagttgacaaatcaagttcaaggcaatttttttagtactacaaagttgaatcctaaagagcagtatgaaatcactttgaggagtggtaaggagttggaagaaccaatgaagaagtctatgtcggagccaaaggttgatgttgagaatgagatgaagctggaagaaaaagttatagtggaccttgacaagaagcagccacaagtgagtatttatcatcacatcaaaatttcatactcttagtggcttcaaaagaagacacttgacaagcaattttctaaattttagaagtcttttacaagattcacatcaataatttatttgccgaggcgcttaaaaaaattctaacttgcttgaaatatttgaaggagaatttgtcaaagaagagaaacttagaggaatatgaaattttaacacttactgaggagtgaaacataattttacataagaaattactttccaagcttaaatatcttagtagtttcgctattctttactcagtaagagacactgttatgaccaaggcttggtgtgatttagaggagagtgtgactttaatgctcctatttatttttcagaagctaaaattaggagaagcttgctccacaactgtctccttaaaaatgatggatcgctctgttaagaatccttgtggaatgattgaagatgtcttggtaatgattggtaaatttatcttccctgatgatttccttattctagacatgaagaaaaatgttgaggattattttaccatgatctagatttactactatgtatgttgtttaacatcctaaacatgattttctaaaacattgaaatttaaacacatataaagttcaagaaaccttacattggtttgaaaggaagggcgcttaacccctgcgatcgaggccaaacccttgcctcgcacagaaggatccgacttgcctgtaagaacaccagcttccagctccatagtattgctactaagagctagacctccacagcttggggcaggggtattgatttgagtgggaaaagcttccgtcatggactcagagcaagcaaggtttgttctatcagcaaccgaaatagaatcagtggagtaggagctgaaagtagaagggtttgaggaagaaccaatacctgacctactaaaaggtggaatcatcccaacaacattggggttaagaggtgtagggatcatgacaactaaagattggtgggaaggggtaaaatg

SEQ ID NO: 69680 - DNA, 5540 bp, Cannabis sativa
aaaagagtgtagaaatgcgtatcactttttttaatagagtcatatgttagctggacgtaaattccttatttaaaatcacttggccaaaaaaaaaaaacttaaaaaagaaaacaatcctaggaagtgaaattcgtgacaattttcaaacaaaatttgcgtgttacacaacatatcatcttgtttaacaatgttcacttttaaggaatggatggtgatgagatgagatgagatgagaaggaatctctcttttcatttctatttgttattttaaagttggcaaattaatctttaattgctgatttgattttcaacccaacaaataaaagaaaagctctcaatatacagtttttaactaaatgctttcagtttctttcacccaattcctaatcacattccaaaacttgggttggaaacacttcttctacagccaggaatctaatgagtctgctttatctatatgccagtggaaaaatgcctaccttataagtttagttaggctaaaaagaagaaatatgaaaatgatgggaaacaaagtttgaacataataaccacaacaggttaatttgtatacagaaagaattgtcaaccccaaaaagaaaaataaaaggttgaattttcattgttagagaatggtttactactgtggaccagaccatgcaataaaataaaaattgacataacgttacaacttttgtgttgctttgggataagttctgtttggaagaggtgatgcatgcatgcactaaagggactttgagcaagttgagtgtgagtgagtgagtgtggccccatgggggccatggccagcttatattgctttcaggagagaatgaatgaatatgaatgaatgaagtgaactccactttgtcttgctttgccaaataatggcaagcaaaatgggtatggggaacctactatttttgtcctaacaaacattgctcatcaagtcatgatgctttattagactctctcacttctcttttttttgaaaggagactgtgtacttcaactagtcttgtttgtgtgtttgtgtttatttattcttggtaaagaataaagccaaaatagaggaaacaacgtttgaggtaaatgaaaaggtatacaccaaaccaagtagtaatagtaatagtaatagtactatttattgtgttaacttggattattatgttaatgttaagtagtaatagtaatagtaatagtactattgtgttaacttggattattatgttaatgttaatcttatcattagtctacaataattagtattgtgttattgttatgttagtctagctagaagatatgattgaaaattgtgtttgcctttttactctctcataatacttttattatggttatgttacgtccactgtgaaaaattaatattttatattatattaaatcaattcaaatgtgccaactcaattaattaatttttttaaatattattaaccatgtagataggtttttttttcttaaaacactcaaattaattgatgtatcatatttagattagtttaatacattatgatataccattttttaacagaagatcttatattagggtagattttgaccatcatataaatatgtatgtatgtatattccatttcaactacaatactaaacctaatattaaaaaatatatctttttattaatttttttacataataatactattataaattattaaaactgattaaattaaaataacacattacgtttaataaaataaacattacattactaaaaaataaaactatatttaatgtgtaaaatataacacacgcttgaaagattaattaaattatattataaatcaagatgaaaacaaagcaatttacagaaaaagaacacaaacatccaaacatagagaacaagaagaagtatggctattaatggatggattttcatttttttactaaaacaatataatagttattaaaaaattcaaaagaacctcaataggagaaggcaaaatgagtacacttgattgatccaatggccacactcttagcttttgtgatttcacaaataagttctaattttttataataacattatttaggaagcttttgttccattatacaaattttcatataattaattaaagatttgattttttagcttttatatcacttacatttattttatacaattatgttcttttaagattcaaaaatcacaagtaggacgaaatttggttcaagattggtctcaataaaagttttattggaatatttttttttttttttatgttagccgtaattttaactataagttagctaagtatactcttaaaatagacactgagtttttttgaatgatgaacccccattctttaatggatcctttgataaattcgatcaatgtcaatgattttgataaccaaaaaaaatatatatatattatatataattttcatagtgtatagtgtaacaaccgacaatatactgctatataggttgttgggtcgaacaaaatacaactccatatatgtccttaatatttttcttttaattaaattattttaaaaaaatataattttataaaagatttattgtattttagtaaaattttattgtaaagatctacgatttatgttttagctcgacatagcattaaagcaacttcaattggaaggaaagtggcttaaggagtacttgatgagatgggcacttttttgactaatttttaatagttgcttaccattagaattgatgaaatcacttgttctcttagtaatattttgtctatttaattttgcagcgataaagaaaattaatatatattttgttgtaggaagaaatacaagcataataataatataatttgctatatttggtgtttgaaatttgaaaaccgagataattgaagccaagccaatcaaacattatctagtctctaccatctacactaaacactagtgctgctccatctgtctcatttggcagtgtctgtacacatagacccaacacttgaatatgtagtagaaaaggaagaagagctcttaaattatttaatttgatagaccaaaacacttgaatgtgtagtagaaaaaacatagagcttattaacccacaaaaaataaaataggtcaaagctaggtgtggggtgggctatacccactacacaactatttttagagtcttcactcacgtttatcacgatcgactacatcaacccatatgttgtttgctagtctaataaagtccacatatactataattatatatttgagtgtatgtgaatcactattcatatctttatgtatcttaatattagttactcattctagtattattgttttaatggccatgagaaatggatctcaaaggtttgatcattaggggctaccaaaaacgaaatcttagtgatatgctataactgttgttatactaaatcaaattatttgaactcgatacttaattgtaccaataataatatgacatattaagtgatactgagcacttttagtgccttatatggttcttttttctagaactctcacttatcacattgcagttcacccagttcagctaaattcactcctttcttagactagctaggccttgaatagtagtatataactaccctcctttcttagactagctttttcggagtgaaatttactatagttgtatcaagtggtattagagcagctccaatgctctacatattcacgttgctcatcagtcttttgtcaatccaagaacaacaatcaagattacttaaccactaacgaggattgtgtgggttgctataattgctactgtcaagcaacgtgagtgaattattttttttataattttcctatcaataagatgtattaatataatatttaaaatattaaaaataatttaataatatattaaataataaagtgtgggttcattctcatgacttttaaattacttagcattggaataattttaagagtaaagtggtcaaaaatgatgtgaatgaaaaaaaaaaaaatataatattttaagataatgtagaaattgttggctatgttttaagatacttgcattggagttacttttagatctatgcaccttcaagtgagactaacgtcatagaattggcgacttccgaaaagggtgacctgtggattaggccaccgtagagaagagcatcgcggactttggcttaaaagagataagtattgctaggttcgcatagtatataactacttgaacaccctcttttcttatgctaactgtagtaagttctaccgaaatggaggtattatataccagaatgagtatatagtgcaatcctaaatcagtatggaaactgtatagcatatgaattatgaatcactcatcatccacaaattttgtatgaatggtgtacttgcaacaaaaacctgtaaccagaacgatactgcaaaaaatagaagcaacggtatataattttgcataaatatgaaaacatggggtgaaataggttgataatcaacgacaaaacgtttaacgaaagagttaaaaccaaattagtagaccaaaacaaaacaactatctcatataaatgacctgcaaaaggcttcgattctaaaggtcttctagaaactctaactccatagtttttcttattcggaaaagtataaaaaaatggcgtactcgtattacaattttaatccaaaaactgaatatcctaaaaggataatctgatctccataacttccccaaaatatgtagtctcccttgataatgctgatcccaaggtctctcaagtacctgcaatggcaaagtagaatgctcataaaccttgtaagaactttagacaacattggccagcaatttgaaatcacactacaatgagcatatgctgcaaatcgtatcaatttgttcctcatctataagtaagtttccacacttgcatcttccacaacttggttcctttcatttaaagttagattttcatggttgataaagtgctcaatacagaataattaaacaaaaaagaaaaaaaaaacaaaatcaagctttgcatttagaggaatatcataattgtaaattaccataacacccactaatacacacctaatgagtctctcattacagactgcaccaaaagacatacataacagtttaaagtattgatttaacatatagaaatcaatagtcagatcacttaaagtcagtggaaaagcagaaaaagtaaaatttaccattaaaacaaatttaattacgcaagcacaaaatctgactataacgaattatgttcttttactaaggctggcaaaagaaatgaaaagagaacctacaatgcagcctcattgccttcctttggatcattgaatgttgaagtgcatcacccgtcttttccactcctccctatcaatcccaatcccaattctttcttatcaaccaaatttaatatgctaacaaaacccctagctactttatgcctattccatcaagcaaaataagactaactagagatatccacgagtcaatgttaaaaagtaccaaaggatcatttaaggataaacgtaaatttaatgaaaaagaaaaatcagttctcatttcattct

SEQ ID NO: 69681 - DNA, 2528 bp, Cannabis sativa
  modified_base (2487)..(2502): a, c, t, g, unknown or other
acaatttaatacccttttgatacttataatataataattttaatcacactttataataacatatacattatacatatgtgcccacaatagaatttttaattcaacacctattacattccctaggagatctttttttgttacttggatcctttttggatgattttattagttataggttatcaaatttttttgaggtatctctaattcatattcgttatatacataaattagcaatgataaactaatttgtattaaactcaaattattttcaataaatcttcattgttaaaaaaataatactgtagtaataatatggtattgggttaggagttaagaaaataaaatatactaataatttatcaaatgataaataataaaaataattaaataataaaaaattaacaaaaattgtgaaaaattgagggagaaaaaaatgaaagaaaattcatttgagatgccacatcatcttcttgaacattgttttgtacacgtgttcttttttttttttttttctgaatgtatcagtgctccttacttactattggatcactaattttttttttttgaaaatggtataatttgttaaagtttagtatttcactaagccattgatcaataagaatgcaaatttatataatatattttctaagctatgttgatgtgtgtgggctaagaagcttggggtgaaggagtgtgtgggctgggccttttccatattcacttctttatttttgtttgttcttctttttattttctttttccagttcattgtattcttcttttgtcatgaaacatatgtagcatcctttttccaatcattatattatttttgtaaattaaacatcaaggaggaaaactttaagcacaatctaaaagaaatgataagaaaaaatatagtatagaaattagaaagagtattgctatattatatatattatatgtctactctagagtaccatagatagagtttgatgactggtagtacgtagggtgagtttattgatggtcacgcattaggttactttatcttcaagtactttttttattttattttattttttaactcaatgctagctcgagtgagatttggtatatatgatataatggttttaaatattgtgttatttgttcccttaataaatagtaattaaatagacacacacacacattacatttacatgcacaaacaaaatataatgagctagttatttaatgatacttcataataaccaaaactaggttacttttatcatatgaattcaatcataattatcattagtgactctgagtatattaattagtacgtataggtttattgtgaccattagacgtggcagatatgtaaaatttaaaacttgaggtggtcaaatactataaaaaattgtatttttagtcctaacaaaacttatattaaaaataaaaaaatttcaataattataaattatcattcttatattataactaaaaagtccatgactaaatgtattagtcacaaaaattataatatattgtgactaaatatatttttagttgtaatacttgttatgactaaaactaaattagtaacaatttgtatctaaatattatgttttcgtcataagtaattttttattgtgactaaaaagttgtcactataagtatttttttagtagtgaaaggtaacactttaacccttattagaaaacagaacttacaaatgatcctttaatttaaatcacaaaatcatcatatttaaaattaatggagtaactcctataatataaagaacatattagtaactaaatcaggaccacacatcaatataaatgaacaataatatcttcatagttatatattcaccaaatagatagttttaataagtcataaaacaacaaaataatattaagcatccattattcattctccctaaccagtacacacaacaaattaagtcatccagactatctattcaagtttaattgcaaaattagttttcaatagaaattttaataactagaataagactaaactaataacgatatttttcctcatcaacaataccattcttattcactagcatcaaactgagttcttagaataagagaaaataaggggtgagcttataaaacccaataaaaaaaataactaatattgaatgacccttagtttaataaaaatttctgcatggttggcttttaaaacaaaacatctcatcatgtacaaacaaatagagagaccataaataatcacaaaattaagcttcaaatgcatatcccaccgtccactaaactcctagctctcaatactaatcatagaaaatgatatcctaaactgggtagtcgcgaaccaccaaaatactgggactcatattcagttcacttcctatacaaattctaagtcttacacctacaggtgagtgcacatctgatctacgtatgatgatgcagagactaggtcatgaaacaacaacatgcagaagacatgataaatgtgacagtcagtagtccnnnnnnnnnnnnnnnnaaataccgggtaagctgtgcaatccc

SEQ ID NO: 69682 - DNA, 4102 bp, Cannabis sativa
aatattagtagaaattgtaattatactgcctataatgtggctaagtgggcgtttacccacaagacgttcggttttatcccgattttctctatcccgaaacatttattttgtaatgaccgtgaggtctaactgcttctaaatctaatatatctactcttttcttcaaaaaaaaaaaaaaaaagggggcaccttcataatccaaaaatactaaaataattttcttatttttctcaactaccccgccagtagcgagcttgcagaaaatgccgttcgtcttcttcttcttcttcttcttcttcttcccagtactggttcttctgcactgataaaacctgacctgtgggattacaaaaatgtccctaaggaatccaaatattctccgaataccttcagtcaactgttctccctccgatgctcatcttgcaatcaaagcaatccaatatctcaaacgccacccttaccagcttgactctctttcttccgattttacccctgatgcagcctcctatttactcctcaagtcccaattggacaaaaccctgatcttgagcttcctccactgggctcggacccgcaaattcttcaccttccgctgcaagtgcctcgccctccacatcctcacccgcttcaagctctacaagagcgcccaaaccctcgccgaggacgtggccctcaataccatatccgaagacgaaggtggaaatttggtctttgactgtctcagcgagtctttccagctctgcaattcgagctccgcagttttcgacttggtggtcaaatcttactgccacttgaaactgacgagtaaggctctcaacatcgttaacttggccaagtctcgtggttttatgcctggtgttttgtcgtataatgctattatagactccataatcaggtccagagggtcggttaaagaggcggaggaggtttttattgagatgcttaaaaatggggtctcgccaaatgtgttcacttacaacattctgattcggggtttttctggggctgggaatttggatatggttttgcattttttcgcccaaatggagaaaaatgggtgcttacctaacgtggttacatataataccttgattgatggatattgtaaaatgaataagttggatgaggctttcgagttgttaaggtcgatggctttgaagggtttggagccaaatttgatttcgtataacgttgtaatcaatggattgtgtcgacatgggaggttgaaggagacaggtaagtttcttgaggagatgaaaaggaaggggtacgtgcctgacgaggttacttacaacactctcgttagtggatattgcaaggacgataattttcaccaagctcttattttgcattctgagatggttaggaatggcttgtctcccaatgttgttacttatacagcattgataagtagtatgtgtaaggctagaaatttgaatagggcattggagttttttgatcagatgcgggttagaggactttaccctaacgagagaacttatacaacactgattgatggtttctctcaacaagggttcttagatgaagcttacaggtttctgaaagagatgacttctattggattgtcaccttcgattgtgacttataacgccattattaatggccactgcattttaggaaagatggaagaagccatgggagtcatgcgaaacatggtggaaaagggattaactccagatgtgattagttatagtactgttatatctgggttttgcaggcatcaggagttggagaaagcatttcaaacgaagttggaaatggttgagaagggtatatttccagatgctatcacctattcatcacttattcaaggtctttgtcagcaggggaaacttgatgaagcctgcaacatatttcaagagatggttagtatgggtttgcctcctgatgaattcacatacacgaccttgatcaatgcttattgtgtagaaggggacttgaatagagcccttcaagtacatgatgaaatggtacgaaagggttttctccctgatgttgttacctacagcgtgcttatcaatggacttaacaaacaagctcggacaagggaagcaaagaggcttttgcttaagcttttctatgatgagtctgtcccaaatgatgtcacttataatacgcttatagaaaattgttgtagtactgaatttagaagtgtggtagctcttgtcaagggattttgcatgaaaggtttgatggatgaagcagatcgagtttttgagacaatgcttaaaaggaattacaagcccgacgagtcagtttacaatgtccttatacatggtcattgccgtggtggaaatgttgaaaaggcatataacctgtacaaggaaatgttgagttttggttttgttcctcatactgtaacattaatagcactaattaaagctctttttactgaagagatgaacaatgaactgaatcaagtcataaccaaaacattgagaagctgccggcttagtgatgctgagctcgcaaaattacttgttgaaatcaaccagaaggaaggaaatatggatgcagttttcaatgtgcttgctgacatggccaaggatggccttcttccaaacagtggcctcaatgcttatgctggacgaaaagaactatgaaattctcaactgtaaacagagttcattaaggtaaccattgacctaggagaagatgaagatggtaggttgaggtacagaataccctttcttgtttatttataaatacctttgctgttgttttgctaactcatatgattgtcattctaccatctcatttgcaaaatgaaatacatgtgtagttcattattcaacagcttctggtaagtctgatgattatcatgaactttgtgtagtctcagatatttaatgatgcatcagacttcagtgaatgtttttctgatttttgttcggatttgtgaaacatgtgttgtctatacaataagaaacccttataataagctgattaattactttggtctcatttcaaatctagcatttcaatggggactatcctcctgatttcgtttaaaataccgtcccggtatttgttttctgcaaaatcataatctcaacttctccaggtagttactgttctgttttgttgatctttcggaagtccattcttggttttctatgaactcttgttccaaggccctttttgtcacttcagctggtgaaacaaatgtcggaagattaattatatatatattttgtcttgaatgtggctcactctggttaaatttggttgtgtatactgtagtaccagttccatcattttaggttcttcacgctgaaaaagcactaactgtaaatccttttatttcagttgacaaatgatttgctgcggtattacgattttatcaaaaagagctcagcgttgagaaaattgttttcaatgatgagatcaagcaggagttaaaagtttcagttttaagagcgcgtaaaggctcctgggaagtgtcatcttgttgaacccgctaaaaaaggcacagctgccagagctaaaaactcaagtaaatagaatgttgacgagggcctcttaacttagatcatgcagccaattgtttgacaagactcattttatggctgaaaccttgtcactcatttactggaatcactcgttagacttaggggactaaagtcacatctagttcccaagtcacagagggaggacctcggagttaaagtgaggggatgtaatttttttttagtaagagaggttggacaaaaataaacttaaaaagaaaaaaaaaatgtttttagttgtcttcaacctatattttaaatagcttaaccattataccaaagttaatattatgtttgtaaatatcatcttttactacaaatatctgttgtaactaattaaaatgtatatgtattttttttccgattttttttcaagggtgattgtcccatctcgcttatatgtgggtccgcccgtggttccatggtttattgtgcttacattttgtacccggcaaacagcgacaatagaagaatatgactatactgaatggattttcactcttccaatttcctaacttagacaaatgaaaattgttacaagtgagatcaagaacattcttcatcatcatgat

SEQ ID NO: 69683 - DNA, 2048 bp, Cannabis sativa
ggttctttttcagaacaacctcaagtgttatcactgctgtagctggtgcaccaaaattgccatctgagattactgggaagactgttgaagaggtactctacatgcttgaacctttgtatcatcttctatttccttctagtttctggtttacaaaaaacctgtaaagatgtttgtacattttgagagtattgcacttaaaatatgcacccgaacatatctttcacatttccttttctaaacgtaaaaaccttttgcatgataactaaagttggagagtattgctgtgaacaccccatttgggattaatttattatgtttatgtaaatctacatatcatatatgtgtggttttgtatggtaacatactttcattaacttcagtgaagatatgtattccttcaatgatgttcccaattttgatgaagaagtagaaacacataatgtaatgctgattcatttgaaattgaatcataagttgcccttccaaactatgaaattgtactccctcccgcgtagttcttctgaatttcaaatagtcccaacggttcagacttgagtaggctgaaaaaagacataaagcctcccttttgctgttgtttcttgaactccacatgcatatttctttaatatttttggaaatatacttgaaagtctattcaagtttcactacgctgtattattactgaatctgctttttttgagtagcagtttcagtctcttatagtgtttgtatttttcttttcttgttctaaagattatcaaggaatggaatttggagctgcaagaacgaactggaaagtttcgaaagcaggctaatacaatagctgagtgggacaggaggattttgcagaatcgtgatgttcttctgaggcttgaggtagtctgtttgctatttataatacaatggttgtaggctatttataattttgtcaaagcaagatgttcttcaaagttatgcatcattgacatttttcttattgcagtttggcatatccttatgtatataccctccaatatgtgtgggtcttaatcccacttttctttctcttgacttgaagaagactagttttctgatcagttattacagttttagatgcaatgctcttcctgtctgatttgaattgttatgtatctgttcttttttagttaactacctatgctgtgtccatgcacaattgttgtactgatgtaatttgctctgtttgcatctatatcaggcagcatttactcgttgtcttatttaatgttatatcttttacttgttgtcttttcaaatgtattttcataatttagattgaagtggcaaaagtggtagaaacccaatctagcctggagcggcaactggagttggttgagacacatcaacaagaggtagttccacttcgatcttttctgtatatttttaccgaatgctatttttaataattgtctacaatgaagcacatggaaatacaagagtagagtaagagtcagaaactaggactatggagcacaaaagaagaaacaaggaaaatcaacgttctctttatggatagtaaatcccaaatgttctttaaacaaacctatggatgtgatatataattaatatgctcttaaatgctgtgaaatatctatttttgtgtcatttcctactcttcagtgcaagcacttgtgatagatttgttctttttcaaagttttaggcccttaataatacattttatgagtaagaggtgtatttcaaacggttagacatgatttaagttctcattaattttgaggttcaagttttgggtacgtacacaataattgttatagttttaattgagagctatgtaaggagtttagtcataataataataataataataaaaaaaaaatagatgcatttgatttctgctttacaatctacaagtaacatttctactggaaaacttcaaatttatcctagtaattttggcgtaaaggtgacatatactgtagtttgtatcattaaataactgaatgacaaagaacttcaatattttgtcatttatttgggggtttacatttgatttctgctttacaatct

SEQ ID NO: 69684 - DNA, 2537 bp, Cannabis sativa
  modified_base (799)..(800): a, c, t, g, unknown or other
ttatcttattaaattgttttatacggactatcctatgtgacatctcgggaaatcggggtgttacaatgtctacccatagcaagtcaaatattcaatcatagtgcgaatgagacattattccgctgtcgccaatgtatggtttcttaaactttatatgcgtttaattctattattttagagaattcatatttaggatattaaacaacatacatgttagtaaatctagatcctgataaaataatctccaacaagtttgttgtcttctacatcattacttcccttaaaagttatgtttaaaaccttagacaataattgtgaaaagttgcagaagaagaaaaaaatttatcccattctctagtatatattcatatttcaactatttcttggccaaataacataattggtcttgatttttgtaactttatcaacatgattgtgttttttttagtgggtggatcctgaagtgtttcacccaattttggagctggatgttgtattcatggagggaaagtctttatgagtgggtgttgttcttagcagcaacaaagatctactccatcttgcagctatgatgatagtcatggcgattgtccctctacaatgtttaggagccaatgtagttgccatcatagagatgataattttggagatgaaaatgaaaccacctttgtgattaaagaaaagaaaggtaattgtgtgctttgtttattagttttttaattgtaatttttgtgtttaaaatgttgttttaataatggatgtgtttgtgtggggggtgttttttttttctttttttctnnttttttttttttttttaaagatgtgaaaaatattatgaaataagttgtaagttgtatggtaataaatgatttatgaatatgttgaatagttatggagtcttttcacagcatgttttattaagattagttcataacaaattgaataggttatgaatatattgaatagttaagtcttttaatagcaagttttactcatagcaagttttgttcataacaacaaattttatggagtgtaatccccacaagatatctaattttaaataggatatatccgatacaattcaaagttaatgaattacgttacaatatgttgcatctttggtattagtgatgaaattgataattaaacatctttggctacatatcaaatgcattaaaatccttcacaaaatacagtggtcatattttctaaatattacataacgatccatttagtcaccacaatacataattgacataaacatctactacgtaaacatcagtgaatcaaaaggatgacatctccaacttaaatgctagttgcatcaaaaggttaaaaaagtttagttaatcaaaaggatgtcatctccagtttaattaatcaaaaggatgtcatctccacttaattgttatttgcatacaaaatatctaacatttttagttaatcacaatgctttatcatttccactgaaaagttatatatttgcatcttccactcccctaatattctccctcaacctttgcttcctcaatgtctctttcctctttttggtttgatcagttgggttggtttatggtggccttctcctttttgttggttgaacattgacgtacaaaccactaagttttatcttaattagttactaaacaacaacataaaactagtgtatatgcaactaataaaaaattcaaataaaatgaactcggtgaactattttttgacaattcttgcaatatgtctagctacaccataatttctacatttatacacttctccatgtcttcttgtcattgctgcatttatatgtggtggttcatcaacatctattcttctcttcttttttggtcttcgaagcatatttatttcttctggtacttcaattgggttaatgccagattttggccaaaatggtggacctggcaaacggtggatcacactttcataagctttcaggatcatatcttacttgtatcagtcattattataatcccaaacttcatgcccttccttacatatgcttgataatgcatgatcacaaagaactccacttagttggtaccttcaacaacaacaagtcttgttatctattttcaatgtgtaactcatagtgcatggggcagtccacttgaaaaatcgcttctgtcgactttgtcactaaataatttctagcaaacctcttatatttctctatgatcttccttatgtttttccctactagttcagtccacttaatgacactctccctttttcttatgaaacctaggcatgagctagtatcataacttctctaatagagttatgattgacttatctctgacatcaactattgattattgaagaactcacacaagttgttgaagagcacatcacattttacaccttcaaaaaaataagccttagtccattctataggatgttttgtagccaaccaattatatgcagactcgttgacttctttaatttttgcccttcttctatcaaattcagcaatagttgttgcaaaatagagttacgattgacttatctctgacatcaac

SEQ ID NO: 69685 - DNA, 3038 bp, Cannabis sativa
agatgttgaggaatccaataacgttgaggttgaggtcgaggatgatgatgatgaggatgaggatgaggaaattcagcttgaggaggtatttaaattcatgagttttttatattatgttgaaacagatgttttggtgtcctcataaattgtctttcggtgcatgtaacaaatagtaaattactgcttttgttgatatattatattatcttcattgtaggccgacgatgaaatttctttgcaatctcaatcatgtatccttttaccattatcttacttttgtagaaaggtaaattgttttctgaaaaattgggatcggtttgctggtgattaacttcctaattttattttattgaacgaagaaactctaatagcactaatcctactaatgagaaaatgttttgaagtttcctatacttgagttagatttagatctaaacatggaaagcatctcgagaacccatttacaggagttgtttggtagttttccatccaatgaaggaggagaagataaagtacaagacagagatataagcgatgaagaatatcaaatactcgagcaagatagtgaagacaacttatccgatgagtatgactcctgagttaccaaatattcagaaggtttgtatctatccatagctgcattcatacaaatattcatagccgaagcctagctgcatttatagttgtacacaatcagtcgcccagtttgtacaggcgaccctgatatgagttttgttggctttagatcttgcagctttggagggccccaatgcacaatcaatcacatgacttaccgggtaaattctctgatagattttctacattccaagtatggttcagtaattttgtttgaaaaataccaaatatcagtcatgtgttagtgattggatttcaattatgaagtgagcctcacactatgacaatattttggactgtttggcttgagaggcacagaagagttatactctcttcaaagaaaaagatgaaacataagattttctttgtgaaacaataaatttaggttgttacatgtaatgttaaatgtttagaggagtttcttttttagatttagttagagacatgaatagtttcatgtgaggtttcagtgtatataatgtttgtttatttgtctattttaattatattttgttttattaatagactttatgctgtttgtattcgaatggagcagtgcaaacatgaacctattattttgtactgtattttagtaaaattaatacaaagttttgtttctatttgaattatattctttaacattttttaacaccttttcaaaaaaaaataaaataaaatactcaaaatcttaacattggtgatgtttttcctcgggcaggtgtgttcatacatataagatgaacttttcatactatgagcatacataactaatcattatacatacataataaaatggattaactaaacttaagatataattaaataatcattttcttaaaaaataataatatgtatgaattagcaatttatgagaatgacagaatttcgtgttggaagtagaaagaaatgtgtggctaaaagcgaaatgcaaataggtaaaggatggtgatgacaattcaagatttttccataatctattgaatgcaagaaaggccaggaatacaatatccataacagaaaaagaagatggttcaatccttggtgatgataagtgttgtaaatccctacaacacaaactcaattcacaagcatacacgatgcaatgcatacacaccagatagtaaaccagtaaagaaatgaacaagaatttgacagaaaaaaaaacaatgcagaaaaacataggaaaaataaaagagtgagacaaaaaaattatcttggttcggatctcaatgtgagttttattctagctctcccccaaggagtttctccactatgcaatgtagtttacaaacactaataatgagttcatcaagcagagctacacacagagagatatagcctctcaaacctccatgatcgagcagtttagaacaccatgaatgtcatggttcttcacctccaggagtctccaactttggctcttctatgattttttcactcactcttatgaactctctcttacttacaaactacataacagtaggtgtttaaataggttagaaattagctcacaaaaccgagccactaaccacttggacaaagccaactaacataactactttaactaactttcttaactaacttccaaaaatggaaagtttaaaaccaagactagttttctatgaattacaaccacaatttccaccttaattcatagaaatctagtgaaacaaaatgctttggggagtgaacctgaaaactacacaggtctaagtttgagcaagtccgtaaaatacttaaacttgctcactggcagcaccttagttcctgcatcaacagggttctcatctgaaggaactttctccaattcaatctctccagattctatttgtccctgatccaaaacattctaaggtcaatgtgtttggatttcccatggtaaataaggttcttgctcaagtgaattgcagattgtctgtctaaaaacactgagacttttcctttcaacatgttaatttcttgcaaaatgtcattgatccatgttgcttccttgaatgcctctgtgattgccatgaactcagcttctgtagtggacaaagcaactacatgttgcagttgtgatttccagtttatgcagcatgaatttaactggaaacaatagctagtgattgattttttggtgtccttgttggatgcataatcagcatcaacaaagccttctaacttcagtgtgttgccagtcttctcaaatgtcaaaccatagtttgaggttgtctttagataccttaaaagccatttcaaaccagtccagtattcttcaccaggattggacataaacctgctcaaagtgttgatagcatatgcaatgtcaggccttgtgcttatcattgcttacatgacactcccaatggctttggcataaggaatttcttccatctttttcttggatttttcatcttttg

SEQ ID NO: 69686 - DNA, 1287 bp, Cannabis sativa
aatagtattagtagcagtacaactggtgttattacgctgaaaactttgatgatcattattattggcggccaagttcgccgagatggaggggctgtcgagctgagggaggacctcatgatgatgatgagtagggagatggatatggtctaccgaaggcagaggatatacgagttgatcttgatcatgtacatgtactgatgaagaaggaatgaagcagttgtggaaagcagtactagttgcggcgacattatttggattatgattaataatatcagccatgttatgtttttcttccacggaaggagaagaagaagagtaaagaggcctcatcatgtggctactactactgttttctctttcgtagtaattaccatgattccacatttcataactttgtctttgatgatgactagggcttggctttctgaatgctcgacatacaacccaaccttcttcctgcttccccacaaaaaccaatgaatattaatttttattttttcttcactcatatagttaattagtactaccctcaaaggccactttcactttaaattaattatataaatctttattatatatgtggtgatcggagcagaaatattaaaatgttagaaatgcaaattacgcatgcagagacacccatccattagtcaaaaactttttgatgaacatccatataattatattagtcaagtttaatattctacttggagagaagaaaaagcaagtcaaagttttccttgtaattaaacatgtactactatagctttggcatggtgtttgtatttgattgcttgaggaatacaatttttctgatttaccaaaaaaataaaacatgtactactaataataaaattaacttagctttttcaagagagccaagggtatcactcaaatttaataaattaaaattaaatattgatgtttttatttattatttattaattattatatcattttcttatataatgaatgacgattttctatgcatgggcatgctctagctagcacacgcatgcactatagctactagaaagcatataattcaacaaaactaaaaaaagtttagtcaatattgaaaaatatatagtttatttccaaacgaaattataatttgttgctcacaaaacatttcgaagtggaacaataaaccgattcactgttcaacatcatttaaagacatattttaaattttttaagaagacttataataaagatatgaataagctatatgcttgtgtcatagttgggtgtaatttgtagtattattattattaaaatatttat

SEQ ID NO: 69687 - DNA, 1674 bp, Cannabis sativa
ttttcaaaaacaaaaattttactttcattttatgattaaaaaattaaaaaatataagtgttaccaaatgacaccataattttcttttgtaactgaatatttatattcaaaaaattaaaatgatacactcaaaaaaaaaaagacgtatattattatttttgttagttaccttttttaattgtttggcattaatataattagtattaaataatgtgcacgcttagccgcattgttcatcttgacaggagaaaaagtactaaagaaaaatttaaaaaattagaaaaaataagagggcaagaaaaatataagacgtcatccagcctaacaataacattatatatatagatagatagataaatataaattatccttttatctggttcataaattccacacgacatgcaaatttggattttggtttccttcccactattatataaaagaaaatttcacaaataataatatatacacaacttagtgggttgtaatctttctttaattattattaatgtcactcaagtggtacttaatagactgttagtcaagtctgtatttattatcgtaatacgacatattagtgattatatatggttcataaaaagcaagggaaaaaaataaacatttatacatatacaagcgaaaacgagagttgttaattactcagtcgtcaaaaagatatggtcagttaatcaccaccgttaattttatacgattacgatgtccctatcgccagttgcgatctcttttcacttgataataacatttatttttaaaaggaacataataacattttatgcaagttgcctaatgaactgactccatagctttcattttaaaccgttggtttctcaccttgctagatatttatcttttcttcgtacatgatatgttgtctttattagaaaagtataaaataaaattaaagtaagagccaagtagcatggccgcacgcggtgaccaatatggcactatgaaaattttattaggctattgtgtagttgcttaaaaaatttagcacatgtctcaattctttattcaataaattgataatgatacaatttttttgtctatttatgagttatggtaacatttaatttttcaggttaataatattttcatgacttatattgatgggagtaattgtttatttaaatgatgccttgcttagtgttaataagacataagaacaagatagtagatttatttttgaaaattgttggttagatgatgcttcttttaatggtttagtcaaggattcttggttttctgctaggaataattgttctaataggatagtttgatttgctttttatattctcaatatagtttgaaaaattggaataattttaaaagaattaataatattcaaaatgagctcaatattttgcaatctaaggctatgttaactaaagaggggctagataatttgaaaaatcttcaatcttatcttgagaatttgtaatataaaaaagaaatttatttacatcaaagatctagagttaacttgctgaaaactagtgataaaaatactaagagtatgtttggttgtgttttcagttttcagtttttaaaagtgacaataaaaaacatttttttgtcattttaaaaatttaatggtgtttgacacaaattttttaaaactatttttagatttttcttactaaaaaaaattaat

SEQ ID NO: 69688 - DNA, 1837 bp, Cannabis sativa
  modified_base (1018)..(1021): a, c, t, g, unknown or other
  modified_base (1553)..(1556): a, c, t, g, unknown or other
aaaaatgtaaaaaaaaaaatattctttgaacgtaaaaatgtaaatgtttcacaaaaaatggtgtcttatgtaattattcctttaaaaaattattgtatagttttttaggattatttcacaaaatacacaaaaacaataaaaaaattacaaaaaatacagttttacggaattttaaatatttttatgattttttttattttatttacaaaaaatacggtctttttatgttgtactcttgttattttattttgattttttgttatttatatgttattttttgttattgttttgatgttattttcatgttactattatgtcatttttatgttgtttttatgaaaaactgtataaaaaaaaaaaaattctttaaacataaaaatataatatattgtatccttatctttaaattaagaggactactagacgagttcataatataccactctaaatatacatttatacatggttgaagccatgagagtagtacttacgcaaaaattgagaaagcttcaaaacctctctttgttggagaattcaagtgaactcatgaccttcttctacaattatatagaaattaaagtgacgtttggtaacactttttcaattaattttctgtttttaaaattaaaaaagtaaaaatattttaaaaaacatgttctataaaactgtttttatttttcaatattttaattgagaattaaaattttaaaaataattaaaaaaagtcacttattatttttttaaacaatttttttttaattaatattttgtacttcgatcatacttggacccaaattctctcatggccctagcgttgaacccgacctctgacttgaacctgaatccgactccaaacctagacccgatgtaaataaaatcaaaaaattaaaataaaaacaaactttacagtacacattttattttctatttttaaaattgaaaaataaaaatagttatagaacgtatttttgttttcaaaataaattttttaaaaataaaaattttactttcattttgnnnntaaaaaattagaaaacaaaaatgttaccaaacgacacctaaagtgttgagatttgattagagataattaacttgaatagaattaaaagaattctttttttttatttggttgcattataaagttttggtaaaatcttttcgaagtcctttttgatacaaattttcaggtgaatatataaaaaataaattaatggtaattactgtaactaaaatttatattcaattatttttggtactatatatcatcaaagattattattttaaattattatagagattagagaccatgcccaatgaaaaaaattaacgcatctaacattaaataagacgcataataaaattataaagaaattcaattagttgttactaagctacaaagtaattttttttaggagtaaaagttattaataagtaatttaaaattttaaaaatatgcagcgcgctaaatcactaagtaatttttattacggtaaaaaatcacattttatgctgatattaaaaggcaacaagattatttcttaaaaaaaaaaaannnnaaaaaaaaaaaaaaaggcaacaagattatataacctaccacaagtaaaaaaacaaagaaacgtcacatgtttatttcttttaataaacaatattataggaacgtcttcttctgtgaagggttcaagagcagttgtctgaaagtggttcggttcagctcaacgacgtcctccgtttttcgatttttgttttcatttattaatttactattattagtttaattccaattaatatttttatgggattagaattataaggtgttcattccttaattaattttaat

SEQ ID NO: 69689 - DNA, 1930 bp, Cannabis sativa
gactcacattagccccaccggcaccaccgagaaaaagccaaatctaaaaagatgtaggggagaatcccttaatgagcagaagaattcgaaaccaccggctcccaacattaacttgacgagactcccgacgacaacccaccttctaaaccacaactcgaatgagcctgttagagagtctcacattaataatatgtagaaactaaataccatacataagatgcatgacctacgtactcttcttattatcaattaattttgagatggaatcccatagaccatataccatacactcacctatccctacttcctcaaccatacactttcacatttctaacacagccaaagaggaatctaatcccagcgagcactacagtacagagacgaaggagaacctgtagagaagccattgtaaaagaaaaacaattgaactattaacccaatcgtagataaaaaaaaaaagaattttttctaaaagaaaaacaattaaactattagatatccccccggcaaaaaaaaaaaacttacgtagagaataaacaattcattacgtacgtgtataacatggtaataacatatttctaatattcacaacatggaccaagttttctttttttattgttgtatattattacatatatggaatgctttttcttggtctcattaattcaaatatatcaagtatatggatatggacatggtagtcaatggctagctatgacactcaatgtatttatatattattaatttatttatttgtttatttttttgtgcatatatgaaaggaaaaagtaaaacttccccgatttgttgcttttaattatgaagtctgttgacatttaaaatttaagttagctttgaatgaactttgaatattcatattcaatatatatattccttaaaccagacatattttgaagaaaattttgttgttcctcaaatcctttttgtccactaaaatataaacaaaattttaacaaaccataatatataactacatgctgccacatgttttattttttattttacttacatatgttatttataaaaaggtactgttgatgagaagaaaaaagtgacaatagaaatcactttcataacttatattacatatgttaggtaattactaattacatgggaaacctaatacgtacgtaatataataatacatagttataatgtttaaatattttccatttgcttttatatatttgtaaatgttttgttataactttcctccaacaccatagatgatatgtcagaatatatttggctaggctatattaatcttgcacattaaggatcaccaaatacatatgagggccaagtttgaaccattactatgtataattataagtaattaaagacgaatatcatctgaattctggatgaacaagggccacaactgcagcccaaatttcagttatttgaccaagtaattaattgctattggccaaagatatttaacactttttataagtttcgtcctataattaattagcgatattacttaaaaatttattttcttaagttatatgtaaccgatacttttagcaatttacttaataattcaggtatagtcaaacactattgcatcaacgagacaacatcctgaattaaggttcagcatatatagcatcaacgagacagcatacagaatctccaagtgtcttcaactgaattttcgtatactccatactttgaccaattaattaactattaattataatcactacaatttaagttaattaagctcctccccatcacacaacatcatccatgaattggtgtgctttaattaattaatgatatatttaagatgaaaaataatgattgttattaattaaaaaaaaaggcattaatagcaatctcgcatattattgctattgggcaccagtggtgcctagcaccttctaaatgtgtcgacttgcaa

SEQ ID NO: 69690 - DNA, 5465 bp, Cannabis sativa
caatttaagttgtttcgttagttgaaatagggatttctacgtagaatttcgtaaaaatacaaaaaaaaaaactattttgaagtgtaaaaatgaaaaaagcgctaaaaaatcacttcgtatgatataatgttggacaacactttctcctaatatatgttctccaaactgtattttctcattttataagccacaagtgtcagtgatattttattcacttatttttaagtcttcaagcaattgttgaaatatcacagtttctgaccttttagagtctctacttcttttgacattcaatcaaacattatcctaattttgataatgaagcatagtgaaaaagatctgtccaccataatacagttaaaaaaagatcatagtagtaaattttgcttcataaagattggcatggccaataggaacatctgagaacaatcgtgtctgcgaattgtagataataaaaacttcttttttaccaaaacataagacatatatacatggattatggatatatgtgattgtgtttatattagtgaataaatagcatggttaatcagcatgaatgatttggtcagtacttctcaataggtcacaatgagagattaaaatcacaacaacaactatgttaatatcagctacaacacattagtacctaaaagcagagtttttaactttttataaacaaaccattcactgcaacaaaaagcagagaaaagatcctaacttggatcaaaatgagaagtttcacaacgcagataatcatttcaaattagaaaatgcaccttttataggaaagctgtggacctagtttgagcaaaaataatgagaaggtaaggcagcagggtcaagttcaaagaagcctctaagcttgccacctctttctccagtcaggcgaaaagcgggaatctggtgtgagaatttgaaaaaatcaatctggggaatactccatgttaaggttgatcctcctccctgaactcgagccttaaataccgagttaaaaccatccacaggttccaaagccgaaacgtttattagtaaaacattagctgaaacaacttccactatgtcgtattcacagtttgccaaatcaatacatttgatgtaggaattccagttcctgtacaaggcccaaatttcacctttcttagggagaatgtcatactcatttttactatcacgtgttgttggctctgcttttacaagatgggaaaaattagtgacactgtcgtaggccttaccatcaccttcttcaacctcaaatctaccacaagaaacaggcatcttcttatcagaccatctaataatgtaagaaaaaaggtacccagaaacaagccgcgaaatatgcagtttgaaagatggccaaaattcaattttcttgatcataccatagtcttttggcaagccatcctcatcacaataaaatgcccagatctgaccaggcttaaacttatctttgaatttttcaacatcaaagttgtaaaactcaggatctggaatttcaattctttctaggcttcctgcatttgctatatagcacttcctgcaactatgacatcgaacaaatctattctccacttctttatagtaatggcaccatactgcacaataagggcagacagtgcgaaaagtggaaggcttttcgctctttgaatacttgcgtctcatgttatgtaagagacgtttatttttgtccaaaagtattgttcgagcttctgtaatcagttgaaacgcagctttagcaccagcaaacttatttttatcatgatgaagttggtggacaaacttcaaatattgcttcttaattgtagcctcatctgcgttctccccgagttgaagaattccataccagtccatttcattccctgataatttctgtgcagctgagcaatgtacatcacaaacgataagcaactgagaaatattctcaacatcaggataaagttgttgggcatccaaagcaatcttacgagccaccacaaactccttactttgcatcttcttctcagcaatctccctggccctcagggcctcctccaagggtgaatcaatactggcatcgcctattttgactggctctttaagctctttccacttactggcattgtctccattaccattaggtacaccatcttcattacataagatatctttggatatcttttccttttcactctttaaaggactcactttcacatagtcacaatcaccagttaagttttccttgcaagagacctgtcgtttaaggcatgaaaatctccagatattttgttctccagaaaatccaatctttggttcattcccaagattgccattctcatcaatcatcattgccattggcatgtcactatcaccctccaccatggaattgattagaggcaaagcagcaggatcaagttcgaaagactcaactggaactcctctttcattaccttcaatcttataggatggaatcatatgggaaaacctcaatagctcacctggtggaacaagaaatgtcttcttacccaccatttccatccgacagaaaatactcacgaatccatttacttggctcaatagagcaacatgtattccaacatctgtaacatagtcagacaaaatttcaacatattcatattcattcttctgaccatgtgcagccggatcactactccagctaaaatcccagtttctaaaaagagcccagatctctccctttcttggatgtatcagaaaagtacctccatcacctttcccccaagaaacttcatgagagaacataaaacgatttagtgtttgctcagaatctccatacttgaactcaccacaggaaaatggcaagtctgccaaaagccatttaaattcattctcatcgtttggctgaggttctaaccaggttatgcaaacattgaaaccaggagaagaaaccctattgatccatgcatagaatctaggcatgacattatgataatcataagcagcccacacctgccctgctacaaaacgctctgcattcctgtccttatcgaagtcattgaaatctggatcgggatatgtgaagaattccaagtctgatgtcttattattatcgaagctcgattcaatatagcgttgcttcattccatcacttttaattgaattctcaacctctttcctcttcctggccttgtctaattcttcatcaccaccttctctgggtttaatcctgtcttctctaacatagctagccatcatcattcatcaccaccacctgggtttacggcatgcaaaatctccatgacttcgctccccagaagaaacagtgttcagttgaagaacgccatgctcatcaatcatcgtcgtatcttcttcagaatcaaagctaaatcccttctcgaaactttgacaatggagattatatattaacagctacattactgtaaaatgggggaaaacagtccaaatccaaagagttgaatggtgattagttgagtgccatggctactgattctgagaaatctcagacctaaaagtgaaaagttacttcttccattgtcgtcatcaagagcaagagatcaaagtagctcctctcacgtctgcaaaaacaagaattttcaattatgatcaagcaaagattagatcaaaatttatgaaattaattcaaaataaaaatttgatgttgaaaataccattaaagaatggaaaaaaaaaaaatcatagacagaaggaatcagattaggatttcgggaaacgaatggatgggcaacaaaaatccacactcttttctgctttggaccttgattttagagaagaaagagatgagtgaaaattgtaagaacatatttttcaataaattaaggtgtaacaattttattttttaattttttaatcacaaaataaaaatgtgttttgtaatcattttgttttttaatttataaaaaaagtgtgttctgtaaaattaatttttaatttatttttttattttatttaaatctgatctaaattcgaggtcggattaagatttgggtcaaaagtcaagtttagtactatggtattggggaatttgagttcggatctggtcggagtttaaaatattaattaaaaaaaataatttaaaaaaatattaaagtaattttttttatttttaaaattttaattctcaactaaaaaattaaaaaataaaaacagttttatagaatatgttattgaaaaatatttttatttttttaattttaaaaatagaaaactaattaataggtgttactaaaagccacttagaatatgttattgaaaaatatttttatttttttaattttaaaaataaaaaactaattaataagtgttactaaatgccacttaagttttcattctttggaaattaaaaaaaaaaaataaattaatttttcttggaaagtcatggtaatttggaagtaattaaatatgattatacaattggcacatttgtaattagagaattagaaaaaaaaattggtcgaaattttctaaaaacaaattgataattttaatataaatatagggtgttttttttaaaggaaaagaaaacaaaaacacaccaaattacaaaatatcctagaaggaatctttttcagctgcgcatccaaatttattgtaaatgataatgcaacttagttatttaattataatgcaactgcttatttattagtaatgtaccattaacaaattaatgaatatccctaaaaagaaaggcaagtatagatatgaagcatatgacttaataagtaaatgatgtaaaaaaaaaagtatacacataccaaactatttaagcatatgtatgcatttatggctcaatgggtattataaattttgagttttttcatttttacactttaaaatattttgattttgcatttttattaaactcccatagtaactaatgacttaaatcgcaactaaaattcatataacaaactaccagaaaaactcaaaccgtaaatttttttaaaaaataatatataaaataatttccctataaagaaagatatctacactacttttttagataacataactacactcttactacaactctaataagtaattggagttaatgtctttaattaaagtccatgttataaatgtgatcttattttttttttcaattattagagcctaactaacactacataattcttcttcagcattgttattgagcattaatagtaaatcaataccttttataagtggtgtctcatattccttaaaaattattttcttaagttatatgagacttaatacttaattaattatactaataatattataacaccaaaataaatgttaagtgatactttttagcaattctttttttattattattttattttcaattattgaacataaataattttcaactaaactgtattaatattgatatgctacctgtcttgtctattgacatgttggtaaagttctctaaagttttttaaggttgtcttcaagatcttgtcttttggtcatcatggcatcgagca

SEQ ID NO: 69691 - DNA, 2690 bp, Cannabis sativa
aaaaaaaaaaaaaagagaacgagaacaaatataagaatcataatcgtaataatacaaaaaaagaaaaaaaaaaaagaaaccgaagagcaaagaatcatatatatcctgtgtgtgttacctggcaccccatcaaatccagaatagcattgatcaactgcaagatttcctggttcattaaaatctaaaaacgtatttggattgtacatctgattttcatattccagtagatctggatcatttggatcttcaagcttactaggtgactcaaagtctttaacactatcctcatttagacttaactgcacctcaagttttcgtaaagcttgattaacatcaccctgtgttgtactcaatatccctcctgttccatctatactgtcataatgcccgtttccatttgattggattactgaatctgaagtaacttctattgaccctggactataactctgataatcactaacaaagagagatcctgcattttgagtattagaggggctagggctctggctgaaagacaaaaatgattctggggatagttgagtagcagagccagagccagagccagagccagatcccgacctagaactggaatttccctggaaagcaccaaaacacaaatgttgatttgaaactcaaacaaataactactggcttccacaaaatatgtttcacaatctttcaaagtggttagctgctaaacaacgaaatgtgtatctactgatccaggttaacgtcttttcctgtgcttcaaaaaaggaagtctagataaaatgtgcaagctaggcagaagttctagtaatgagagtagaaagagattttaattttcctctttctttcattatctcttatcactttctttctttctattttttaatttaacttttggcttccatagatagactaccattataattcatataaaggtgtaaagagactagcacagctataatgatggcagttgcatgttttttaatgaataaaactgacaagggattgatgatgcaaagcaatctaaaaaattacctcagttatgtctctgtaatgaacaagaacaatgtgctcatacgccctgccaatataattaagagggaaatgtgaacatatctaatacaggtaattcaaattatataatacttagtaagtgtgcaaatttagttttaaatagagatcaggtatgtagattgcatagccattttgtaataaacatgtttgtgtagtcctaagtctaattgacaccaacaaatatttttgaatgatgacttagcagacacaaaataacagcgaaattagtagaatacttacggatcaagtatccaatagctacgtctctgaaaactgggattctcttctccatgcgcataataacagttcaaagtttcaacatttcccacctaatcaaacatgcatcttgttatctctcaatttaaaaactcagtatagaatttcatcaaattcagaataaatcatgttagcacgtaacaaagttataaactgagcacatatgaagtcagagcttgtgcaattcagtaccaaaacactctgtcactgatgaaagggttcaactgcatattatgtatgttgaatcattatactatttaacatgataaatccagtatgcgccacatttccagcataacttactttagaaattttcaaacaaattctgaaaaattgggacaatcaaacatatttgagctcttgaacattatttatatgcaccatattttgatcagtatagaaagttttaagagaccttaaggcgttcgtgtgcttccccaacagttcttccatccttctttttacgccaattatggccatctctacgaaaaaaccgaaggatcctcttgttatagagcaacaaagatccacctgtgaaatagtccagttaagaccataaacattataaacatacacaacttctaaattagatagaaagaaaagaagtgtttaagtgaatattgttacttggtggctttttaggcggctcctgggtaagtttgtacttctcatggttctgtaaaatgaagagcacttccgcaggcttcagccaacggctttgagcttcttgaaaaagatcattaatatcataccctgaaataatttagtacaaaactatatatcatgactgaagtttggaaaaatcttccatcataaataatccctaacaaaaaatgagtacaaaaggaagtgattttgttatcagagcatcttcaactatgctctctacacacactccttagttaaaatagggagtgagacttgaaaaaataagctccaactatacaaaaaataccctctacaatagggagcaagattagagcaacaacaataaaaaagacactttattttagttttttagcttaaaaaaaatagaaagtattattggagatgctctaagttagcaacctaaaaattccaaggaaacttcaaagaagtatgctaaattgtaacataacagagataacatgaaccacctgtgcagttccaaatccaaaaccttctacatgaaaccctaagctaaataattaactaattaaactaaactcaattattaacatttctgtgtccaataagcttcaagaaattgaaaacaaattcttcaaagtcaaagagttaggaaaagaaaacgaaaaaaaaaataaagaaatctctgcaaatcacttagagtaatcaaatttttaacttcc

SEQ ID NO: 69692 - DNA, 3353 bp, Cannabis sativa
aagtgatctaattacgacgtaataaagattttatatttattttggataaattattttgtattacttcaatttttctgtacatcctatgatcagtatatataggcctgttcaaatctatcatctaagcataattgctaacaattaatatacttttaacacctgctttaattttttttttttttttacagtaggatctattgtttgaagacctaaagaatttttattttaagggactgagaagaacagaatatataaatatatatatttgtactttaatatatatatatattttatttttattatgatggtgaaactatgaggctccattggggtgtagttggtattggaaaaaattggtgatggctattaagataaaattaagtgaaatatggacttcaatgctttaatttatccatgaggaagttcactagtactgttagaaatttactctcccattgtggctgagaggggtcctcaaatctcaggatggcatggtgtgggaataggatgagtattccgaagcattgcttcatttcttggctggctgtgtggaagattacaaagaaagacagattgttcaagtatggcattacatcatatagtagtttctggttaattatgtggatagaatgatgagacccatagtactactcatattttcttcaattgttatcaccactttctttaattggcttggtatcaccaccaattaagaagggagacctttggagccactttaaattggattaaaatgtgtaaacactccaaattcaagaggcaagtgtagcaagtgtaaatgcttgtgtatatatgctttgtaaatagcatatataattaaaatagcattaaaatagagattagttagttgggggtttttactttttaagaatgagaaaactagtaattaagtagaccataaatggtttgctatatgcttaatttgttctgagataattggtgtttgtattgagatttgttgagcaataataaattcttactcacttaaaaaaatcaatgtgtcatatggttttgaggtggaactctccttaagtggacgctttcttcttttattaatgtactgagatacttacatatgttttgtttcagaattgcatgttctaacaccctcctcctcacatgtgaggtctctttttaatcgctcacataaatatttcatggggccaacacacttgtgataattaactgttaaattttctctaattaaacataattttttttttccaggaagtgttcataacaagaataatattctatttttgaattttttccatataaattattggaagataatatataaatcaaagggagtatatgtattaattcaatttcgatttatatatttcatcttataaaaaagatttaagcgcgtgtgctagataagccaatcaaatccctttaattcgtcgttttcatatacttattttttttttttttaagaacaagaaagaaaaagaaaaagagagagaatatataatttagtaattataaaaaataattgagttaataaaatataatttgcatctcttttgggtttttgtggtaggcggctgcgtatgggagttccatagttccaggaactacgtcatttgcttttcagttcatattttaattaattaagctttttttttattattattttattttattatatttgggtgctatatgtgatttagcactttcaaagcttgaattaatagttttcttctaaatttttttgacctaattagatcaaaacaaatgtgattacttaattatacaaatttgtaacaaggatgagtgcatggtagggaccttcaataggcatggtggtttgacttaactttctcatattctgaatcattatgtatagttattaattaattagttagtgagtatttaattagatattcaatttcccataaaagcatctagtgtcaccatggttttgatggtatccaattaatttatattgtgaagtaagagattatattgtaggagtttttacttaataatttgttcactgttttatatatgtgcattaaaaattatatctagggttcaaatatgtttattgagattttcggtaatctaaaataatgaagtgattatatatagagactgaagagatatatatatatatgtatgtatatatatgacgtggagaaattaatgatgattatttaaacaatctttttatgtgatgctagctggtgttaatagagttattactatatagatgttgtttgaatttcagtagcgttttggcttaagaaactaaaatcagatccctctatgtggaaaattaatgacttatatttatatgcagccgtatgtgttaatcatggtttaattagttaactcagtaatggattcaattacaaagactatacaagatatacctaatcccaacccaatggagatatcggcctaatacccgggggttgacttgctttgtcgagtctatttatactgtttttcaagatattaggggacatatactacagtgtgtttttccttactttggggactttccatgaagtacatcatcatggataggggcgagagttgtcattgggaaaccgggtttacgtcccaaaccttgagtttcttgatatatatccatatatgtgacgttaaggataccttgatccgggacgactatctcgccaaattaataagttttaacatgttacagcatctctaatatagtgctaaaaaaaatatattcgttatattttagcatatttaagacaaattatattcgaatagtgttctaaaaagtattgtactgctaaatttggcacaagatttaagattatgtcaaatttaactcacaataaatattattttttatttattatattgccactaattattatcattcattgatttttactaaactttatttaccatagtatcattatttaaataataaaagaatacttgtaaaaaaataataaaggaataaaaaaagtttttttttgtatattctcaataaaataatataaaatgactatcaatacaattaattattttttccttattttacatattgttcattggagcacaattatgtatagtaggccatatatagtacaaactcattttttttactaaatttagcataaattttaaatctcccattaacaaagatagtcttaatatacttcaacaaattaaatccgaggaaaaaaattaaaaaaatcttcagtgtataattcaattaattatgaaaatagtttttatataatgacctagctagctaggaatttcgcttataaaaaaaaaaaaaaaaaagttccaaggtagccaccgtcggctatggattatttattagttctatatatcgttct

SEQ ID NO: 69693 - DNA, 3472 bp, Cannabis sativa
  modified_base (3380)..(3391): a, c, t, g, unknown or other
gaacacaagtgtttgatactgttctcataaaacaattttagaaacaaagtaaaaaaaaaaactgtaaaattacgaaaacatgtaaaaaaaaaatccaaagttttcatcacttactctttcaaattattttatttcattattattaaaaacttttaaaatatttatcattctatagatatattttttaaaaaatatcaaccaaacatttttggaagaaaaaaaaaactcttacaatgtatcatatgaaatttttaaaagacaataaattggagactaaaagatttctaaccatatgtagttttttttaggtgtcacttttatcaactagacaattttgtgtcaatattgaaagctcaaggacattttgtcatttcgaatggaaaataacaaaatccatatacaagtgtatactgcaaggaatttgaaacatgaactcattattttgtaatctttgagaaagatagggcaagtacacacaaaaattgaagtattgaatattgattctttctttatgtttgtttgtcaatttcttttacttcccactactgaaagggaaaatctgcagtaaataataataaaaatagacatcattctctataattggaaagaatgaaaatgagttgagaaaatacacctaattcaagtagagaaattgaaatgctattagcaaatagcaacaataaaacctcatcctcatacacaaaaatagcaaaaggttcaagcccaaagaaaatcattatggaggaggtcttgtgtacatattcagcctcgtcatttgagtttctatatgtataccatttcatccaaatctatatatctaatatgtgtgcctataatttgaaggaaaggatagtaactggtaacagatcaatgagcaaaactatgtaaccaggtaaagacaatactcagtttaatctaaatataatatgctataggtaagatgatttattttttttcctgggaaaaaagtggggtatgaattatgaaatgaaataaaagccatggaagtcttaacttccggtatgaaaagagcaagaggggtatgtgtatgtattatacctatatgtatgttgaattgtccagtgaccaaacagctttagatgactagtcagagcaaatttcagaaaatactggcaatctctttttggcagggccatagagaaccccattgatgtatgcattaatactttctcttgatggagatttcttggttgaggaagaacatggcagagcgacaataataccgtcgtcttgaaggcaccagtcccttgaggccatgtcaaaggaggtggtgccctttgatgtggtgagtgaagtggctcgggttggtgtcatagcccgaagaggggattttgggctatatgaggattgtcctgggctattcttaggcttgctgctcaccggtgtctagacatgaacaaacaaaatctcagagaaatagaaagatagaatgattagcaacttagctataagatgctgtgttaatggtcaatcacctcggttttgtttttgttgatcaaacgagttggacggaggttttcttttccatgagcagcctagtgtgtagaagcgattcatcaattcaaatatgatatcaaaatcaaatgtagtaatgtgatcagaagtcatccctcaatcaagttgaaaagcagagaaaagcatgataaacaataaccaaaaaaaaaaaaaacaaattgaaacttccaagttgcaatgtagtaagcaacaaataggctcatttagaaaagcaaataaaaggaaagggcaaagattggatagagtcaatggtaaacaacatagtaccataactagagaacaactaaaaacaaatgaaaaaaaattggttccttgtgcaacaatctagccaaatacttttactagagagaatataccagttccagaatcctttcgagtatagcttctttagtaaagggtattgattagaccaccatggtaatgcaaaatatgtcttttatagaaagaaagatgtactgtaactatattcactttagcagactctaaaatcaagacttcagagctttaaaaagcatatctacttcccccaatatttgagaaggatcaactataaatgtttcaaaaatgtaaaaccgactacttggcataacatatcgtaaatatgttgtattccctaatatccaacttttggtaaatatgccccgactgactattcatataatactttctttaataagataaaattacttgaaagtttttgaattaacaaacgacacaaaattaaaaactctgcattggatgtgttcttacggaaactacttttccttatcaaaacatacattattttatagttaaaagaacagggaaagaaagaaacctgaattttggagctgtagcgagagcttccaactccgttactaaccggaactccgtccattaccaaaacttcctctccctccaccgccttcactggtgtcctgtaaacctgcgacgaccggtccatcatgttcttcatcggcgacaacacagacgacgatccgaatcctctggaaacgaaaccgctgtgtccagaattaccattaccgccgtaatgatggaacggattacaatgttttgtagcatcgatcaccttttcttcggccaatgcaagatttccggcgattgcagaaccagagcgcaagtacctaatgatcgaagagttgtggtcaggattatcggcaaacgaatcgaaggttgcgctaatggcactggtctggtaacggccgctgctcccaatcatcaactgctgtgtcttcatccccggcggaatttttattcttgaaggtttggagtaattgttaccgccatgaaagttttccatgggtctcgattcacgaatcgccttaactctgcatgaaatcaaattgagaggaaaatttattcgatttttctaaattcccgcccaaagaaagaaactcaagcagagaaagataatcaaaacggaaaaactttagtcttccgatatgtccttcctctgagtgagaagtgaaaacggaaattgatcaaatatagcaaataatgtgtaataaacctgggagttgagacgtatagaggagagtgacaatggcggttgaactctgaaaacgcctcagttcttataatctcaagggagattatcaccgaaactagaggaaacccttattctggatttcttggaacacaaaactcgaaacttgagtaccgaatactgattggttatttataggttgatggtatgtgtgtgttgctcactatagctaatacctgtgcccactggcatcttgaatcgactctaatatttattccaatagaacacacaatctatatatatatatatatataaaaaagaagtatgaggctgtcacctaggggtgttcatccgatcnnnnnnnnnnnnttttggtcaaacaacatccaattcgcactaagtgcggatttcatattttggatccaatccgatccgcataagagtttaaat

SEQ ID NO: 69694 - DNA, 3260 bp, Cannabis sativa
tgatcccatggtgatgatctgttctagctgatcttgccatatcaccaccccctggtgccggcaaattgaggtcgagtttcaaatcaagggcttcatctttatcattatcatcagcattaccctcgaacttgggtctccttagccggctttgatgatgatgaatttgtagttccatgctttcttgaaactgttggaacttagacaaagccgctgaagtgtccgctgcagcagtagtgttggatgtgatccaatggcaccttttatggcctcctaaagcttgtccggaagagaaaattcggtgacatatggaacactcatgaacctttgattttcgtttggatgtggaggctattggggaattggagcggtggtgatgatccaattgtaaggttgaatttgatttggtagggaaaaattcgtcctgggtgatagcatcatcatcggccatgaccgagggaaggctatcatccagttggacgttgtctagccgggcagcgaaacagcctttcactttcttgtgactggctctatgtccgcctaaagcttggtgggaattgaagacttttttgcatgccttgcactcgaacaaattacctttggctactgctttggctttgatgttactattattaagattgcgattattctcaaccggaagcctaaatgatattggtgcaatgttgaagctgatggtgtttcttcgaatttgctcttcttctctgcttgccgaagcacaagactcctccggctcagcggccgttaaaggatcaacagcagcattcgataacatcatcaagcaattggctaagtcttcatcctcactagaaggacaaatatgagaggagttatttattaccaaattcccaacttttgctctgaatgatctttttctttttgaccaattgcagcccctccctcggcccgtttcatcaccgtcggactctggtgaagataggagagactcggcatcttcggagctacatttaccgtgctcaagaaaagatttccatgacatgaattccttgccgcaattctcacaggcccggcaactccgcagcctgttagggttggttctcaaggcatacattcgcttgttggtagccggaatgtcgcccaaggcaagcttctcctcccaatcgctagcggcgtcatcttcgtccaggtggctgctctcgtcgcctattccgtgagctctcatgtgccctcccaatgctctcccacacccaaaacctttcttgcaaattctacagaagtgcttcaagtttgtttgttgttgttgcttgtccacaatcaaagccatgcatacatctatcgattaatatatatctatttattaaataaatatacaaaaacaaatcgtcttcaaatttttatagtaaagaaacaaagagagagatagtagtatatattgtgataatggaagagagaggaagaggagtttcttcttgtagtgaaaggtggtgttgagttgtatggtgttaaaaaaacaaatggtgataataataataacaataagaggcaccagtagtctccttgtttttagttggagtattggttcctgtgaaatttgtggatgagagagagagtttcattgagaggactgagagtacatagtgtataattgtgtgacaagtgggaggagggagaaggctaagagactttttccacgaccgtgtagtatactggtggcgccgccgagtcgaaacaacataaagctctaaggctaaggatgtccgcacattcagtgatattgtctgatgctaatttttttaaaatagaaatgtttattatgatgaacatgtgtctaagagagtgaaaaaataatgagagagagaaagaatgagtagtgagtgaaagagcgcaagagagaagagagaagagagagtggttctaactgccatacctattcatatcccttcaattccaagccaagaaaactaactcaatgcttctccttgtctgtcggttggttcaagcggcttttccgcccttattttttttatttaattatacaatataaatgtacttatttttgttttggactagcttattatagcctcattaattatattttgggtttttggtttcaatgtatgtactcataatagaaatttccttctttacactaattaattatatgacatatatatattatttaaaaccagcagtgatccttatttttctttttggaaaatgaaacagttatgtactaattataatttcatttactaaatatttacgacacccacagcagtgagtcaaaacctaaggtgtctaaagataccaaaaaaaaaatgaacgccgttagaatcgatatatcagtaaataatttcttctaagcatattttcaatgtgcatgaaatgcttttcgcttaactaattatttggcgaataattttggtactgactgaacaacttgaataaccaattaacaccgttagtataaaaccattgaagccttgaatttttatgtattgtttagttaaagactaataacaaatcagcagtcttgtgttgaactgtctttttctgaaggggttaaaaagaaaaatcattaattcagttttttttttttgagataaaaaccgttgtatcattaattaagacttgaaatatcaaaataaaataatataaataaataagatatatagactaaggtagtatactttaggattgaacatagcgcgttcgacccggacaagcaacccgcccggacccgacccagctcacccgcaaatttaaaaaaaaaataataaataaataaaatattatggcgggtcacgttgaacacggtacccccatcggacggattcgccgttcgtgagttaagttttaaggaccatcgggtttcgggttgaaccctgttgcccttgattttgtccaaaatacgtggttctggataaggatgacacgtagaaccgaaaagactaacagttatgaaaataagctaagtcttagacgagggaagagtgactcaggaaaggggtctcccagagaagacacaaagagtgtctttatgctcccgaaggccaaagacctgctaaggcagctccgggaggtactggaatctattgaacaatcacctcgcatttaatgccgcattggggaagacgtattgaattctccataaacgacatgacagatggcgtaaccctcctttgtcagttattacactatgatcgataaggctagtgacgactactctatgaggaatcacatcaatcaagatggaataaaagattatatccacctaactccta

SEQ ID NO: 69695 - DNA, 3310 bp, Cannabis sativa
aaccgtaaaataacagtgaaaactaaacataatacagtgtaaaacttatacagtattttttaaaaaaaatccgctccacattataaaagtaaaaaaggttaaaaatttcagtacgttacgtggtgtaattatcccataataatagctgcattggagaggcccaatgagacaacgttcggttttattctattatgggctttgataggcccaaattgaaagccttccgcgtttctctcaggcccaaagacttaaaccccgcaacaaaacccttagacgaacggtagagagagaggtttcgatctccattcgggactaattcgccgacaaaactgtcgggaaaaatggctaaatggtggcgctccggtgccggaggccttagggttttactgacgaacacaacaacatcaacatcttcatccaaagccgcttcgtaccacacgatccaagccatcccaagagagtgtacgggggccagaatctcagcgagagatcgtgagcagggtcgaatccccaccgttgttttcagtcagtcccttctcgagaaagaccctaacaatcgttcggaatcaaagaagcttttattgacgacggagaagaagcagattcaggccatcgttaagtctgtggatcttcctttcttttgctccacgaggtttcctcttcagatccgagccgggtccgggtcatcagttttacttgaatccgggaatgttcttcctattaaggcaagcaagcttctttagcttattattcattgcaattttgcatttgttgacaaatttgttatttaagatattgttatgtttggttgtgtagatacatagggatgaggagactgggaagatattgaatatggtgtttgtttgggctgaagatggatcaaatttgaagctaaatgtgcccattgttttcaaaggagaagatgtttcacctggtctcaagaaaggtattcaatttttcttctttgattcttcagttcatttttttcaggtttagtttttgatgattgaaacttttctcaagtcaaatgttctgaacgtggtttgcctacatagtaattgttttagttttctagtctctagattgtagagtttggagggaatctagttgaaaaaatcaagtattttgatgtcatacttggtgtgtatttcattggtgtagcttctggctttttcaaatgaagtaatatactctacgtttacttgtattagggtgtaatttacaagactggaatctttcatataatgttaagctcatcacatatgtgttaggaatgtttaattataactgatgtcgagataatgaaaataatagtttctaattaaattgactcaaaataggcaaattgtagaaggattatactattataaaaggattacaacaattttctgtctaaaataaggatagcacaaagtataattttcttttatgatagaaaaaaatactcactctctaacaaggaaaacctacaagtgtgtaagaacctcactatatctttttctaatgctttctctttttctctctgtggagtctctctctaagtcgttctaagtgggatcacttaattctcttatatgtgcccaaagagcacacctttatgcaagttgtgtataatttgcttgtcttgattttataacttttgatttaatcattgccttaatcaagaaatgcaaggtgtacacaacttgtataaagtcaccgtctatgtccagctatatatgtacttcggggatataagtaccccatttttaaagcatttttttgagagttagagaaaattaacaaagggagtgtgttaggagacaaaaatactgaggtttttttcctaacctctaataagagagagggtaccttattttagggtgaacctattataatctccttttgttatgatgaaatccttctactaatttttatttgaggttcttgtttcattatctcgacatagttgtaactgattgcccattatcacaacacataaataaactctcctgtctataaatatttgaagcaagaaattgtaacaacacctaaccattgaagaccaaaaaaaactatagcaataactcagtaacaagtactcaaactttagacccctattaggtattgttcagtacttttcaatatttgatatgattgagtgagaccaccatattattcaatattttttcttcacttcgtttgccctgtatttgaattgataattaatggttaatccaatcatcatttgaagtgatggtttatagttgatatgattgaatgagggtcaatctaaatctacattggtcaagtatgataaatgatgtaataattacattgattgtggccctttttgttgccaagaacaggtggttgtctgaacaaaataagaactagtctaaaatacatttgcccagctgaacacattccttccaaaatagaggtcgatgtgagcaagctagacgttggggatagaattttcattcgcgatgtggaagtgcatccatcgttaaagcttttgagtaagaatgaagacatgcccatttgtaagatagttgcgaccgagttggaaaattcaaattcagaacatgctgccggagtttaaatactcaaagttcatagttgaaggcctttcgttttcctaaatttttgtactgtgaatcacaagcaatcaatcaaacaataaatctgctgctttcttctctaagctaatcgttgaagtggttctcatggattggattcttcggcaggcaagaatttatggctctgattgttatcaattatcttgcattatcttcaaaatcattaaaaatgattaagtgataatccatggagatttggatgcttgaaaatggtgttcagtaatctgttatcattgaattacaaattggattgctggttgaaaatagtaatttttagtttttctattgcatttataattcaagatagtaatatccctttactattagaggggctaagaccaactttatataacagctcagaagtatatgttttaatggcaagtacttataaaatgaggatatcttaaaaaaaaaaaagaaaaaaacgcattactaatactatctccttgaaaaattatttatgctttcttattattaaaacctaaatcaactatttttttttacttttctaaagtcaagttagtgttgtttacaatttgctgtttttttgtcattttgatttgttatttgattaggttaatataacataatgaataaaaacaagtataacacaataatttaaaatggttataattaaataacaaagaaacattagttcttaaaaaaatgaaatatagattaaaaataaa

SEQ ID NO: 69696 - DNA, 4644 bp, Cannabis sativa
ataatataatacttaatataaaatatagcatacgtgcatcgcacgtaacaatatactagtaatttaaaatgtataaaaaaattattaattttttttttcacatgcattagattagttttttttttttattattttaaaatagaataataattctaccaaaatagttaatcattttattaactttctaatattttaatatacaatcaaataaatatttttttcctattccattctattttattatccctatataaaagtgataagacagaatgtataatatatataaaaaatgtatatgattaacaaagacagttattaattaaatatgtatgtattgatcaattgatctctaaaactgtgttattaattattaattaagtaaatgataattatattaatattaaaataaaatattactaattacaattttgcagtgagtctttatgttcaaaatcatatacaagaatatttttaaattttttttataatgatttgttatagctataatattatcttttaaaattttaaaattttttaaataatttacaataccgaaaatagaattcctataatccagcttaccacgactgtttaaaaaaaatttaaatttatttttgtcattataaattattcaaaaaaatttaaaaatttacaaagatgatggtataagtataacgaacatcaccatgaaagaattttgaaaaaaaatattgcggcatatgttttcgaacacgaaaattaattaagaagttgacggtaacattagtggtgtctatcattttttaaatcataatattaatattgatgtaattaaatattataagtggttataatcatataatttaatataataattttaaaaaaatatgacaaaatactactttttatataatgcttgacacatacctctaatattaattgttaattatgaaatgtaggggtggctgttgggtgtggatggcaagcatttgtggcatacgtgaatgtgggttgttattatgtagtgggggttcctttgggctgtttgctgggctttaaatttgaccttggtgttaaggtatgtccaagaagtccatttgttctttgaaaaaaaaaatgaaattaaataactattattatgtaaaatgattttattattagtaaataatcacaatcccatataaatatacagggaatatggtctggaatgattggagggactatgatgcagacttttattctactatgggtgacttttcgcacagattggaataaagaggtaaaggaaaaattaccctttctttttttctattataaccattttattaagaaaaaaaatgtgttacaggattttgtttaagattttttacggatttttttttattttttgcaaaatctacatctttttacaagttatacttttaaaaaaaaacgtttacatttgatttttttataacagcaaggtaaaaataacactcggtagttttataaaaataaaaacttaaaatctataagaatgtaaaagaaaataattataaacttgtaaaatgtaaattttttgtcatttttgaattgtgaaataatccccataaataatttataattcccagtttggtggtaaaatagaacactcaacataaataaatttaaacttatatatattctcataaaagcatgaaatttagaagaaaaaggctaaaagtaagaaatgatttatttcaagtgaaattgtctcaggtggataaggccaagagtcgattggagaaatggggggagaagaagcagcctcttctaaacaagtgaagcccaaatatagctggtgactactactacaactacccttcaatgaaaccatttattggggtttttcccactaaagggagggagggactcagttcatagtgtacccattttcgaattgggcccttaaatttagccatagtaagggccccgttattgacactgtgattaatttaatttagtttttatgttttatactcattattaataactttcatttcacatttcataaaaaaaataactttcatttcactagtattagtatatatgtattttatgagtgattggtgaaattatatctcttttttttcttctaaaatatatagtttacttattttatttaattttcgcaaagtattatatagtttactaatttatttttgtgaaatagcatcccaataagagtcaagtaaattcaacattgtataatatgtgttacaaaatgtatcaactctcaagtatattaggaagactattttacaaaaaatttaaaaatatatattggaaagtaacattgaaaaaaaatattgtgtccagtccaaggccaaacatttcttttaatttcgtattttaaaaggattcatatatttaaatttagaatataaatatttgagcaattttgctttgtcggcagcatatggtatcacacatcaatattatcaaaaaaaaaaaataataataatcttgcaatgttttgtcaaaaataatagaaagtaagccgatccctatttgatatacaagtctaatcatgtacataaccccatatttattaatttacactacaaaaataacaatataaattgttaattagaactcttgggtgctctaattagtatttcaaaccactaaaaattgcatgttttaaactttcgccgttacactccctactccctaatagcttgttcatttgttgaaatactaattaaccgtttattttcacaatagaattgctataatgtaatttttttattattattttttgatttgctataatgtaattaattactgattttttataaagtaggtgagacttaaatacttaatattaaattaaataaatacttttatgacacgttataattcatctatgcaccaaaccaaagaccaaactatattttgaaaaagtaaaaaaaaggccaaactctgtacatacatttcatttggtagagtggtagatcgattaatccacatctcaagcacgtggtcttcaaacacagtcagtctgagtctgagtctcacatagcttagatatttgaccaactttttgttcttccttttcttttggcatatagtttgacttagttatatacatatatatatatagagtggatgtggatgtggacccagccagcgacctaacaggaaccaaacctttttataggtgtgctttgcatgaaacacgaagagatcaattcgtgctttacatgaatcaattatattatatatcttccaaagtacttttcatttatttggcatcttaaagaaccaaaaacgaaaaaacactttagtaataccacatattgcatacggtatattgtatattttaattgtgatatttgtctcgaattttttttaatattttaaattgttacgattctaataaaaaaataatgacaaaagtaatttatcttacgattttaaattaagtctgttaaatatctacataaaaacacccaagacatattttttttagtttattaaataagtaatcaattaatatattgttatgtatttttgagcttaatgcaataaaaatagtaacttttactattattttttttttatgattatatatgtaataattataaatattaaaagaattttgccgtcgtaaatatcttattttaaattaataaataatataaaagattattaattaattataaagtattagttacttatgatgttagacattagacataggttcggtgtcttttttttttctttctttttattttcgggttttatacagtatttttctagtagtggagtactaaaggtggtttttggttaagaggaatgaagatataagaataagaatgagaataggaatgaaataaaatttaaaatacataaaaaaaattaccaaattttttctcattatgtattagaatggtatttccttccattttaaaatggaatagtcattctaccattatgatggaaaattctaccattatgatggaaatgtcattctattgaaataacattctaatactttaatatgcaactaaataaagaaatgaaatgaaaattgtttattttctattctattttaatttattacctccaactaaacgctaactaaacggttaagaaataagcaagaaaaatgaagatgaattcttttaggtcttgtatattggttgaactgagtattaagaatttgtgtgtaggctagcaagctggataaaatattgtaccgaataagttgtctatttattagggaagaaaaaaagacaggtaggagtaccgtacggaatcatcttgggaaggagtgtatgtcactgtttggatcttttcttttttataataacacaacaatattgggcatatattcagcaaaaaaaaaaaacaatattgggcatatatattttttattctcaagaaaaccgaacatatatctgtactgtgagagtatttttttttttttaataaactgtgagagtatatatactttcaaaattgggcatatatttttatattgtttttgaataataaaatatttaaattaaatatgtgtaaaaacaaataatatataataatattattgagttgtcaatattttgtaatatagagttgagttatttgttagtatctataatttttataattatcacttatattaagtgcgtaaaaatatta

SEQ ID NO: 69697 - DNA, 1463 bp, Cannabis sativa
atttaaatcaataaattactataatgtggggtttccatgttgactgggaatataatgtgtctcaaagcataatattggtcattttgaatcattcacataaaaaaaaaagacacatatatatgggttattcttttgtagagaagagaagagaagagaagagaagagaagggtgcattaattgtaagaaggggtatgatatattatttctaaaagtgggtgattctatttaatatttgactctttagttatattcatcactaccatggactccacaatcttaaaagcttggtttgctggtatcagattcctgcccttataattatgataaccacatataccaacttctttccatgcaaacttatacaatacgccaaattatatttatacatatacatataccaacttctttcctagctttgatcagtttttaccctgagaaaaaatagcctctaaatattatccaactctatatatatatgtatttacttgcctagctaatattggatttatctaatttgctagtacaatagcttatataaaattcacgtcaaatggcttatttgtcgttaataattttcacgtataatattattcgatataatcacgatgtttatatatatatatatatatatatatctgtggatcgacattgatatttgaaagtttagcttctattttctatggcgtttagtgacatgcatatacatatgtcaaatgagatttgatggccaactaaatcacattactttcaacttcgatctgatcaaattactaattatatatataaaaatatatttacataatgttgctgactaatttgtttttgtttgctatataagatagatatttgatttgttagataatttagatctggagccaaagctgtcacatttttattagtgtagctactcatgagtctaatgcgtccatgaatgagatgacattatatcacttttagtgatttataatacgatcgcgtgaaaagttaaaacacaacgctatattctcgcttcattattcttcatttcttacctatataaatacaaatatatattatatatatatatatatagttttctgatgtgaagatgagctcttttataggtgaatgaggctcacaaaaatatgaaaaaaaattaaaaataagtctttctccatcgttgatgatgatctaacagtgagaatagcttctcgtgaggatagctattttttggtgctcagcgaatccaattacaggttacttaagcttatattaataactctttaagagtaaattttgatgacggtagcttcaaaattacaacatgacttgatgaagcgcttaaatagcttcaaaatccaaattgaatcacatcaattatataaaaattgaatgatagttataactgttttactgaaggtagttcatgttccagtgcccaggttaacatctattgcctaagttgacattccagcgcccaagt

SEQ ID NO: 69698 - DNA, 5013 bp, Cannabis sativa
  modified_base (96)..(114): a, c, t, g, unknown or other
aaataaacttaaaaaaaaaataaaactaattaagttagaaataaaaatatgaaatatgggtttggataataagtttacaaaaatatggcatatcannnnnnnnnnnnnnnnnnnaatgtaaaaaaataccatagaagaatcacaaacctataaatatcatattttgtaacttttttacaaaatccatatttcatctaattttcactataaataattcatccgatagttattttataaattaaaatgtcaaaagaggaaattgcaactttatcttaaattggaaaatgaccataaaagacaaattggaaatttatttaaattgatacatttttttaggtcacaaactttatttaaataatttaaatgaggacattactaaagtgggccttgaacatcatttaaatgggaaatcaagtaggggtattttggtcatttagtgggagcatgagtgaaggttctttgaaagaccattcagtttcttgtttggttcaaaaatagagaaaaaccaacatttcttttcatcaaaaaccagaaagccttttctttatcttctcctacaagcaaacacgataacaacataacaccattcctcttctcagatctccactctcattttgttccattttcactcctttgaagctctcctcaagtcttagctttgatcatctttcttgccttgaagcaaaagaagagaattaaaccttcatattaaagtaagtttgtttctgttcatgggtgaatgaggtgtgggtttgaagtttttacaagcttggaaagggtacaaaatcttgtacatatgctggagtggggtctaaagtcaattccccaccaaaatgaagaaaataaaatatatatttattcaaacatactaaaattcgagaaatcaagcaaacagtaaaaagtagttgacattgaaatacaaagaaaacaacaccaaaacaatactaaccccaaccaatgtcccactttcttttcaacaaaataaagagctgagactacctcgcgggtcgaccgagtcaatacccgaaccaccattcttcaagctgttatatccttaaataacacaaaaaactacttttggctaaaacagaaatcttcttcttccatacacaaacatgcatgcggttcgttcttgactcgacacccctttgttatatatgcgtttcatctcaagctcctcctatttaatacttttcttttacctacttatacttaatgtactcaaaaaatatatatatatatatattgttcaaaatcaaaaacaaaaacacaaagttcttgttccttcacctatgctgagggtccactaagagcgcttttgatcttttgaatggtgcaggagatgagattgttaactgtctcaactgattcaactgtaagtttggctgatggaagactattaacaagtatttgaaacccaactgtgaggatggatccaccactgtcatcgccctcccctttcactgaagctccgctagtactctcattgtttcccgaaagatagccagactgcgatgatccgtcgggaacaattgcgaatcctgatggtaggagagctacataagcagagtctccgccatgcattactacgtttattgctgctgagtcaactggtgcataaactaccatggagcccgaggaatccgtccacgtctcttgtaatatgagcatcgtgctgctgtcgtttgcacccatagactgcaaagccacagtgcaagttagaaaaagatagaaaatactcgaacgagtaaagaaaaaaagcttgttggacaaatcgcttacaccagcacgaaggagtgagacatggttgccatgtctttggcctttggtgatatgcaccatctcctgcattggtccaccattagataaaatatcccactcgctcctcaacctttcatcctgtaagaattcaaacactctcttctgtgataccggaatccaaacagaagttgcagcactgagaatgattccgggtggttctccaggatcatccatacttttccgagtcatcactcttacatcttcaccaacattgtcaacacgaagtttatcccacttgcgcacagtagaggcacagacaccggcacagaagttatccaccatacgctttgccaacttcagcaagctccttctaccaccgagactcaccgctgttgagtaatggcattttgttagaaatacggaaaatctaaaccttagtgaaaaggaatgtaagagctatgaacaagagtaacctatttgatcttcattaggaatcgagggcgacataagagtagccaagtactcgcattgtctttggagagtggcaagccatctctgtgcaccaaagcccaagccagaacttatatatgagcggaacatttgatgaacaccactagcatcgtactctgtatgttcaacccacgtaacctgcaaattaatgatcactcatcaacatacaaaaaaatataaatatatgtatataaattcaaatttaaattgtatcagtaaaaagttggtgctatgtagatgttgtttagggtttcaagtaatatcactaaccaaatcccttttaaatgttaacaatgttacagcttcatttgtttgatatttaataacattttattattaaatgtaaaccttaagcctgattgtatctgtagtgtttcatgattaaattaggttagtagtcttactaaataatgtccacagggtttgtttcaaagtttgagaattgagacaattctctaataataataatagcctataggtaactagacgttgcttaatttgtgagatcaccaaaaaaagattcatcatttgagtttaccaaaagacccttcacaagtttaagggaacatgagatctagtcagccctagattaacctgaatcgtgatataagattcagaaggtttgcatatattaatgaacaaaattaagacttagttcttatttacttatttagagtaattaacggcataaatatataaattttaactttcagacaaatgaatacttaagtttaacttttaacggtaataattctaaaattatatttttaaaactctgtaggtatatttaaattaatttttttgccatttcttattggatcaattaataatttcagtggtaatttatttaacatttaataaaatagtacctacggagttccaaaaatataactgaaatattattatagttaaaaattaaattaggtatttatttacaaattgaagttatatttaagtatttataccctaaaatagtattcttattattctagtgggcaaggtgaaaacactcagctgtcaatttgtttgctaatttaccatgcagcactcagtgttataaaatgatatattaagaatccaaacagattgaaaataaatcaataaataaatattgagataaattttttactaatgagacaaaaacgtggccctgagggaatatacaaatagagcaatttaagataatatcacctagagatgagttgacaagaaacccaaggaaaattataaaataatagcagcatacagatatagaagaaaagaaaaagatgaagagaaaaagtcaaagttgaagtggcactttcagcaagatatgtcatgtcatgtcagattatgtaaacaaagaatcacaaaaaaaataaaaaataaagtcatttttaaagtttcgacaaagagattttttaggaatatatatttatggcgcagctaatatataatgataagagcacataacatgtagatcaatatataatcctatgaaagactggatccaggtcattaagcctcgtagacaataaagaaatggaaaaaaagaaagaagtagagataggaatagaagcatcaaatatatagtttaaacaccaaagattgagagtaccaaggtttgttttttttcttttttatttcttaaattttcttaaacttgggagctgattataaaattactataataataataataataataataaattaaggttacggaaatcgacatgaagatgtacactaaaaatattaaataaaaaataacactgaggacccctgattttctcatcgtttagagtggctatatggactaattaataacagacaacaagcaactttgcttcgatatttgaagattatatgtttatataatgatcaaaaccagaaaggcatcttccaaagtaaaatttataataaagggtacagattcttaggtgaagtccaactatatttcatttagagcaatcccataaaagagagaagcgtttttggtgagcactagtcaagatggtgggaatctcagcagtacatcataatttttcacctagtttttgtataagtctctctcaactaataatattaacaacactttatgcagttatgtcaactaactcattaaatatatctaacaatggaagataatggccatggcagacaacaaacacaataaagcttagccagcgcaagtactagttgagtgtaaaaaacaatttaacaataacaacaagtacaatttacaccagattatttatttggttatttaccttggaatagccatcaggcatatcttgcacaaggcacccagatggaagcctcctacattggaaatatgactctgcatttaaagcttctcggttgatgtcgatggaaacatcgaccacggcccagacaccatccccatgttgtttgcagaacctgatgaactttagcggacgaagaggaaccaatggtgataggacttgaagctccacatgcatctatcatcaaatataattattatttattcaatttattttttggagagcatatcaatggaaaatggatagagcacagtaaaataccactccaagtgctccatttctagttcctcccatcccagcagatatcatctcaatagtggaggctctagagatcaaacaaggaaacatttctatccatcgattctgacaacaaaatagtgaaaccatcaatagtgatgaacttctagcattggaataaaagatcatatgaaggtattcgaaagtatagagtgaaaat

SEQ ID NO: 69699 - DNA, 4473 bp, Cannabis sativa
tatatatatataaatatgtagatatcaatgaaatatacataattttatattaatttatttttgggttggtgatcatatatcatgagaaaccagcaagctctagtgcttataagaacttgtgatttaacctctcataatgaccctcaaaagaaagttcagtatcaacatatacacatatatatatatatatatatactacatatgaaacgatcatcaacactgaaaaaagaaaccctaacattatattattaattaatctcgatcatgaaccagacttgcatggaactttgttgtagcagatcatgttcactttggaaatcttcaaacttttcctgtacgtacgtacggtgacttctcactgcactactatagctatatttataatactatatacatatatataataatatgtttatatatataatgatgaagatgatgatcaagtagcagttgaatcgatagctagtgcaaattatctcccatttctatggcattgagggctttattcaactcaaaatcatcaaaataagaagaatcgaataatccaaaatcttgaatcccaaagtcttgacagtccataagccatgatgatgagcaataagtatcctcaaaagatggtaatatatctccattaatacagcttgatggtggtggtggtggacacgagagatgatcatcagaactatttatactactattattgttccacaacattaatgaattagtataatcatcatgatcaaccagctccgggggagactttatgttattgtcgtttatccacaaatcgttcataaacgactcgtcgttggaaaggctgttgttgttattattatgatcagctaacaaccaaagggactcctcatctccagaggaagtagtggagttttcggccgcggccggagatgaagcggacgagttttccacctccgtcgtggccgtactaccggaactttcttgagaatgatgagtagtagtagtggtggtggtggtgttattagggttttttttattattattatcatgttgggatggttcgattgttgtttttgaaggtttattaagttgatcattatctttattgatgataatcagaggttcgtgtgtgactggatcaattcccatcttaagaagctttttctttatgtgtgtgttccaatgattcttgatctcgttatctgttcttcctggtaatcttgatgcaatcttcgaccacctatactcaattatatttggaaaaagaaatattattaattgatttataatgaattagttaaccagttttattaaagttattattataatataattaagttgctgtatttatatatatttaacttgtgctcataaatttctaattattttgtttaatgatataattattattatctctcttttatcatcaatatcgaatcttcactattaagcaattatgcaaccatataataattaattggtcaatagattccatcaatagcccagaataagtaaaaaataaaagaagtttctaccttatgtattgtgtatatatatagatatagatatactgtattcctacctaacgaaaataagatgatcgtgatatgtgctatttagtataaacatatatataaaatatataattcgtgtaaacatatttttgtgaaagtcaaagaaaaaaggcgtcaattataagtttcaaactaatattttattgatgtatatatattgtaattatcgtttaaaattacatgataattgaagacaaagttagtattgaaaacaacttagtaacgtactaagttgctagctacaccacaaaaaactaaaacttagaaaaacacaagaaattacctattgtttataataccaattttaattaattaaaagaaagttaacataattgtgatcaacaagaaaaaaaaaatgcatgatatatatccttcataatgaacaaattaattaaaacatataataaaaagtaagcaattattttattacctatttccaagacgagcatgaagatcaatgactaactgttcttcagcctcagttaggagacctcttttgaggtcagggcggaggtagttggtccaacgaagacggcaactcttgccacagcggcggaggccggctagtttcgggacagctcgccagcagcagtggccattggtgagaatgaagttgatgagtttcttgtcctcctcagctgtccatggccctttcttcaccccaagtttatcacaacaaggttgccttcccataactatgtaacactacaaaatactacttattattattattattaactctatctctctgtctagatctccctctctttagctagctatctacaatttttactcaaaagtactataatagtttcactattaatatcaaaagcacaaaaatttgggctctctctttctttaatttcctcaccatacaaataaagacctaaaaagtctcacacccacctttatataaagatatactctcttatgtatttaatttattttcttcttggctgcttaatattcaacatatcccatctttattataaacaaaaacatttgtcacacaaagtaatgaatattattattattatcaaatttgtgtgtgtgtgagagagattgagacttagatgggacccatttttgggttgtgaaaatgaaagaggaactaatgcgattaatggatggtcttggatctggtggaaccgagtccatagtagactcaaattggtggccaagaaggttgaaagtgacctaagaagggtgtctaagtcagcaatttttaccaaaatgtttagcttattataattattattattactcccatttttcctacacaagccaaactgaccttgattgcaatcttactcaaccattccatcacctatttcgtcatcaccacgtttacgtgtccttgttgtggactctcttcgtatatatgctgttgcttacaagtctaaaatcttgctctttagtaacaccatccaatttctattccaatactgtatgtatagtttgatatatataatatatatatgtgtaatttaaaggaatttttttaagtccttaattgggttttgttttattttgaagaaattagaactctcaaaatcgttgtcatcttcatggaggcagtttttatatttggaggatatatatgtatatatagtacttaataatttggtcatatggttctttcgagtgctaccaatcataacacgccagaatttttcaagacagccaattatttttaagaaaaataataattatacttatttctaaagattattattgagaagaaattgaaaatttcgatttagtacattaattaattgcatttccaatagtaataactcgttctaagaaaattaagaaacaaacaaaacaaaaattagtacagcatccattaaactcaatcttagaggttgtatatatttatatatatttatcatataatcaatggattgttcaaatctttcaaattagtataatttattataaatattgcaatcaaatatttgtatgtataataaggttttttctttctgcaagtatcatgtgaattaattatatagaaacaacatggcatttgcattaatattattagtagtagattatgacaaattaatgtgtccaaaattgtatagttaaattaccctagtcaacccctctaaaaaaaataaaataaaaattaccctagtcaaatatatttgatatatagttgtttgtgcgctctctcatttgaaatagttatataaatataacttttaagagttggaaaaaacccaagtcatatatagttagtaaacaaacacttaattaactatgtttattgtctttagcttctactgaagattcaactacttagtagacatgtcattaattatattttactaaatcaaattcaacatgatatcaataaacaatgaaacgactctcacatttagacagaaaaaagaagacaaattagctagccatctcttcaaactagctaatatatattgatatatatatcttaaaaatgcaatcttaaattagttcccaggttatatcaaccatctagtaattaaatcgatttatgattattaatcaagtgtccatgccaaaacaactatttaatatatatttatacatatatacgtgaaactagtatgtaattgttgttaagatatatgcctaattactttgcctaatgactctatttttagttagttagtggtaatgaggaattggttggtagtagtgtggtcttttcactaattttctttttattatactttttttcttttgttctgtggtccaagctgtgtaaaggtgacaacagggccgactctgaaaatatatgggcccaagacgaaataaattttgtggccctaaaaaatacataaaaaaatatgggaaatttacaaaaatactggaatttggattaatttttacaaaaatactgtcacacggaattttttttaaaaatactgtgttt

SEQ ID NO: 69700 - DNA, 4994 bp, Cannabis sativa
acataacaagaacatttctttcttctcggtatgaagatttgatcataatgtgaactcactgcagaaggattagtgacttgaaaggcgagagctcggaatttccagacttaagaagcatgaacaacatgcagaaattgtgagtcaatattcatgttttattattctatttctttctaattaatcatttgattagagattttttcttgaaattgcagaatgttgagaagaatataagaggaagaattcctgactatatatctacattgacaaatctggtgactttgtaatgcttctttccactcattttaccacattcttcaaaatattcataagatgttaacaactgaagttttactttatttgcagagaccttagctttaacagattggaagggactattccgaattttgcaaatataatgggattgagcacaatgtaagtatttgtaaactatattcattaacatgatcaactaattaaataatgtattatgttgtagtataattatatttccaattaagcagatttctgacaagtaaccagctgacggggctcatcccggactggatcagtagtagagataatcgatagtatgttttttccatctcttatctttctttttacttaaatcatatcaaatcaaatgttcattgtagaggaaatgttattggtatttgattgaacataacattattggaaatgttggacatattcaattgtgattaggaaaattatgttatggcgaaattgcttactcttggctaattaagtatctcatctttatttgcagtgcaatagatctttcttacaataattttactaaaatttccggtccaccagcttgccgagaaaccttgtaagagttgctcattcttctttctttgttactttcccttttaccatttttcgtaaacgttttataaaaatgaaattcactggtgtgttgtttcatcagcaatctgtttagagctttttcgcagcaaagcaacaagtaagctcaatcttaactaacacgagcttataaacatcaattgataatcaattttacacaatctaattgtacttccttatactatactttaatgcagattactcgccccgtgcttgaatccatgttcaaaaggtaatcaaacttgttatttcccccattaaagcgccatgattcttatgtcttcccattcatgtagatcgatattcggtgcatataaactgcggtggcaaagaagttaccattggaaacatcaagtatcaagccgatgaagatgtaggaggtagtgcaaagttcttccagagtccagctgattggggatttagcagcactggtgacttttgggatatttggagtagcacaaaagaccacatagcaaacaatgcatctattctccgaatgaagaattcagagttgtatacaactgctcgcctctctcctctctcgttgacatactatgctcggtgtctagcaaatggaccttatactgtcaaacttcactttgcagagataatattaagggacaacagatcatattacagtgatggtagccgaatgtttgatgtttatgtccaggtaacttcattggcatattctgcgtagttcttctgaatttcgattatctaataattcacttcatgatttccaataggatctccatgcttcattagcccatactgcgtttgaaagaaattaaaagttgaaaaaagaggatttacgcttaattacactttttcttaatattgttatgagcatacatgacatagtattttgtgtaaagattggtgattgaaaggggactaatttgtagggaaaactaaagttgaaggactttgatatcgaaaaagaggcaaagggagttgataaagaagtgattaggaactttactgcaatggtgactgataagacattggatattcgttttcaatgggcggggaaagggacaacaaatgttccgaggcgagggatgtatggttctcttatttcagctatatctatggagtctagtaagtacttatgtagggattttcttgctattcctacactaacttcatttacaagcaaacttgctaacacaagaacttgcttaaccgaaaaataaaccatctcgtaaaagaagtatttgataatgattttccgcctaatctatggttctttcagtaaagaacacaacatagttaaagaatttggactctgatttggaatttttgtcactcttcctacttgaaatagtttgatacaccctcgaaaactcgttcctcacaattacattacatacaatatcttctagtaacatacacactcaattacatctctctctttcaatggtgtcataatacatatttttctctgatcacaatgttatccttttcacaatatgtatgtatagtgctcatagacatacgagcggttacgaggaagactgatttgagtaacaaattttagttgacagtatgtgtttcctagtgtcatctatctacttatgtttggctctaaattttcagatttcaaacctccggatgaacacaggagcacgaaaattattgttgctggggttgtttctgcattgctccttattctcatgatcttagttattctttggtggaaaggctactttggaggcaagccatcaagggaacaaagtaagaactttttcttagtgtttattatttgatctcaaagagactcgaaaatcttaatgaacttgttctttttgttgacagttttgaaaggattagacttgcaaactggtttcttttcatttagacaaattaaagcggccactaataactttcatcccgaaaataagatcggtgaaggtggctttggatccgtattcaaggtattgtgttttactatgttgtacttaagattaactcttttaagtaaactcgatatgaatgtggattttcgttgcagggtgtgctgttagatggtactctaattgcagttaagcaactatcttcgaaatcaaagcaaggaaatcgagaatttgttaatgaaataggcatgatttcggctttacaacacccgaatcttgtcaaattgcatggatgttgtatcgaaggaaaacaactattgttggtgtatgagtacatggaaaacaatagccttgctcattctttattcggtaagcttaacaatcgatctccattagcatatttttcaaataccattttgataaatgtcattgatctagttacctttttcgataaaaggtggacatgaaggtgcggcgaaattagactggccaacgaggcagaagatctgtattgggattgcgaaaggtttggctttcctgcacgaggaatcgccactgaaaattgttcatagggacattaaagcaaacaatatactacttgataaggaccttaatcctaaaatttcggatttcggtcttgctaaactagatgaagaagagaacactcacattaccaccagagttgctggaaccatgtaaacaccattacttctatcgatttaattcttatttctgaacataccatttagtttgacatgattgattgctttgcagaggatacatggcaccagagtatgcattatggggttatttaacattcaaagcagatgtttacagcttcggaatagttgcacttgaactcgtggctggaataaacaatatgaaatttcgcccaaatgaagattatgtttgtcttctagattgggtaagactaaaaggaaaaactcttttcttatgttcgaatcccagatcgataatatgtgaaaacttaatattataggttactcagactactcttcttattgtcaattggttttaatgatagtgttatgtatcattattcaggttcttgtttcgcaacaaaaaggaaacttaatgggagtggtggatcccaagttggaatccgagttcaaccacgaagaagtatttcgaatgattaaagtagctttgttatgtactaatccctcaccagcgcttcggccaaccatgtcagcagtagtgagcatgctcgaaggccgcacacttgttcacgaactgattatggacccgagtgtttatggcgatcaatcgagattcaaggccttaacagaatacattgatcacctcagaagtccgagttcaaaagaacctgctcagcagagtttcttctattcatctgaagcttcgaggttaggccgttcctcttcgacagccccgtctacatcaaatagcaaccaaacataaactcaacagaatccatcagagtgctaaactacattcattaattcgttcaattgtacataacaaactaaatcgatgctgtagctttggttcttgtcccgttttggagacaaattccgttatgtactttaggttcggttttatgtgagattagattggttgataattgtccgtcttttctatatctatatcttatgaaagccctaatctttgaaatctagatgtttaaatataagaagagcaacatgaaacttttgcacctatatatattatataccatttgtaggaaagtacttatgtatgacatacaacaaccaaacatattctgatgttaaaaaaacacaacctaatacattcaaagggtggaggaggagaggagactcattccttcatattctttagtgacgttttataattgatcaatcataatattacacgtaaatactaatttgactcaataatatgtaactaatattattatgaaaattaaagtattgacaaatttggataactactctattgtttatttaatctacatttgattgaaaatcttcaaactatgaatatgaaacgaatgagtctatgcattatgcactcatcttcttgtaaattgttccatgcatcttactctcatccaacttttccaactatacaattctacaattctaacatgaattagattagagaaaaagttcaagaataatctccattcaatgaaaaaaaataaataataatccctctatactaagaataagaagaaaagaagaacattaaattacaccaaacacaagaataacattatta

SEQ ID NO: 69701 - DNA, 3186 bp, Cannabis sativa
tcaagaggattttgagctgcatagcaaggaaccttgttgtgagcttaatgtttcaactctcaaccagttttttatatgacccattattgagtgcacatatgtattgttgacgatacatatttttttagtacatttcctaccaccgaaccctacaatttttggctttagtatttctccgtgagtaatcaaacacacctctttgtgaagaaactttaggcttcaccgctcgatctaacgtgatgtaattttttttaaccatgtattttgcagatatttcatgttgctcactattggtttgttcgatgacttgtaggtattcgctgacaaactacctgaagttctagatttttctaaagatctcgggagcttggaacctgcctcaaaggtatattttctcttgtcttgtgaaaaccattgatatttaataaaatctcactcattaaattgttcctttaacttctctagatacaactaaaaattttggctgaggaaatgcaagccataagcaagggattggaggaagttgttcaggaattgtccacagcaaataatgatagtcttgtactggaaaacttttgcaaggtataaatatacatcacccaacttatatatcatctttatttccagccaaaagaaaaaacactttgcatacctgtgccttttcctttatagttaaaaggaggttcttatttactagatcttgattgacgtattcttcgcaaagccattttacaagcaatatgattttgtgggtatgcatgggcatagcacagtacttatttctaagatctagtaattaccatttgtgcacataaatatattacagatgaggatgaattagccttatgccaatgcctaattagcataattaatgagttgctgctattttgaaaagaatcttcttagttttggagaaaaaaatgcaacttataaaaatcgtttgccagaatatcagactcccaaacccgtcaatcatctaaatatcttttactttatgtatgctagttattgtgtagctaatgatactcagtgtttgataaatcaataattatgattagtatgttttacataatacctgctaagtttttttccctcttatgcacagaccttgaaagagtttctccaatatgctgaagctgaagtgagatcattagcttcattgtattctgccgtggtaggtttttcattccaagctgctaatgtttaatccattagattattatttattcatcttggagttcaaaaactttacagggtagaaatgcagatgccatgattctttatttcggagaagatcttgctcggtgctcgtatgaacaaggtatagacagaacttgaacctgaagtgaatattcaataagagaatgattgccccacttcactagcttcagttttttgattgccttttttttttgaaccaacgtgtttcctttgctccagttgtttcaactttgctcaacttcacaagaatgttcaaccaagcccaccgggaaaactgcaagcaactcgagctagaagcaaagaaagccgcagaaagcaaaaatatcaagattgttgattcgcataaacggtctgaagagtatgtcaatgtatgatccagtatgcctggaacggaattcaaactatcgactcgctgcaaagactgttctttgttaaattttgaagagaaaatgtatatttgtcagtaaagggtttttttttttttttcttttctttcttttttttttttcgctaaaagcaaagagttcaatcaaaaggagttaggccagtagcccaccgcacattacgccgccgagccggccatctaagaggtaactaacatacttaccacaccaagttcatattcattgttgacaggcataattaaatccacacacacaaacacaaattcattgttgtaagtatgaataaaaaaagagttaaaattttggtaccagtttctgcagatttcatttgatccaacctatagagttagtcttttggggcagtaaatatatctttgccagttgttttgtttgtttgtttgtgtacattttatgttccacacattcattgtaagacaaatgcatttatagcattttatttgcaatgaaagacctttttaaacttgataaactaagttggtaacttataaagattgacaatctatgttacacaaacgggtctattatattacaatttattttgaatttagtttatttttaaaatttaattaggtcaaagattatttttttcttatctttatagccatatgtgtctagtaaaattcgctaaataactaacgatacaaaatactaaaatttacaaaatagttttacttaatttactttatgagaccacggtaatcgcacggtgtaaatttatggttgttttgcgccatcaaagttgttatgatcgcacttctgcagccatacaaaattattttgttaataaaaaattttataaatgttacttttacaaaacacctatgcctctaagggccgaagtctacactttagatttagaaaaaaaaaattccaatttaagaatgtgaatcaagataattttgaactattgatttagaatattgttttgttcaactcgattaaattgtgatatcttatactcatatatttttccatcaataatgtgttaaattcttagacttaaaagaaaaacatttgtattaagttacaaaatttacttcattcatataccgcagaagattctttttcttagagaaaaaaaatgatcaaatgcttattaaaagaaaatattttgatatgatttttttactagaactttaactaaaattttcgagatgttaaatggtaaacattaaaatgtttgtggattgaaaatgtgatacatcggattttatcaaaattaggatgttagttcagttagttgagtcggttttagtctgttataacctgttaatttggtctcttgattccgttactgttattacttctgttagtcttgtttggactaaacttactgctatatatacatagctcttttgtatcagacacattacagtaataagaatatacagagcaatattcagttgctcctttttctctcttctcgagtactctgtactctttttcctcatatggtatcagagcaaaaatcaaacaaaaaaaatctcttccgacctaaaaaaaaacccgatcgaagtagagccaaaaaaaaaagagccac

SEQ ID NO: 69702 - DNA, 2043 bp, Cannabis sativa
tatatatatatatggcggtgaaaagaattagagaaatatatgatatatattaattataatgtgagtaattttttgatgaatgatattttaaaaaaatatatatttttataatttatttattttaaaagtagttattattttttattaattgtgatataaatatataaatttatttatttaaaaaaacatgataataataataataataataacgtatagtattatatacatagtttttttaaaaaacataattagtttatgctagatattttttataaaaaatttattaaaataatagtaaaatattaaatttatgctctaataaaatattaaaaatgagagaattaatgagagagaaaaaataactttggagagatcgattatagagtgttatgtcatcgttctattcctctcctttatatatagatattgcatatgtataaatattaaaatatgcattaatgtattattaggtattgtcatttgtttgattttaacagccattgcttcgcccactaccttaggcaactccaatttatcagtgcaatcaacttggaatttaatagtaagaaataagtattaattaagtaaatgttttttaaatatatctacttaaggttttaattctttgattattgattttgattatgaaagatgcgaaactttagaattagggccgactctgagttaatttgggtcctaaaaaataatttttttggacactttttataacaataaataatatttttaaaaattattaaaaaatatatatatttattattaaaagttaaatttttttatttggacccctaataaaagtgggccctaggcgcgggcctagtccgccttagcctagggctggtcctgtttggaatacagataatatcatgaaaaaaagaagaggagtcaaagcctaagccccaaggaacgtttcaaattcaagttttaatattgaggagccgaggcaccaatccatgtatttattttataaatgattatatggacattaaatatataagtatatttttaatttgaacattataactatgaatatgtagtaatattatggactatggtatgaactttaatagtataatatgttgtgtattgtatagtgtgtagtagtcacatgacacactaatacaatcacaatctttcttacttactattactatactacacatacactatgtaattttgattttgattcttgaacttttgaactttagattgacttttataggtgtagattaaataaaagttttttttaaacctaacgaatatagttgatggtgcttaatttaaaattagcaaatggtgtagcttcaacaagagttgttcctcctttagacattgttcctccaccaggggatgttcctccgctagatgctgctcctccaccatggatagcaacattaagagtctcaacgtcgaaagatataatattgttgttcacatttgtctaatccgtagctatgttgattctcctctagaaatcatcaaatatatgtgtttctcataaacggctccaaatgttgtcagaagaatttagacaacatcaaatttatgtgagtattcaatgcaaataagaacactcaactaaaaatgtgtgtgtactgaattggctactaaacagatgaaataaaagcataaaataaaaagaacataagaggattatagtagttcaatcagagtttggtttgcttagtccactgttacaaaattttttaattggtttatttgatttagatcactcttttacatagaaagcaaatgtcatttagatttatataattaattggtttctgagccgtttttatattaaataacaactttaattgaagtaaatgttcaaagagtaaatgaagaacgttttaatccattcttgtatatagtatagcaacgtatgtgacttggtaagtcacgagttgcttgttcatattccaacacaagagctcgcatgctctagggagtttgtactcgtacggtggtcttcgagccctttgtttggatatctgcgtttacctttgatcgcataaatgg

SEQ ID NO: 69703 - DNA, 4343 bp, Cannabis sativa
  modified_base (4088)..(4089): a, c, t, g, unknown or other
aggaacattacaccagctttgaattggatcttcaaacatagtcaatcaacttaacaaataaaaatgaggtaggttaaatagaatgagataataattttctaaaaatattgagcaacatatatacaaaagtttgtaaacagcacccagaatagtgggaagatgtttgacatataactatggccctgtcattaaggagaagaaaagttcgaggagcatctaataaacaatgaaacatataacaaaatctaatagatacattaaatcactgctttagtaactaaacaaatatattttagcccaaaacttgtatctcatcaatcacaatcagttatgactcatgtgcaataccaatggcacaacttttgcttatacttataacttatcatagaaggtcttttttgagaagctaggaatactagcttcacataaaagatcttaaaattaatgaaaaaaaaaaggtctttttaattattacccaaacactcctaaaagtgtttttcaattctaaaagctataagaagcttaaaaaaaggttacctaaacagggcctaaaagaagagaaaaacagaaatgacttcctatttctacgacaaagtagcaagtaaaacagagaaatgcaaaaccttaatggattaccttcttatctgaagtctcagtcatttcagatggtgaaagttgatcgttagttgataatttaacgaatgtgtccctctctgtagataatattgcaccatcttcctcttgtgatgacagagattgaattacacttttttgtttaaggcactttgaaggctccatatcaacactattacaaacatgatcaagtccaaccaaatttctctcattttttgaaattttcactaactgcaaagattgctcatctttatcattatgtgattccataagtttatttgtaaactcttgaccaagtgaaaatgttttaagaacatcttcaggtggtggtttgctaggatcaaaaagcattgccacatctctcaacccagtcctttcatgctcctcctatgagacccaagaggattacacaatcagtcataaaattgtaaaaacataatctaactcatttacgagcaaataaatgaaacatgtacctcccaaattggcacaagtgactgaaccattttcacatctgaaatagtttgtgataaggatgtaaacactttcaactgctgattaagaatctctgcaaaacgacaaatatcatataattttaaccacaacacaagatgataatgtagatagatgcgagtagaggaaattcaaggtaagcaaaccatctacagtagcatccccttccagttgacaaagactttgacgtttaacagaattaatgtctatgtctggagttggtgatgcatcatattcacaagaagaatgccacatccaatcatccggaacattagaagatatccaaactggtgaatcaaaagatgaactgccacttatatctgcctaatgcaaaattccatataaagaaattagaatagaaacaaaaactcatttagttccattctccaataagtatgggtaatgtcataagaatgacctgcgattcaggagggaggcatgtcatgggatccacattttgtcttggatgttcattgtaaaaagatctcctcgggcagaatacatctggtacaggatgacgaaacctcatcttagacagatgtacatgacccatcccatacaaattgtagtcaatctaccatatcaaaagttcacattataaagatgagggaaagaggcagtaatagagggaaaaaacaagccagcagtatggggtataatataaacttggagtagctgtagtagtaaatagtaataaatccgttggaattgtgtatgtaagaagctaccagaaactggagaataaatggaatgtgtgcttcatggggctgtaaacttttatcaagaactccaccaccctggaaacaaagtattactacaataaaaatcataaaaagaaaaacagtaataaaagaaatatccattaattgtgtatagagacaaaaaaaataggtacaacaactattgtgcaacatatgatagatacaatgccataaatcgtatgttgcacaactatttgacaacagctaatgctggatcaaatgtaagctaaatataatttgaggggagaaaaaaagaggccctccgttgaaaaataaaggaacattaatttgacacttaaagtagcttttagcaaaaaacaaattacacctaattagttttttacataatatacttatagtaataatatagggggtggggaaatctgaaatgcaatgaccatttcaaccacaaagagtaaaactgaacttgaacaaaaatatacaaaattccaaagcatagcggcaactgaacataagagaaagattagatcttcaccagaagaagattagcagcacgagagacatcatgtgggtagtagcttataatttgtcaaggcattttaaacaggactaccagattatcaatgagtaaataatatggaaaggatacaggtatgttactcccagattatcaatgagtatataatacgaaaaggatacaggtatatcttaacaaacagttcctctgaggaatgataaccataaaatttttttgctcgaacaaggctacaaccatgaacatactgtcgctttgaacacgccttacttttaagctggaagatatgaagcatgtataagtaaaactttaacaagtacaattttgatataatccaaaaaaaaaaaacaagcatagaaaacaagtaactagaattcaagtagagaactgaatctgatacctttaaggctttctctaaagctagtgatatgtcatgcatgtatgcgtcacctatgaaacccaaaaaaaaaaaattatttccacaaagcaagcctgcaagtccatctaagccaaaaaaaaagtctacccaattatataccttcttgccgatgttgaacaggtaaatcggcccatggcacgtatagatacggcaaaacctacagaaaaattcggtagacatacatcaaaacatgagaaattagaccactgtataaaactgatacaaaacatggcattcaaaactctatgactttgtccaaattcatgaaaaactatgaagctatcggagaattgaataatatacacagcgatcttactcgatggatgtgcaagcaagctttctgaccagccggagttgacccaaatattctgataacaggaacctcactcactctcccgcctaaaatatccacacaaaaatcaaaatagaagataaattttccaaaaaaaaaaagaaaatagatacacccattgagttttctataaacattaagaccgtaaagtgttcttagaaaattgaccatcaaatattcaaattcctcaacttcgactaaaccctaaacccctgcatggtagaaggaaaagctacgaaaatggaaaataaaaaaattacacagttccagaaaagaaaacagaacgagtagtaaaatagaaaagaataaaacgacgtggtgttctgaccgtggaagctactgtaagagatatcgaggtctggaatcggcggtgccatgtagtggtcgagagagacgatccggaggctaaagaccttggaatctgccattcgattgtcttcaaatttagagtctctgagttttgggaatttggaaaaagaaatgaaataacaaaatagcgcacaacacaaccaactaatttggcgcaaacgcaaactaactcaactcaagtccgcggtttaattaatatttcttttcaaaagcttgttcagcactctttttacatataaagcccccgaaaatttaataatatcagtttgatccacgggatcactccccgttccgatacgaatatttctcccgcgctattttaagatagacattagcaaatcacaattaatggatttaaaatggtttacactataaaaaattaatttttaaataattaaaatgacttttggtaaaaaaaaattaatctgtttttatttttaaaattaaaaaagtaaaaatattttttaaaaacatattctataaaattgtttttactttttattttttttaattgagaattaaaannttaaaaataaaaaaaaaaatcactttcaatatatttttaaacagtttttttttcttaattaatattttagattttgaccagacttgaacccagatctcccctcaccgacccgaactcgaatctgaccccgaacttaaattcgacttaaataaaatcaaaaaataaaataaaaataaactttacagaacacacttttgttttctatttttgaaattaaaaaataaaagtagttatcgaacacatttttgtttttc

SEQ ID NO: 69704 - DNA, 1040 bp, Cannabis sativa
aaagtcaaactataatatcctattgctaaaatgaattgaagggtaaaatttgtgaaaaaaagggcaaccaacttacattgtatttaattggtaattttttaatatatatattatgatatatttattgtaaagtattgtataagagaaatctatgtggtatttatatattttgttctatgacacatttttttattttacttgaaaaataatttataggtacaaactaaaagttctacatcgtttagaaagcttttaggcactatctatttaggtcataaataataatttagttatatttcttttcttaatttaagaattttttatttttttataggtgattaattaatgtcttacctattatagtttaggattttgaagacctgtctcttctataaaaaactaaagacatactatttttatagtagtattagttcatatatgttgtgtacatgtgaacaatttttattagcgtttaacaataataactaacgagcgacactttaaatttactaatgcaaatgtagattgtgaggtatttgtattttttttaagaaaaaattaaggttaacttttacaaaatgtaaaaaaaaaaaaaaaaaatttagccactaataactcttaattttttttaatattttttaactatttttataatattaaatttattttaatttatgaattgtgcaagtgctactagcaacatttatttttctttttttaaaaaaataaaaaaaaaatacatcctaaatatagaaataatttttaatttttatttaattatccataacttattgttagcactactctaattcacattttatgttatgacataggattttttttattcaaaaaaaaaaagaaaaaaaataataatatagtgttagttgggaaaaaaaaatacaaatgcctcaaaaggaaaaacatttgatgataatattgatacattactacccctaaaattcttatcttatatgaggtgtgtgaaacctcaaatgaaagtgagggacttcataagtccccataataataattggataata

SEQ ID NO: 69705 - DNA, 2669 bp, Cannabis sativa
ggtaaaatatttccaacaatagtctccaaatatttctcatggatggaagataaatttctattttttttaatgaagctgatatgtgggatcgcttcattagttcgttggatcaacactcactgcgtaagcgcttggagcaaaataaataaacaggcgactatttacttcggcgtaagccttgaggagaatattatcatgcagtttccctaaatcccaaatagagcatttaatgcttgactaatggcttttcggtatgtaggatctatattttttttccttaaaaataaatttggtatcacgtagatcatttctctaaggcataaatacttagttacaccaccacttaccattttttcccactttttcaaatttctcaaattaaatccaaagttttagaaagcaaaagtcagtgaagatttctttagtgaatgaaagaattcttcgacgaagccatcagactcctttttcaagttagaaggagagattagttggacgctccactaccccttccaataacttgtgaaccccaaggtaatttttaacgatggatttaaacttggaaatttattctttaatttatcacgtcagtgctattcaagaaaggctagcttgattgtcttgagcgtctgtctttatcagagtttagcttgacatcgtcattcgacgttagtgtttgttctccaagaccttatttttcttcaaatccacaaccgtcacccagttcattgccaggtgaatttcatttttttttaaattcttgaatcttaagaagtgcttgaaattagtatttcgtttagggactgcatgtgctttatctcttgtttgaagaataaaacttaggcttgtgactggattctgactgtttcgtagaaataagatattttgggtactactttgagcaggtttagtatctactgaaaactagatttttcattctcagtttcaagaataatccgccttccagtagaaatgctggccaaatttttatttctctatctgaaagcctagaagtcttacctctgaagagcaggctcctctagatttggaaggcttccagccttccgaaagacgtaataagcgaagacctctggatgagcagtggatgcacccagaggggaattccaagagtcacatctggaagccctttgagggttgacatggctggactctaacacctagttacaccgtcacatattatgtctcctatgttagaacatgatagtgtgcgcaccaccgcaagaaatacatctcttttgtcccactacacctatctaatatttttttctattgtagtagtgcccgtgcctgacacctgtctgaaattgtgcgggccccatccgtaaggaacttctgccccactagccaaaatcctgcaatgggccttaaagtcatgtattttattattttccccaatagtgggcctagtttgcacagtaaccctagcgggtcacgcttatgcccagatcctgattctagcctataaatacctcattataccttcatgcaaggagaaaaattcacttcacaaattttagggtttttctcctctaagctagaaaaccccaagtgaggaaagatagctaaagattagggttctttaacttgtaaactcacttgtaatacatcaagttgattggctaatacattaactcgtaaactatgtttcattaacacccgaaccatgtaaaaatttctatctctattacttaattaatttcttaagctcttctttaatttaacttttgaaaattttcttaaacagtattgtgtcgtgtcaattcgtaacatcatgttatgtcgtgcttaaatctatatttttttgtgcttagttgtgtttgtacctcttacgatcgtgctaattattttgtgcccatcaaaaaatttgatctaaatttacaacactaatcactactggtataattgatatcacgacttgcttatattattttcataatagtcataaaaaaatattaacaatttataaagtttgattggcatggtaatttttaacagtaacaagttgacatgtacatacatgtgatctgatgtgaagtttgtctcactacaagaaaaagcttcaataccagtgaaattaataccgccggagccaaccgtcggtatttgatgggattattaccgacagaaaaggtaatcctccggtattacattttaaaaattttaaaaaaattaataaataatattaatatcggcgaatttagagtattactggcggaaaatccgcctctaatactttgggcgggattttgactgcccaaaatttgaaatgactaataccggcggattattagaggcgggttctaccagtattagtcaaggattctgaccatttttttattaccggcggaaccctattaatactagcgggtcctgccggtaataaaacactataaaacacccaactctaactcagaaaacattttccattttcccccacaaaatcccccccgaccctcctcctcctccttcgcccatttcctccgaccctcctcctcctccgcccatttctcttgtcctcttccacctccgcccatcgcaccaccgtcaaccgccattttctttgacaggtaatgttgttttcactattttttttatttctctctttcttttctgtttttttttttttgtagttatttattttttgtccatgc

SEQ ID NO: 69706 - DNA, 2320 bp, Cannabis sativa
gaacatgttccacgtctaattaaacaagggtaggaagacaattagaaacaatcctccaaaccaaatctttgacttactaagagcacgtacacaataagaaatagcgtactactatctatatttttagatatcaaatctcattttatttatttttaccaactaactttattttacattgattattttttctatattatttaaatattatatatattaatatttcataaagtcagaaaaagaagctaataattaaaattaatttttaatcctttttcactaatttgacattatttatatgagatatttatttatttattatttatatagaattgtacacaatttttacgtggaagatattaatcttctattgcttcctcgtgaaacgcatgcgttaatcttaaatattattaattaatatatatttttcgaataatattatgtttaatattattttatatgaaatgtagtaagaaatggggtaagttaaaattcatccattaattatctctaatgcgctgtattatatttatgtgaaattaaatcaaacctatctaaacacgtttagtaattatatatttgattactataatctcctattaataatcttaccaactccatgatttaataaataaaacaaacacaaactattcattataatattattaattaatgttgtttgtcaaagcagaccatatttgctgcatgtgaaaaaaatttaataatatatattaggtgtaaatgtaaaattattatgagtatagacaaactcattttgagacgtctcaattataaatataaatatatttaatagaatatagtaaaaaattaaacgtgcaattaatactttatgtacagagtaaattaattaaaaaaaaatatatatcaaccatgttgtttgttcttaataaattaacttaaaacctattgtttaattagctagctcaaaattagtagtatatctccccactaattttggaaattatatatttctgatgaaaaaaaaaaatacaatttcaaaacaatttatcatttactaaatctgttggttatggtattttctagtttgcaaaatttgttgcatggtttaggttccttaatattttgagatttttcgcttgaaaatatatatgggatatttctaaatttgaagtatgtctaaatattattgtacagtaaacatggtatcaatatttgttaattaatatttatgatttttaaaaataattatatattaattttaaataataatattattggataatacttcaatagacgtattaaaaatgactttattaaaaatgactttatgtagagtcattttttttaataggtgtcattgtttcattttatgtgtccatatttaatttatttattctttttagaattatttgtcaaaaatactatatccaccaaaaaaaaattatttttccgtagatatgatatgagaggagagatatgtacatttttttttggcattgttctttaactttgccattaaaaatttctgagtctcaacctttatattttttcttttaaaagaaaaaatatcaaaggctcttagttttggttatagtttaggttttttataaataacttttaagaacttttagaaaaaaaagagggaggagaagaaaagagaaatgaatgataatttttttttgttttatttaaaatgaatgacagtatttttaacaaataattatatacgtaaaaatataaataaaaaataatatttaatgtacataaaataaaataatgacacatattaaaaaaatgattttacataaagtcgttttttaatacccctacagaatcattatccaatattattatatccatcctactagctagtactaattaattatattttctcatgatttcgtcttgtacatatgttatataagattagataaataaaaaacttaaattaaaactgctggaagatatgttgttggtttgataagattacttcaagaatatgagatggatattccatatataagcagcattgtacattaaaaatgttctattaattatttaattattaaaatttatccataccaagtcgcctacattataacttattaattttgaaacctataagttatctattgaatatgttgttaattaattttcaatattgataaattaatagcagaaagaaatatggcctcatatcactcatccttaattttcaaacagatgcacgtagtgttagagagtcccatattgttaatgtgtggaaagataatagaatatataaaaggaatgagctactcctcctattgctaattggttttgagatggaaccgcattcatc

SEQ ID NO: 69707 - DNA, 1648 bp, Cannabis sativa
tctttgtcaaatttcactagcctctctatcatttgatttggcttaattcttatcattttgatccatgttcccttgataaaaactcgtacactcagacgcaccacacaccctaatcaatgcaagctcaaaatgacccaataaatctttaaaaagtagcaattacaattttccatttctgtctatttccatacttatttgaccaagtaaatttcattgtgttaaaaccaatatcaaaagatacatacagagggccacaaacaaaatcacttctaataacttctatacatataaccatgtctcgatcatcccagtaagattaatctctaacaaattaactctattatcaaaatgtctgcactccattaagcaaggctaaaacttgcctgtttaatcaagcaagttctaaatgaccacccaaatactaataatagttcttctgctatattttgtaagtaaatctagccaagattttaccaagaaaaaaaaaaacgcttcaagagcccacagtttaacaagttcaagatcacagaaaatgaataaattagatggagagtttaactcaaaagctcatgattattgagaaaaatgtagaagtaatcaaaatcatgggcgagtgagtcccctttcatggtttcgttgactccattttatttgtcaaaaaagaaagaaaaaagttttaccaagaggattacgacggtgaagactccaatagttgccaagaagacaacttggttgtgctggcaacagttcgtcaaggcccaattcggcattctgaatcttcaatatcccagaaatcagaaaaaagaaagtggaagagaattattgggagaaaacttttaagagaataattaaaaaagaaaaaaatggaaacgaaagcagttggggctctcttaacgtaacatataaccaaccaaaaagggcaattgcttggaagcagtaaacgtgaaagaattaacaattgtaatttgaaacaaatagttgtcgtttattgctgttgaaaatataaaggctgtttgtttgaattttgaagtgggagactgggttatgattagaggaatagagagagaagtaaaacaattgggtactggggtagaccacataaccaccaacagcgcgtctcgtttcatccactctggatcggatcggatctgatcgggtttggactaacccacccggatttgtgtttattatatggcccagacccatgtcgttgtcagagtaatctcgagtcgagagcagttcttgtgctttgttttcttaaataataataaaattataatgaaaggcctaactccggtcaaaatcaaactctttcttatttctttcatatttttaattatatgttatttgtcttttttgtttcatgtcattgttgaggagaaaatgcaacaagagaacaattctcaaaaagtttagttttccccgataaaagctaatttattagtcattaattagttgatcaggtgcaaaaaaggaagtcttcaaaattgtagaacattgaaccattctttcttttttacatctttgatgaaattatcaaaaatcattaaaacgttgttacattatgaaaagtgtaggggcttattagtaattgttaaagagtgtgaattactataaatatgtgattgtgaggctattgtgagatatg

SEQ ID NO: 69708 - DNA, 6342 bp, Cannabis sativa
tcctagtgtgtaatagagtgacatatatcctctctcccttaattgtactctgcatattttctataaaaggatgaacagtacatcagcagctcttgagctgagttttacacaaaagaggaaaaggttactttttctatcttggtatcagagcactgtactgctcacgcagccatgtctacacgcaccagtcaccattcgacaacgatgcaacctttaggaaatgttgtaaatccagggacatagaattagaaccaaaccagctccccaccaggttttaatggagccccttccttaggtcttcacttcaacactggtggtttctcgagttcaccatttggtaatactctatctcaaccttttgctttaaaacttgatggaaacaactatgttttgtggaaaacattggtttccaccatcattagaggccacaggttagatggcttcatcaatggggtgagacatgctcttgccgagtttgttccaacaagagttgctattagagatggtaaacctagttttggggttcaagtaaacccagagtatgaacaatgggtgatctatgatcagctactcatgggatggctctatggctccatgacggaagccatagccactgaagtaatgggatgtatcactgctagatccctgtggacatatttggaaaacctatatggagctcactctcgagctaaaatatatgacctcagaaccatgctacaaacaaccagaaagggatctaccaccatggctgaatatctgaggcagaagagatcttggtctgattagttggctcttgtaggagatccctaccctggggcacatcttgtgtcaaatgtcctcagtggtcttgatgttgaatacatcaccattgttgctctcattgaagcaaaaaacaacctcacacctgtgacatggcaagaacttcaagaaacactgttaagctttgacaacaagcttgagagacttggaggcattggctcatccaagagtcaaggatctcgaaactcatcatctccctctactcttctctcatcaacctcacaacaacaacaatggtcgtggaagaggttattccaacaatcaaggctatggaggtagaagatattcaacaggtggaagaaacagtagtggtggccatggaggaagaggtagaagtggtggtaggaactcaaagccaacctgccaagtttgtggaagatatggccattatgcagcacactgttataactgataagatgaaaattatatgggttcaacacctaacactggacaaggaggatctgcacaagacaagaaggaccctgctgctttcattgcgactctagaaactttcgaccatgaggggtggtatacgcagatagtggagctacttatcacatcacaactgatgtaaacaacctcagcaacaaatcaagctatggaggtactgaaaactcattgttggtaatggtcatcaactcaccatctctaatattggcactgcttatttgcactcttatagatgaaaagagttgatcctaaaagatatgttgcatgttccacaaataacaaaaaatttgattagtttatcaaaattgacatctgataacaaagtttacattgagttttattcagacttgtgttttgtgaaggacatggaaacaaagcaggtggtgctgcatcggaggcttaaggatggcttgtatcagtttcaaagtccacacataaacttcagtagtagtccaagtgcactaagtgtttttaatcaaaattttcagtctattcttgagtctgtaaatattgtctctcatccctctgttgcaatttttgaaaagagtgtctctaagtcatgtctgtccaaaagagacctgtggcataggaggttaggccactcatctccaaaagtgttaaatcaagtgctacacaatgcacatgtaaacttttcaatgaatgaaaaacaacatttctgtgaagcttgtcactttagaaaatctcactcactcccttttaaactcttaaacaccagagctaaaactcctcttgaattgatacactaggatgtctggggccttgcacgagtgatgtcaaacacaaacctaaggtattacatacatttcatagatgatcatagcagatatacatggttatatcctatgaaaaacaaatcagatgctttaggagcttttattcagttcaaagcactagttgaaaaccagtttgacaccaaaattaaacaacttaggtctgactggggaggagagtatcaagcttttgctaatcttgtgaaagagtgtggcctagattttaatcatccttgcccccatacttctgctcaaaatggttgtgctgaaagaaagcacaagcacataattgaaatggggctgacccttcttgcacaagccagaatgccattaaaatactgggttgatgcttttcaaacctcagtctatctcattaatagacttcccacacctgtgttgaatggaaggtctccctgtgaggttttgtactcaaagaaacctgactacacattcctaaaaagctttggtatagcatgttatccctgtctaaggctgtatcaaaatcacaagttcaaatttcattcaactaaatgtgtcaacttaggctatagtgaacatcacaagggatacaaatgcttaagctccactggcagattatacatttctagaaatgtaatcttcaatgaagatgagttcccatttaaaattgggtttctcaacactcacaaccggaacaaaatgtcaatctcactattcctagtaattggtttaccttgtcaatgtttcaggttcaaactgagaaaataacacatgcagatcccttgataaatgaaccctcatctgatacaggcactccagaagctacccttgcaccctcatcaaacaaggaccaagagtcctcacaagaaaatcaggtagatctcactggacacctctttgttgatctgaatattgataccactaacgctgctgtgttggatagccaagagaatcaaattggtccctaacaggccactacagatcaagatcaagctgacactgagaaaagtcaacagcttggccatcacatgatcacaaggtcgaaagcaggtgtttttaaacccatgacttacctgagtaaacacagtgggaaaacaatggaggagaaccaatctctgttgttgaagctctaaaacacaaggggtggataagagtaatgtcagatgaaaatgttgctttcattaagaacaagacatgggttcttatcccaccatcaccagtgtacaatgtagtgggaaacaagtggatcttcaaggaaaaatacaatgcagacggttccttacataggtttaaagctctgttggttgcaaaggggtttcaccagagacctagattggattttggtgagactttcagtctagtgaccaaagcctccaccataatcgttctcaccatagttgtcacaaatggttgggatgtaagacaacttaacatcaacaatgcttttttaaatgagaagcttaaagtggttgtgtacatgacacaaccagaaggttttgtcgatccaaaaagacccaactatttgtgcaagcttctaaaatctctctatggactgaagtaagcaccaagagtctggtttgataagctaaaacaaacactggttgagtggaatttttagcactctaaggcagacacattcttcttcgcactcagaaccaagaagttcatcattatggttcttatatatgtggatgatatcatcattacaggtaatgatacagctgaactttagaaatttatcactaaactaaattagattttctctctgaaggatctatgtgttctgaattattttctgggtattgaagtttatagggacaatataggcatgtatctcacacaaggaaaatatgttgctgaactactcaaaaaatttaacatgatgaacaaaaagccttgtccaactccaatggttgctggaaaactattgtctataacagatggaactgaacttgaaaatcccactcactatagaagcttaattggaggtttacagtatctagtacacaccagaccagacatagcttatgctgttaacaagctaagccagttcctaaaaggtcctacaaccactcatcgatctcagtgctgctaagagaatcctaaggtacttgaaagggacacaacactgtggtttacacattcaacacaacaacaatctgagtctaacagggtactcagatgctaattggtcttgttgtccagattacaggaaatcagttgtggaaaactgtgtctattttggagatacattagtgtcatggtcatccaaggaacaatcggttgtctccagatcaagtacagagtcagaatataaagctttagctcatgttgcagctaagattatttggcttgaatctttactcagtgagatcagattcccattgtccaccacttctgtggtttggtgtgataatatgagtgcaaatatacttgcaacaaatcctgtttaccatgctcaaacaaaacatgttgaactggaccttcactttgtctgagacagagttttgcaaaaaaaaaaactcaacatacagtgtgtaccttcaccggataaaattgcagactgtttcacgaaagttttatctcattcaaggtttcagtttcttgttgacaagcttggtgtgattttatcaccctcacgcttgaggggtggtgttaagaaacatgttagtgagtaattttcattagtgtcctaattactctgccttttactctgtagtcctgaatctttttatttgtaactgtgtattgtggtcccatatcagtgtgtgtgcaagtatgagtcataggacaattctgttattcccttgttgtggtcctagtgtgtaatagagtgacatgtatcctctctccctcaattgtactctgcatattttctataaaaggatgaatagtaccttagtaattcttgagctgagttttacacaaaagagcaaacggttacttttctatctaacctatgtttgtttaggatcatttatcctatttaactatgtgggataaataattccatacagatgtaattttgtaaatatattttaaatttaaaattaatttaaatgcaataatttaaaattttatttttgtcaaaaatttatttattaaaattggtaagaattagtgttaaatttaactcgtttcaaaattaaaataattttaattaaacaatagatatccaattaattttaagaaaaacaatatgatactagagaattatttactattaaaaatatgagactagaattaaattttctttaaatatttattaaaaatatttatacccaaattttacaaaaataatatttgcattaaattaaattattatttaatatagataatctgttattattaaaatatttttattatgtgaaaccatgttaattattttttaaaaagcgtgtttttcattatgccaataaatttctttaataaaaataataataataaaaagaatagttcaaactaaaaaaaggataaaacaaatcttctccaaaaaagactttagcaattatcagttttccataactaatctgtacgccaagatgcctcgtgaaagtgttgttagatggtgttatgatgacatttggggatagattttgcatttcaaaacacagcttcataagttggctagccttaaagagccgtttgtctaccttggacagactttgtcgacttaatcataccaactcttccttgtgcttgttgtgtagtagtggagtggagagccattctcacttttttttttattgtatttatagcagtttggtggttcatcaaatttggctttggactggtttctagttagaaaaaagagctccatgatgtcttaaagtggatttagaaggaaaaagttcctagaagtaaaagaaaggttcttttgagtgtcattacagccacaatttaattcatttggcatgctagaaacaaggtgctttgggagtaaaaactttctactgttaatgtcacttttaattgtattgctaatagtgtttgtgctaaagtgaactctttaaaactaagaacttgagtaaaatagatagtgagtgggtgaaagttttaacaaaaactttgtaagttatattgtaattgttgttgttgagtttaataaatttttctgaattaaaaaaaaatagtaaaaaaaatgtgactgtaaagatttgtaataacaaattggaaacttgttattgcagaacacatatttacagtagcagaacagaaataatgtagtacagaatattaaaacttaacacaagagacttatatggtaaatacaaatttacagtagcagaacataaataatata

SEQ ID NO: 69709 - DNA, 6954 bp, Cannabis sativa
ataatgggtatgtaatttctttagtaattattgttggatttagctgtatttagattgatatgaataaatctacacatatccttgttttcatgtaccattttgtcactgaaacatgaactgcatcgattctgcatttttttttttttggttttttttttgtgagtttagcaatctttagcgatgttgttagcgacatttagtgatacgaaagtgtgttgaaggagaagtctaggctaactacttgagttttcttcttttgtacaaaaattatgtctaaactaaattgtcgagaggaagctgattcagaggaggagatgatggagcaagaaaatgctccaaaattgctcctgaatgacagccgtcagagatggaccagaatgtcaacatattcaggaattaaaataacctaaggaaatacaagactcaacaggggctcgaaagtgttccagggttgttttggaatagacttaccctttatgaggagaggcctagcaagtgtgcggaaggaggcttcaacatctggagctgggcccatatcgagatgggcgcacacctgcctccgaggtgctactttgctaacttcagcatcgtggctgaggtagcaccttttcaattcattccccaagcgtaccacttgctgtcagggtggtacgttttttgtgttcaacatggcaagcccgtgccgatgcaggaggagatcttgtatttttacaagatcaagtctcagcccatgataggccataagaagaaggtggatttctacaggttggaaagctacactaggagtgttccttgccttaccaactttatgaagtacacacacgagttcagagactactatttttacacccgcgacttcccattgaagagggttcctatccttagtttggatttcaacactgcaagtaagggtcgttcccttctttagactttaggattctgtttttccccccttcttaatgtattttgatatcttttttcacatctgttacactgccttcctcaatcacctttgaccccagagttggaagaaaggatagctttctacgaatcattctcgcctaaagagttgcaagtagaggggcttgttaccactaagaaccttcaggaattaggcctcatttctccacaccaggacgtgaccaaccttttcgtgaggaccaagtccaggatgctcttcgaggggatccaaatgaggttcaggaggcaattgcacttatcactattgaagaggccttaaaggtagtaaaagctaatgaggaatggctggcggattggaggagaaaattcccagaaagcctaagcgaggttgaagaactcactattagattcaaggaggtagtgcagattgagggtacttcaagagcgagcacctttggtagtggtgagacaccctttcatataattagggctcccactctaactaacttaaagattttcgattaatgtggattcgatccacatttcttaaatttagatcattgtagatattcatacagtaagtatatagataatgtagattgcaccattaggagtcccaaccactttgttccacctgtgcagcatcatttcagagtggatgtgtttagtaaaatttacttcccaggtttcttccaacatgagactaacttaggtcaagagacattgctctttttgctaaggggaaagtcaattattctaaaattaatggtttggatcttcttgatgtcttgcatgataatttgttgtaaagattatatcttttgctatggccttgtttgatggatattttatttgttttgtgcagattaaccggctaccttacagatggggctgctaaacaggttcctgggcaacatccaatccacgtccgacgaggttcaagagatttccaaggaaggcgaagacaaaggcaagaaaagctaggcttttgagagcagatctcagcagatagcacctctggcttcaaatccagaggctacttctaaggctctaggtacggaagacttgtctacttccatgattagttttaatatgggattatcttccttaaaataattttgttttatataatttggccttattttttactaacagtggtaggtcttatctcgactcttacatttatcctatctctaatccaatttgtattcttcgttcgttttgatttgagatacaagttatctcggatcctcaatgtatttttctttttcctgatccagggtatggtaaacacgttctatcttgactcgatctgaggtatcgtttatctttgcttaatccgagatctaactggctccggtcaaatttgaagtttcggtgtcttagtcggtgctaagtcaggttttatcttggttcaagctgcatgacatctttttttgatatgaaccgagtttaatttttctttacctggtcctagttaaaacttatctcgactgtctgagtcatggccttccttggtctggtccgagttaaatcttatctcagcttagtcagggtcatagcctttcttggtctgctccgagttaaattttatctcgacttagtctgagtcatggccttccttagtttggtctgagttaaatcttatctcggccttgcttaggctaagatttttgatctaagttattcatgtttgtctgtatcgtcttctgtaagtttttaagatgtcgcgtcatagttctctttataaatgagcttacattttatcactcttttagggtttttcattccttaatgggttttgtaagaacagtcgtttttcttttctgacattttcctcccttaatgggctttttaagaaacaccgtttttttttctagctttttcctcccttaatagggttttgtaagaaaaaccgtttttttgttctctcccaaacaattacaagtttctgttgtaagcttgattcttttagcctttgttttgaccatagatatgtgaattttctggttcggagtatagcatagtatgctttgaatattaaggcatcagccacttagaatggaaaattaccgtctgttgttgatcatcctgcataagtggacgtgttttatccgttgtaaatatttctctctcaagtttattgtaatagttccttttcaaaaaaaaaaaataataacaataataaaaaattgattttggtcaaaaaacatggggtcctaagtatttttcaaatagtcttaaatatagtttcgttagcaaaaattggatgtggaaaaatggtatatccctactaataatattgatgtattaaaatagtaataataatctcgtggacatgacacaaggctgattttatgacagaaagagctgatttcattttttttcaaagaaataataataataacgaaaaataacaaaattatgcatctttcaccttttaaatttattctaaagtcagaattgttttcttcttttctttcttataactataagcatttgaacgaatgactctttgtgacaaatcatagatgcccacagcacagctgcagttagtaaatagaccatgcaagagatagaaatcactagtgcatctcaattcttcattactcttcaaatttaggaaataaaaaacaatagtagttcaatcacatctcaaattatcaagaataaagcaaatttctttctccgtcccctaaaccaaccaatctggaaagaccatcatcctcaccatctccaaaataacataatgaagagaattaaaaatacaataaaaaatcaatatcctacagagaaacacatgattctgtacataacaatgacctatatgaaaagagttggagttgatgaatttcacatgtcgtttggtaattcaatgttctgggatccaaatacttggtgagaagtactctgaacaaacacagccaagctacatttgcttccattgaatccttcccatagagggaaattgaccgttccagatactgacttcttcgctgagatatctttcacagtacaaagtttttcgaattttctaaccacaaagtcattggacaagacgcggcctttgttctcccccctcgggcagtcagtcaccaaaccattttcgtacaaggccaccatcacatttgcgccttggctgtcaacctttgtcctcaatgcacctgttagagagacttgcaaggtgtctgcttgcctttggaaattcgcctgtgcaatcccaaaatatatgaaatggtaattaggctatagtctttacacacaacaataaaaaagtaaactgggaacatgttttttctattcttagatgtagaaattaaggattttaaacgttttgacaatccaaaattctttgcttctctgatgtagttttctgatcctaatagtaaattcacaattgagaatcttaataatagtgttgtaagaagctaacactgtgatatatgtgagtggtaccaaagtaaccaaacataattccgagccatctttagtgcaattaaaactcaaatgcgttgatattgttaaatattttagtaacattacgatagtataaatttaaaagtaaattgcttactactaatgagcaaagcttagatcattcccaaaacgtacttttgtgatgattagtccaatgaagacatataattagcaccatttggcaattaatttatgataatatcataatgatatcgcaactgacagtaatttttttccctttctgatgccaatttaaaccaatttgtgtccatcttaaccaaagcatatcagaatcattattaatacaatacaagattataataaaaaagaacttgatataattatttctgagcaaacaaacaactataagaatattacgaacctggaacgagggagcagggtatctagctgcacccttaatcaaacccagcaaggcattctcgtcattcccaacacaatgggccgaaccctggaccaccacctggggcgtaaacatggtatcaagattaagggcctccacaaaggccttttgcctaaccgtagaaagactggacccgtatggatccttccaccctttatagtcccaataatccacatgatgggccaaaaccagcaccggcggaaggcccatctcattaaaatcccctctcccaagcctcgacatcaacagctccgcctcgtgcgacgtggcacaaccttgtgacgagaacaactccaccaggacggccccacctcgcctttgctcttccaccgccacgtcagcagtaccaccaccgcctccactgctctcaaccgccgaggttgacgaaccacgtttcccaaagcaggcgaagaaacgaggcgccatatatttttgtggacttaatcaaacgacgtcgtttcgtcgcctcagcttttttttttcggcggtggtggtcgaaaataaaattggtgtaaggaagaagaaaaaagtggggaaatagaaagagatggattactaatatgggtgaggaatagtatggatggtgatgagggaaatgtggagaataatatgttataaattaaaattgatgtatgagatttgttgagggtggaaagatttgttttttaattttttaacttttttttaaggggatttagtgtgtcggacaggttgttttggaaaaggtttgagttagggaaggttgcgttgccgacactttgaagtgtcggtgacacgttggttgtcaggtttggttgagattcagtgacatttgcaccaccaccaacacctacataatagttccgaagatctagctgtacctgtctattactaaaatatataaaggaaaaacaacttatagatgtcaactgagcaaattttatgcgggatggcagctatgactaatctcaccgtttttatttttattagggaaattttattttaaatgcttcaaaaaatactctctaataaaatttagattcctacaatttatataattaaatattattgttttcaatttttactcaaaatactcttctttttattttccttctctctttgtctctttgtcttcctctttcttgtactaccgaggcacccaaactcaggcaccgagacaactaactaccaccaccgaacctcctttcctccaccactgaacctcctcatctacccaaaactaaatccaacaaccctcaaatctttctctcttcctcgtcctcggcttctctcaaccaccatcgtcattcgccaccgcccaccttaccctcccccaactagaagctcattgaattcgtatttgtttgagacattagatggtggtggagagtatggttttccggccaaaatatgattatcaatgggttatcgatagtttatggatggttttatttgtgcactgctatttttgtgagcaaacggaaatcatcgataacctatcaataaatgtcatcgataacctatcaataaatgtcatcgataaactatcaataaatgtcattgataaactatcaataaatgtgaaattgacaaaactgtgttacataaacataaatcatcgataacctatcgataatcacgttttggccagaaaacaccataaccacaaccatctaaggtttgaaacaaacaaaaatccaataaaaaacaaataaatacgaagattaagacggagacagaggttcggggcctctgggattcgtcagggtttttgggtagatgaggaggttcggtggtggaggaaaggaggttcgattgtagtggttggtgatctcggtgcctgagtctggttggtctcggtggtgcgaggaagaggaagagagagtacataagagaaagagacagaaagagaaggaaaataaaagggagagtaatttgggtaaaaattaaaaataatagcatttaattgtatatattaattagtagtctaaattttattaaaatgtattttaagcatttaaaataaaattttcattttactattatttggctaaaacaattttctcaattaagtaggagacaatctttatatatatttatggaacacttcttaatggatattacccatgaatggttactaaacaaatttaactata

SEQ ID NO: 69710 - DNA, 2332 bp, Cannabis sativa
  modified_base (27)..(28): a, c, t, g, unknown or other
aatctctattgcaactagcgctgcaannactttaaaaactcaaaccgtaaatttaaaaaaaaaggttaaaaaaacagtatatgaggtaattcaaaatcaatcgaaattctaaaaatattatttatatattattactctcataaattaaatttatttgtaactaaaatattcattcatgctctaaattactcttaaaaaaaatagaaattaatgtccaaaatcaatcaaatggttttttttttggtgtaaaggggttaagacttaagaggcttaaacccttaaaacacctttcttgagcaactccctttgtaaatgcatggtgagagaaaccctccactacttcgctcacctgcgaagggcctcaaagtttccaactccattcaccttcaacaagcttctccaccgcctcaccatctccaactgtggtcagctctctcttaaaatcctctccaacttcctctccaaagggtatgttcctcacccatcttcattcaattccgttctctctgttctctgcaacttgggtcactttaatttcgctcaaagtctcataaattcaatgcccagattcgggtctttgcctgatgttgtcacttacaatacattgattgatgggtattgtaagaattctgatattgaacaagcttgtttcattgtgaataataagatgtgtttattaggaaagtgtagacctgatttggttacttttaatataatgtttaatacattttctaagatgaaaatggagagagagttttttgtgtatatgggtttgatgtggaagtgttgtttgcctaatgtggttacttatagtacttgggttgatatgtattgtaaaaaaggggatttgtgtatgggctctaaagtgtttgatgaaatgattagtgttggggtttcacctaattttgttgtttttacttctttgattgatgggtattgtaagggtggaaaggttgatgttggtcttaagttgtttggggaaatgaagagtttttcggtttcgcctaatgttgttacttacactgcactgattgatgggctttgtaaacgaggagagttggaaaaagcagaggtattgttttctaagatgttggaagatggggttaagcctaattcagctgtttacacttcattaatagatgggtattttacagctgggaacactgatttcgccattgagtatataactaaaatgcgggatcaacgaattaggcttgatatcaccacctatgaggtgatagtatggggattttgtaagaacagtatgttagataaagtatctgaggttcttagaactatggttgagagtggattgtctccggataagatcatgttaacgaccattatggatgcgcactttaaagctgggaatttaaaagctgctttggaggtgtaccgagacttattggtcaggggttttgaaccggacactgtaactctttcaacgttaatggacgggttatgcaagcatgggcatcttgaggatgctagagggcatttttgcagggaaaaagccaatgaaatctcatatactgtgcttattgatgggatgtgcaaagaagggttgttcggggaagttgaaacggttgccaaggagatgttggatgcagggtttgttccagacaagtatgtgtacacttcttggattgctgggctttgcaaacagggaaaattagttgaagcttttatgcttaagagtaaaatggtccaggaaggtgttgaacctgatttgttaacttatagttcaataatttttggtttagcaaataaggggctaatgattgaagccaaacaggtttttgatgatatgttaaaacgcagaatctctcccgacaaggctgtctatgatattctgatacgaggctatcttaaggaggaaaatgaagctgctgtttcgggtttgtacaatgaaatgagaaagaaagggctttgaaataggtgccttttatcattgaaactattgctggaagggttgatgctgctcggtagaatgatcatatgcgtccaactgaagccgttcttgcccttccgcagtctctgctcaagcttgctcaaaagaggtacttaaactttatcaaaacatactggtatcaagtggttccgacaaagaatgagtatctgtgtgatctgagataactctcagattattggggttggcagtgatcaatcatggatgataactcaacaatggtctgtcttagcaggttatattgcagctcaagttgaattgatttcaaaaatattttgcaaaatctaatgaaaaagaaaattattgatgttaacaaggcttctattgcagctcagtttctcattgaaactattgctggaaggg

SEQ ID NO: 69711 - DNA, 984 bp, Cannabis sativa
caatattttaagatacgaatatgtttggatttaaacaaattaagtataccttgccaaccaaaatttcattagcagacttctctccatagatatctgaggtgtcaaaaaatgttattcctctgctgaaggcatatttgattattgatatgccaacctcatcagggactggtgcgttgtagactccggtaagtcccatacatccgaacccaagctttgaaacctgtaaaatcagtatttgatataatttccaactgggttttagctaaaatttatggttttgtagtttgtgaacttcatcacaactttaaatctgaacaaaatgaaaagttcatagtaaagattttgatgggttctagaatttacctccaatccttggtttcccaatttcactcttggaatattgacacttttctcttgcgccatagttggttatttggggttggatttttctaagtagtcttattgtctgttgtgtgttgttcttgtgtactaaaatggaaacttgggactcctatatatatggaatacttgtaagtatatgaggcggtgaaacagggttaaagcattcaattcattgtttttgttatcctagaattttagtgtgtgtgatcattgatgacttcattcatacagattagtcatgtattacgacactatatagtaaattattaagggttttttttttttaatatataatttgacaaaagggaaatcaaaagatcaaatataaaagatgttatggtcaaattaaatttttatagggtggtggtggtgggtgggtacatactttttttgggggattttttaaaatccactcttttttaatattttatttttaattttaatattttaaatttttatttaaaaaaaaaatacttttttttttggttaaaattacaaaaatacatatttctacataaaagtaagaaaataattaaaaactatataatgaaaaaatcaaccacacaacaattttaaattagt

SEQ ID NO: 69712 - DNA, 2217 bp, Cannabis sativa
aaaatagatgaggtaatttccctatcttttattaataatattttattaaaaaaaatatatatgtttttatatcagtaacataaactaaaccaaaatttttgcttagcataaccaaattgtaacttataatatatattttaaaaaaaaaattgtaactaattggtgtaactcatcttttgtttatactaatgtcaactttataatggtaaaagttaataacaccagtacaaacaaaaaaggtgagtcacacaatagttaaattggttattatatttaaaaaaaaaaagcccccacaatagtttaagcaaaataagcatgaaaattaggcataaaaaagagctctataattcaaagtacgcacttggtagaaagggccatcaaaataatgttctcacagaaaaaaagtacagtgcacgaatcagcacaagcgtatatattaatatacatacaccatatatatatatacagtatactgtatatacctgtttatatggtactagactatggccaaatgggtacaacaacagacagcacaatgcttctatatgtcaatcaaaatcaaatacaataaatgtagttgctgaaaaagaaaattagtgttgcatataaatatatataattagaattaattagaaaatgcaagtgtgctctactttaaaattgggaggtttcaaagcaagccatgccatacatattaattataaatatatgagaacatcacaaattgttcaattctgtgttaattatatcattaattcaataaaatatgagaattttgagattagttgtatgcacagctatttcaaaagagatttgtttagccgccagaagagaagttacacgtaaagtcactattttgctttatatatagtaatagttatagtagtatatatagatagagaaacactgaaataccacaacaacgagataaatgctttttatacagatatatatgacacattttattaaaaaagaaaaacccctttgatactttaattggaaaaatcgaatgtaaagcttaattatattttatattcttctctaagttttgtcagtatgaagctaaatatggcccactagaaggatttgccacatatctaacgacaaagaaagtccaagatgaaaggcagcatacccctttagaaaaaaattcagaacagaagaataatttaccagcagtcattttcatttcacctattttggaaaataagcaaaagaagcatgttcggggaaaagagggaaaaatataaaagacacaatattttgttattagatatttctactcaaaccaagaaaaagaatagtaatgccatgcgccactttttctaatatcttttcaatatcaatatgtgacaaaaaacagtaaattaaattaacggccatggtgaaatatagagtgctagaatcaaatggcgccgggaaagaatcaaatgagagaagtgctagaatttttgttgaaagatatagatttatttacatatttatgttgctgtagaaaaacattattataaaaaagagcatcatattcccttgaaaaattcactgaaactgtattctaggaaaatttgtacatccttaaaaaaaaaattggacatattatgaaaatgacacttaaagggcacatgattatatgtgtttttttttgttttgaaagaggattatatgcgcgtttaatgagcgataaaatcaaggtcatcgatggaatattctagccaggttgaaataatttggtttcagatggtataattaaagcttttagacgacacgaaagagtcgggtcttaaagggtgagagccgaaaattatgtctgcctctgtcttatgcgagtaattaagcacaaaacaccaatgtccacattatatatgaaaaatgacactaaaccatacctacatttatttctttcttttttctttttaaatgaaaattgaaaactgtacatatatcctttaattgatttaaatatatataaatattaatatattatttataaaattattatttttaataagagaattatttcatgtactttttttttttttttttcaaatttacggtttggaattttaaaatggtttttccgaaaatttttatgtgaatttctatacgatttttttgattgcgatttaggttgctccgtttattgcaataagaatttctatatagaattctattaaaatacaaaaaaaactgttcaaaactgtaaaaattaaaaaaaaa

SEQ ID NO: 69713 - DNA, 1677 bp, Cannabis sativa
tattattaataataaaatagatttaaaataaaaattaaaaagttataaaacatttatattgtaaaagttgtatgtgggtacatttggagctattggggggtttacccaccaaaagtttggatgtattcctattctctcgatttttgaatactttctttataatgactgtcaggtctaattatcttttgtctaatatatgatcgccttatttttcctatatgtaataattgtattgtattctataaagtttcaatctttacacacgacgaaactgccggccaacttcacagcaagtcattatcatcaacactatatcctcatcatcatcttatcactacaatatatcaattatgtatattatatacataaacttttttttaaggtgtattacgtttatggtaagagtgtttatatatgatgatatatattgtaattaatgttacagcaaactaaaagttacatgaatcaaaccaaccctttttggtcgtcaaattacaaacaataccaatgtgaaacaacaacaacaacaacaaaagtaaaagctgcatagatttttctttttaaagtgtaggttataataataatgatgatacgatgaacaaagattctttaccaacctcaaaggtgaagtcttttttaaataaacaagaaagaggtgtggtgttgtggtattgactcatgtctgcatattcattcctctgttgttacaatccctgctacaaaaagaagaaatgaaatagaccagtactttggataactctcaaagatgatcattctcatcaagttgagtttactataaataattacaaaacaaaacaaaaagaatgtctcctgtatttttccttctttgaattatcgaaggcgaggagggcaaaggcgagcgccagcacaagcaataataagtatgttctgactaaaaatattcgtcttaatcatgaagggcggtgatgaatgaagcaaatagctgtttattctagatcaagattctttttcatggattcataaaccagataagttatacttgcagatggaacaactttaagcatattaggaaatattcctttatagagacctctaagcccttcatgcatgaaagttctcttaaatacatcaaacattcctttataggcaccatctgtgttgctcctctgagcttgcattctgaaacaaaatgcaacaaaaattcaaatctaattttcacagtaacacctcagaatttagtgcagcatttggtcaaaaagggtgtgtgagtgggatacttcagacttacctagttctcacaacttgtaagggataaacacatgttgctccaagagctccagacaatgtcccacatcccagttgaataaaaggaccaggctctacaaaaaagaaatgttcttatgttaagacattaacactgcttaaagaaccagtgtttgaatgttcaaatacaaatattggaaaaatctatagtacaccttctaaaagaccatttcgttacacccctgttcgtttcggcactcaagacattatagttttttagatcactttaaatttttaagaaatttcaaatagtttacagtgccgaaaataaagttcaaacagttgctaaacacgtgtataagaaagaacagtcacgcgtgcaacaaaatatttgaaccttacttttgtcactgtaaactattcggaattttt

SEQ ID NO: 69714 - DNA, 5405 bp, Cannabis sativa
agagtgtctgcccatgttcatgctctatggcagttttttagtttctttcagttattttctacccactttccctattttatcttcaccaccacgcccatctctaatctaatacaccagatttgttcgtttggttctgcataattcaactcacttaccatccttgcatcagttcttcttttcatttcttcaatgaatccactccttaataaaatgaaatccacaatgtctttaactgaaaatgaaagcactattttggccatcactgatgatggttctgatactgcaataccacaagaattcatcctgattactcgtgttttcacaagtaaaaaagtttggttaactactcttcaatgacagatggtagaacattgggatggaaggttgaaagtaaacattaaagaacatcactctgatcttttcatgctttgcttcggctgtgaaggagattgaatgcgagcattggagaaggagtcgtggcacttccaaaaccaccacattgtcctacttgatccaccattgcagcaaaatgtgactcccgaaatcatgatacattctccattttgggtacaagcctatagactacctttcttgagtaagtctagatctttggccaaatctttggcctcaattctgggtgaatttctggctatccatgatgattctctaaatgaaggtcggggcccttttttatgctttcgggttaaaatcgacattacgaagccccttttgcgtggtcggatgattactcttcctaaaatcaaggatgagttttgggttgagttttgatatcagcgtttaccggactattgcatggaatgtgttttaattggtcatctttatcaaaagtgtcctatttttcttgagaaattggataatggattggaacctgaactacccaccggtctagaacttaagggatcaagattgcctacttcttcatatgatcgctaccacactaattttcacaaaggtaatgcgtggcctttactcactcgcttggccagaacttcaccaactgcaactctccctaaacttcactctattccttaaccacaacctaatcccttactggtgggagaatcttcaaattttactgaagttacacaatttggcaaccaaccacagaatatttcaaatgcaaatgttgtttccactagcactaacgcttacccccaaaccactagacccttgactacaccattgtttacttcacctttacttaacaacattttcttcagtaagtactagattgtacctctactgttaccagcaaaatagcccctaccattgattctcactcaaaaaataaaggaaaaattttcctttcttctagtaacagcccaactgtttttgttatgattgatgtttatacaccagatatagtgagagacaccaatgcaaattcaagcaattattcttccaatgttcttgctacatatccccctctaacaaacccaatccatggccaaacacttccactacagccattgtctgcatctgctgtcacctctacagccatctcaactatatctcctactagtttgcacactacaaagacaatttcaagaaggctaggagaatgctcaacccaaccgcgtagtcaagagacaatttgacaccgtctatgagacaaactcttaaaagatgtagagccaaccaatctgaaatggctttttcgttgtcaaaagaagctgatcaaaatcagtccgtttctgtcgcggtgtagattcaactgatgatcaagacaactccatggtgattgctcagcaatcccacgactcgccatggaaatcattagttggaatgcacagagtttggggaacccgagtgcattctatcgtctgcgtttgcttgttaaaaagcaaactcctcatgttttgtttcttatagaggcaaaggttactattaattctcttacttgctttaagcagtctttaaatttcaataatggcttagaggttcctaggacttgtttgaagggtggaatcatgttgttatggaaggataatgtggatgtaacacttctttcaatgaatataaattattttgattgttacttactgtgtaatgatggaccccgatggcacctatctgttgtttatggcttttcggaaactgaaaaataaaaagcacccttggactctaataaaacgtttacatgatgtctctccacttgatccatggatgttgctaggtgatcttaatgaaattttctcacatactcacaagaatggtgggccctttgagacaagataatcacatgagtgcttttcgaactactctaaatcaatgttgcttgaacgaattgcattttaatggtgatgattttacatggtctgggagtagaaaaaaccacgttgctcttaaagaaaggcttgattggtgttttgtgaactccatatggatatataatttagttcatcctacagttactcacctaggttattatggttgagaccatagagcacttttagtcgagcttaacttttcaaactagttggatatcaaaaaacgaagatcaagatttcagtttgaaaggctttagttaaataatgcataaagttcagacataatttctgctagttggaatacaaatgagcatgtggatgcgaacattttctctgagttaacagcaagaattcaatgttgtgcaaagaacttatagcaatgacataatggaaagtttggtcacatgaaacatgacattaaggagggtcaaaccagagtgcaacaattaaataattgttctaatcctagttcagatttttctaagtcagtacactcggctgatgaagctattttggatgaggagcttttagccaatgaggagcaacattattggcagcagagatctagggtagattggctcaaatcaggagatcgaaacactaaatttttccatgctaaagcctcgtctcggaaagccaacaatcacatcagcaaattgcagaatgactgtggacaatatgtctactcccgtgatgaagttgccactattgcaacactattttgattcacttttcaaagcttctgctgaagatcattgggcattatctcatgttctgtcaacaattccaaccataataactgatgctcacaatgattttctcttacaagagttcactaaggaagatgttctttcagcattgaaaataatgggagctgataaaagtcctggtattgatggcatgtctacaatgttctatcaacacaactgggatactgttggacctttgcttacacaagttgttttgaatgtcttaaattatggtggcaacccagcagcgtttaacaagaccctaatcactctcattcctaaagtgaagaagacaaagaaaatgaaagactttaggccgataagtctttgtaatgtaatttacaaattaatttcaaagatgattgttcttcggttcaaacatgttcttcgctatgtcatctccgagactcagagtgcttttcttccaaatagattgattacgggcaatgtcttagtttcttttgatatggttcatagcttgaagcatagaaagagaggaactaaaggttacgctttgacataagtaaagctttcgatcgtgtggaatggtcgtacatagctgctgtgatgggagaaatgggattcaacattcgatggatttctcttattatgacttgtctacacaccacttcattttcattcctcatcaatggtaaagttaaagattcggttataccagaacgtggactctgtcaaggcgatcctttatcaccttacttatttttaatatgctctgaaggtctctcatggcttttgcaatatgaggaggctattggacggctacaaggcctgtctatttctcaaagcgctccttccattactcacctatttttcgttgatgatagcttgctcttttgtcgagccaatgatcgatcttgtggtgcaattaaaagagcattcgatatttatcatcgggcttctagattatttaatgaagataaattggtaatgtcattttctccgaatacaccagccaccatgaagaactcttttagtcaaatactggcgatgctagtaagcgaatgtcatgaaaaatactaggcctcccagcatattctgaggaagataaaaagcatttttttggtgatattaaagaaagaatttggaaacttttacatgcttggaatgacaaattattctcaattggtggagaagagatccttttgaaagcagtggttcaatcgatccccacttatgctatgagttattttagactttcaaaaagcttctgtaatcaattggatacgatgatggcacaattctggtggggttcaacagaggacaagaaaaagacccattggaagaaatggaaattcctctgtaaaacaaagacagaagggggcttgggattttgttcttatgttcattttaaccaagcgttgctcgctaagaaagattggcgtatctttcttaatcccaactctctgctatcatgaattctaaaagctagatattattcgacaggtgatttcatgatagcgagacaagggtagtttttcatcactaacttggcaaggtatatgttggggtcgtgaattgcttgttaaaggtatgagaatgaaagtgggcaatggtaggcagattatttgttcttgcgatccttggatttcaagagatacaattttcacactagctctttatactggattaccacacaataaagtttctgattacatcactagtgattgtgaatggaattttccatcactacaaagggacttttctactgctgatatcaacaatattctcacaatcccttgtctatttctgcttcagatgtctattgggtgtggaatttcaatatctctggtgaatattcggtacaatcaggatattactttgcttgctctttggagaatcaagaacaatcttccactttagattcatctatgtcttgatggagtgatttttggggattaaatcttccatcaaaagtgaagattttcgtttggagggtcatacagaagttgatccctattgctgctgcactattttagcaaaaagtaatcacctcggctgcttgtagtttatgctctaatgcttcggaattagttggacacacaatgtttagttgcaaacatgcaaaagctatttggcgttcatctaattacatatttgatttccaagctgtgagtaggatgaaagatggtgattatattatgtatttgtcaaaaatttacaccaaatctgatatggaaaagattctatgcactatgtggtccatttggtttgatagaaacaacattatacataataagttgcctcaaaaagctgctacaagatatgcaaaatccattgcttatctttgcaatttccaacaggttacatctactatcttgttccccacctgaactcactagttgca

SEQ ID NO: 69715 - DNA, 3312 bp, Cannabis sativa
aaggaaccagaccaatctgggccattgaggatgttatgaaataaaatagagattctagataaatcataagataaaacttgaatatcaatgctaccttccaacaaaggcacaaactgccaacagtattagaggcaccaaccatcgaagcatccacaaaacctagactttgccaaatcaaattcacccatctaccatcaaacttagtttccataagaaagaggacatttgaatcttctttagagacaagggtctgaatagcccttttttccagcgaactagctagtctgcgaaaactccatgaaatgattttcatgatgatttgggggacatgataaggcccgcctcctcagctatgaaaaaatcccgcttattgggagagaccttgtgacccgccagtggggacctcacatcaaaccaattagaacgctccccatcacctccttccaaaccctctaatctaggcttcaactttcgagagacgcccccatccttatcaaagtgagagtgcccctatccctgcagaagtaaagtagcattaggaacttcactagtagccatctgggaatcatgacaattgtgtttaccattgttctcccctttagcaaaatgcaccaaattggcatttctagcagaactttcctcactgaagcatgttccaagcacaaagccttaatcagatgaggatccttgaatacttgagtccacatgatgactttgctcaacatcctctgtctcgttcaattccttccctttttggcctgagaaagggggaggaccagaggatttgtgaccaaaaattgatttcgggataacaccaataggccaacccatattgtcaaagccttttttattccttttagttgaagctttctccttactctgggaagtctctacatctttatcaccaagatgactcttaaaatagtgcccacatgagctatatcaacctcagggatgtaatgctcaacttcataatcattacaccgaattttaaaagagttgtctccaccctggaccactttccccttcgggttgattaaggttgtttttttaatagttggatcctctgccctaggattcaaatccttagcactaccggaagggcattcatcacccgtatcagttgtaacttaaccttagacaccacctcatcttgctccatacggatgcactcttgataatcttccacttcaagaatcgcaaacccactctccaaacgagatctcaaacggagctagggaccataaaggggtacacttctaccatcggtaagagagaccattcttttccgagctgaataagagagttcatcatgaccaacaaggacacatttacaacagaccacaaggagccactcatacttgaaaaatctctaaaccttaataccatcctcattgtcgagactcagacgagcaaccaacggggtattgaggtcaagaagaactctcagataatgattcacaagcatttcgttcttccacaccttagtagtggagaggcactttcctacttggttagcaagatggattgcattcccatttgtcataaatctcacaggaacccttaaggcatgggactttggtctttatgtaaaggttttttgttgatgcctctcatttgtcatagaaggtctcgatagtatttgaaacctcaccacaactaactcttttacgcacttacccctagaacccaccactttgaggagggataaggaagtagtggttgacattgagagtgacccttagaatactatggtgttggatgactatgaccttgaagatccttttattttttatatatatatacttatttacacttctggccatgttcatatgctaataaaatgatgttgtttttgtgtatattgcgatattaatgttgttcttctttctcttgcagatttaggtatgtcccatcacttgcttgcatgttatgacgagactgaggatgcaaatgcgtccggagacgagaacaatgtccaaacccttccttcaatcccttgggactattctcagctgaagagaccttgccccgtggcgatagaaggcgatgataatgctcaagcctcttcctctgccccatggaccagcgggtgcatcaggaggcctcctatcaagttgctcaaaattcatcatgatagtgatacaattcagatgctagaatctgtgcacgacaactctgatctcttggttcgaaagacttccactatggaggtggtgcgcgacatgtctagttacgagggtgatactttcactagtggtgtccaagatattattcgagtaagtgatggactatacaccaaaatgtattaataattgcatgtcctctcatgtgtatgctcatatttttttttttttatgatctcagctccttttgttgtgatgtttttttttctagggtgtagttcaactcatggtctcccaatgtggttcttcgaatttacaagagaagctggctttcacagaggcgaccattgaggagctaaaaaaaatctccgctcttttggatgcaaaatacaagcatgataaggatgagctcgaggacatccttggtaagaagacatcaaaacttcttgcaataaaaaaagagttagacgagcaaaatgagcaagtgcagtactacatcaatcagaactttgcttatgcaaagaaggctaaggcgctagaaaaggatgcccaagaaaatgatttgaaggtcaaggcactaagggatactattcataagcaagaggagatgatggcaagagaccgccataaatacaagcgtatctttgacaaccaattttatcagttatggaaaaataaccaaaaccttgacctttcgtacatgcctccccgcatcagagataaggaactcatcaagtgcaaggcaagatatcttcgggaagtcgtacttcctcccaatactactgtcctcgttgttggtactcctaaggacctgtctggtggtactcctcctgatgctactcctatgaaccagtctggagatactcttccttgagatttttaacctgtgagctatttatcatgagtgcatgtgctctttgtttttgttcagtagactatgtgcatgatgattttgtgtttcactttccttggtcactctttatttaaatactggatacactctattttttctaagttatccttagatagatagctaattatatgagttctcttaaagctcccttgagtaacatgcttcgcttattagttttttttttttttttttttgggttagcactccctttctagttttaagtgtttttcatgtgattataatcctttctttccattaggatttttagcttaa

SEQ ID NO: 69716 - DNA, 1393 bp, Cannabis sativa
tgtagtttgaagagtatgagaagatggtatacttggatggagacatacaagtatttgaaaacattgaccacctatttgagtggccaaatgggtatttctacgcagtgatggattgcttttgtgagaaagtttggaatttctcaactcaatataagattgggtactgccagcagtgtcccgagagggttccatggccggcggagtcaggctcaccgccgcccttgtacttcaacgccggcatgtttgtttccgagccaagtcttgtcacttaccacaatctcatggaggctcttgagaccactcctcctactgcctttgctgagcaagtacgtaattaatcaatattaataatccattattaattaatgtagtaattaattaattaattaatatgtaatatattatgcatgcaggactttcttaacatgtttttcaaggacatatacaagcctattccaaatgtttacaaccttgtgttggccatgctttggcgtcaccctgaaaatgtagactttgataacatcaaggttgctcactattgtgctgcggtatgtataaatatatatatatatatatatttatggatcagattttgtccccaactagtgttaaatcaatagttggattgatccaacggtttttaatcattagaaatccaagtacatcatcaataaatctccagaacacataagggtatataagtttcttttttataatattttgttaggtagaaatgtgaataattttagtatataaagatccacactgtcttcattagtatgaagtacttttttgagaaagtgtccaataacaaaaccgtgaagcctgacatattttacaaaatagtcccaatgattattttgtgaaaaaagatcaagaaggccaaataatgcaaaatgatcaatatccgttatatataatgctaagttatatactattgtgttatatataatattaataatatataatcgaatacatacatattattatatgtagggatcgaagccttggagattcacaggagaggaagagaacatgaacagagaagacataaagatactggtgaaaaagtggtgggatatatataatgacaaatccttggactaccatcatcatgatcatgatcatcaaacccatgaaagccctaataattgtgaatgtgatcatgatcatgtggatggtgatgatgatggtgataaaggtggtcatatcaagcttggaccttttcttactgctttagcaactgctgccataccccaaaacactgcaccttctgctgcttaattaattatgttaattaactcttatatatagaataataagagttaattaattaattagccatattatatatgtaagtgttattatattggaataagaaagtactatatat

SEQ ID NO: 69717 - DNA, 2896 bp, Cannabis sativa
tctctctctctctctcttcttctccttcttccgccatgggtggcgacgcctcaaactccgaaacgagctcaggcgatcacaagcccgtcaaactaccgatccaaggacgccgaaacattctcatcaccagtgctttaccttacgtcaacaacgttcctcacctcggcaatatcattggctgtaatatgctttttctttactcatgcacaccaactgtttgtttatttgactaaattgaattgaattgattgtgaatttgatttttgtgggtggcaggtgtgcttagtgccgatgtttttgctcggtactgtcgtttgagagattacaatgctatttatatctgtggaactgatgagtatggtactgctactgagactaaagctttggaagagaaatgtagccccaaacagatttgtgataagtaaatttttctactttgtttgtttatttaagttattaaccgataatgattgagataacaaacaaaactaagttgtgcatttcgggtagaggtgaaaaaatgttaaagtagcaaaataaccgtgttagatttatactgtgcgaccattatgatcgcaaaacgactataatgtttttttttttgtatgcttgcttaagataacaaacaaaactaagttgtgcatttggggtagaggggaaatttcccaaactaacagcatgaaaatgttaaagtagcgaaataaccatgttggatttacattgtgcgaccattataatcgcaaaacaactataatggtttttttatggttgcttatttatctatttatttttgtaggtagttttgcttaatttgtctgtttagagaggaccactcttttgggtggtctcaagttgttttgtttaaatttttggggtagctcgattttatgtaagttatttgtttgtagtgattttgatccctaagtaaaataaaaacatgattattttactaataaaatattttagaaagttattttgttaataaaaattttcataatggttatttttacaaaatactcgggattggaggggtttattctatccataaaggttcaatgttaaaggtgagacttacatgagaaagaaatatttcagaaaactagacaataaaacgttactatgataaaagaaaactcctaacttgtaatttctctcccaaaataatgaaaagaagtggattagtatcatgtattaagcatatgaaaattttcatattagagaaaatatcttcaaacataattgtaggatgtttattactttgaacccccccttttttttaaaaaaaaaataaaaatttaaggcttctttcttttttgtattcgtagtgaggaattatgaggaatggggcttgcctgttatggtaataaattttaattctttgttttatgggatcttcataggtatcatgctattcatagagatgtctataagtggtttaatataagctttgatgagtttggacgaacatcgacccctcagcagactgaggtttgccaagcaatcttcaagaaactgttggagaacaattggttgactgagaacacaatacagcaggtgaacactaattgtgttattatatgtttcgctttcgattaagttttatgccaaatggtgaattttgtgattgttttgtttgttagttaatgggtatgtgtgtgtggtaatggggtatcatttgtgttgttatagctgcaattttgactttatttcatgctatgctgcttcagccttactgtgacacttgcaaaaagttcttggctgaccgacttgtggagggtacctgcccaactccagggtgtgattatgattctgctcgaggagatcaatgtgagaagtgtgggaagcttttgaatcctacagaactgaaaaatcctagatgcaaggtatataatagatttcatttcggttaacttgtttgcttaggccatcttagtttgtatacttttgaggcatcaatgggctagaagttcctttaagtagcggttttgatcgtgtgaggtaattgaaaaaagaaaagaaagaaaaaaaaaaaaaaatagtctttctttgacaatgccaatgtgccaatttatttatgaccattagtgacataaagttttgttctttagtaaaagatctctatttgctataggcacattttcagtttctaatttttctttcttacgagcaggtttgtgggacaactcctcacattcgtgatacgaaccatctatttcttgaactcccgttgctgaaagataaacttgaggaatatattaataaaatgtctgtggctgggtcttggagccaaaacgccatccaagcaacaaatgcttggcttaaagaagggcttaaacagagatgcattactagggatctgaagtggggggttccagttccccacgaaaacttcaaagagaaggttaacaactaaacttgtgctaaacttggtccgctccatatcatttcaaatggcttattatatatatcaagttcttcaacatgacgttggcaggtcttttatgtctggtttgatgcacctattggatatgtctcaattacttcatgctatacatccgattgggagaaatggtggaagaatcctgaaaatgttgaattatatcagttcatgggcaaggataatgtgccattccacacagtaagtgttaaatattgatacttgtgtaggtactttattctatcttttaaaatcttaagttcttgtttttcgttttggatccttcccatatttttacaatgtgaaaatagatgttcattttaattttaaaatgtttctctcaatgtggaaacatatgttctcctacctttcttctggagattaaatgcaaaagatgtgacttttaccagtcatctctttaacattccaagtatcaaaatatgggtttcatttacatgt

SEQ ID NO: 69718 - DNA, 2192 bp, Cannabis sativa
gaaggcaaaaatcttaatttactcacttcaaagtattctatgagcttgtgagaatggcggccaagagatccagcataaatcacttgtccacctagtttcattagtgttaactgcaacaacatgaattattattattataagcaaaaaagatgaataaagttcaaaaataaaaaattgaaatacaatctcacctcatcaaaagcttcaaagatatctatacttggctgatgaattgtgcacacaacagttcgacctgtattaactgtatttctcacagttcgcatgacaatcgcagctgctcgagcatcgagaccagatgttggttcatccataaagattatggatggattagcaactaactcaacagctattgttaatcttttcctttgttctgttgaaagaccatctacacctggaagccccactatagcatctctaataggagttaattcaaccaattccatcacttcttcaacaaacatctgcagaatatttcatacgaaagatatcacatatagacatattgtattgtaacaactgagaaagagattttacaagaggacactttgacatacatgtcttattttcgcctttacatctggaggaagacgaagccatgctgaatagataagagattcatagacagtcacatagggtgaatgtatgtcattctgctcacaataaccactgattcgagtaaatgttgattgtttcttcggatagcctgagatgttaatgtttccttctatgtaaccacctgtttttcttcctgccaacacatctaaaagggttgtctttccagctccagtgacaccaaccaatgctgtcaatattcccggcctaaaagcaccgctgacatctcttaacagttgaaggcggtcttcttcaactccatgttgcttcatttcctgtaatgaaaaaccaaactattccttcaatcattgcttcaaataaaagagttttgtagaggaaacaatagtaaaatcaaaggtgaaaaacttacagcaggcatgtcaacatagtaattcacatggctaaaagcaagtgataagggttgaaagggcaacaccattcctctcttttgtgcacgaacagaagtggttctaatggtttctgaacaacctttctctggcatctcaagacctataaatatctcacatagttagagattagtgaaaaatacagtcacaaataatgaaaggaagacataaaacagtctcaagagttaaccttcaaatgtttgttgtcctaaggcttttttctttttcttattgacactttcttcatctgcaatgacagcttttgaatctccaatagctggttttttcctcacatgaaatgcctttgttagctttaaataatatattgttttcacaaccaaagcattttgagtaaaaataagaagagataacttacgatttaaaaaggccaatgctgcaacaaatacaatgttgaatagaaaagaaaatccaataagtgccccaatagaaatccaaaaccaatattcatctgtaaagaatcctctggcatctaggagaaattttcccactgtggattgtttatgttgtagagatgaaattggctacaataggtaagaaactcattagaactccaatgatgagaggagatattttccaaactaacgaaaaattcactgcagtaaactaattaatgaatgaagaccattagtctaataagaaatattaccgtactccatctttcatcaagaaattcattcatgcaaattgcattctgtgcatacatcaagggagaaatatagtaggcccataacagccatggctgaatgtcatctataacacaacataaattttttatagtaagtgttttgtttataataacatgccacatctgaatttaaataaggattctaaagaattgttaacaataaaacttacttttggaaataacaaatcctcctagcacaagaatcatcaacatgataaatgtaccctccatagtggcaagaactaaggtccttcctatagccgccataaaacgaaagagcgacagagccatttgatgcaagcaaaagtaagccaagaattgtttgaaaaatctgtattaaaagaaagaaagaaagagaagataagacataaatgcacaggttttagaataattaaaaagttatgatttttagctccataatagatattacctgctagcagctggag

SEQ ID NO: 69719 - DNA, 4954 bp, Cannabis sativa
ttctactctattactgtttctcgcaatcggaagttacaatcttccatacaggctctaaatcgtctcgtcgatggttctcccaccatttgtttcaatcaaggggtggcgtgggggtgggtgttgactgattgtgaaaatggaattgtgggagagtaataaagcgttatgccactagacaaagcgctggagtgctgcaccctaaatagtgagagtctaaaattatgtttcaatgaaaccaaggtttcttttaaaataataataataattttctaaacagtgtgtacgcaagtggtttcattcatgtataattacaatgtgtattgtgaagcttaaagcaactcttttgtttatttttgtatatatgagctatagccaaaatgtatcaaggtctaaaatggaggccttgacttgcttaacatgggtggtccccatataggtcctcccttcctgcataagaatgactcaaatttagttctatttttgcttttaacttttactaaaaccaaatgtgccaacaattaaacactaaaacaaaaacaaaatttgtttttgcacgcattatgaactgtaattccaataatgacttgtataaatcatgcaataggagtaatattctacattattttcgcacattatgaactgtaattattataattacacaaaataaaatttgagtcttatctaaaaatattatatggttgataataatgacacattatgatgtataatttaagagaatatctatatcattatacatgttataaacatatatgaataattgttgcaatattgcatcaatgttaataatttgtttctctctttttaagatttccttttgaagtatttagacatagatagatacatccaacaagagaagtgtgcatatatgagcataatcatcatctagaaaaagggacaatggcaaatgaaaatggtaataaccttatccaaatataattaaaaattgacaatttttccttgttagtgacaaatatcttggatatttatgtgtcattgtagaaatatagaaagtgcactacgttttgctccctcaatgaaaaacgtttaataatttgtaagagtctacctaaaatgtagtgattggttatatggtcatagcaaaagaaaaaataaaatcacttacttaatttacaacatgagaaaattgtaattaatagaaaaatattaaaagacaatatatactacatgatgtgttatatagttagttaaatattaaatttcacgtgatttaatttaataattattataaatatctttaactatctgcaagctggtaatggtgctaagcactactaatattttataaaaatactctaattaataattataatgacatggtgaagatgtcaattttcatccaaatgttaaatagaatatggagcataggtgaggatggcctcccttcccacctcaaaagtgtgtttaaattttatttattttttaatatttgtattgattttatatttactttttttatgtgtttttatagtaaattaataattttaaatgatgattgaattttgataattggataaatgttatgtttggtgtgattttatatataaaaaaaataaatttaaataatttttatgatttagcattttaaattatgaatattgttaacattttaattttgcatgtaatttactttatatataagcgcattgtgagtaagcggtgaaaatgtgaaaaaaaaaaaaaaaaaagaaatacaaacccacaagttgtggttaaaagaaaaagagaaatactaaagggcaccacttgttttaatttaataaatattatagaaaatagtactaggcaccataagtgcctcatagcaatactcattgaaaaaatactacataattaatttgtgttacattaaacgcaaaccacgtcacacttcaatacaaaataatatggttaattaaccactaaattattagtttatatatgtgacatccacataatttttacttttgagaaaagaattataagaaatatcttacatgtatattatttggtttgcatgtgggtttagtcgtttattgtattaattattacgaccttaaattttaatataacgtgagtcgtattatttaacacataacaaataacatttataataatattaagttaatatttataatcataatattaagtaagattgcatatatgatagagataatatataattatttaggtgcataggtttcatctaaaaactaattagcaatagaaaaagtaactcattcatcttatatatattttatttacatacattagcaatgtaggactaactctaatatcattcaataatttagataaggctttgcatgattttgtattttttactttcccggacaagttaatatacatcagtacgaggcattgaggcagaaagcattatattggcaacatagattgcatgtttcctagattaaggatggtgataaatgtactaaattttttttcattgctgtcaccatctggaataggtgtaagagtgtggagagtatcttgaatagaaatggggtatggattacggataagaaagatattgaaagggagttcacgaatttcttgggagatatttttactaatccaatctagggtccgatggagagcttaaaccatttaattttagatcacctttccctcttgatcaagttgaactagaattaattttggggcatgaggaaattagacaaacacttttctctatgggaagtttaacagccccgggaccggacggtatgtctgttctgttttttaagcactattggaactcaacaggtgcggatctttgtgaggctatagtggatttctttcaatcaggttctatgcataagggcttcaacgaaacgaatgttgtcttgattcctaaggttctcaattcaaagaaagtgtcgcaattcaggcctatctctctgtgcaatgtggtttgaaaggttatctagaaaatcattacaaataggtttaaactgattcttcccaggctaatttgtcccacacaggcatcttttgttccagggcagaatattcaagacaataatgtactggttcaagagatcatccattcatttaagctcaagaaagggaaagagggtttctttgcgctaaaaattaatcttgtcaaagcctatgataagctaagctggcaatttattgaccatgtactcaaaagttttaaggctcctgacaagttttgtaattgggtccatcagtgcatctctttgacttccttcaatattttccttaatagaggaactgttggcaggattgctccttaatgtggcataaggcaaaggggtcaccttttcccttatcgggcttatctttttatctgggttatggacatcctctagcgtatttaatgccctggatgctggaataattaaaggcatcaagttgagtaggaatggaccacaactttctcatcttttcttcgcttatgatctaatcctagtaggtaaggccaccatggaggaagctaagagtatttgacagtgcttggaaaaattttgtgattggtctaggcaaagaattaataaacttaaagcatccattttaggcaaagggctagcaaacttatttcagatgggaaagaaacgaatatctcgaaagatctgtggattttacatggccaaacattctatgtcgtacaatctaaagaaattcttaggcaaagggcttgcaaacttatttcagatgggaaaaaaacgaatatctcaaaagatctgtggattttatatggccaaacattctatccttaacctaataacaatctacatgagggtttggagacagtggtggatttaatgttagacaatgggaattgggacatctccaaattataggctctttttgatccagaaataaccaacaatatcctcaagggtggtagaccttgtgggcaaggaaagaataagtggatatgaactaaagaatcaaatggtcattttttgacaaaatctgcttaccttattcaagctttgcagcgtgccccctcgtgtagtgttgctccttctatgtggaataaactttaaaattctaaaattttggagtttcacaaagtcgtctagtagagcatcctctcaaatgctttgcctatccgatctctcctcgctagaagattgaacattgaggatgtctcctgtcctctttgtggggagggagaggaaacgatggagcatctacccttttattgcaactttgcatgtcacctgtggaggttgtcccctagggagttatactgatttccgaatctggagctcgagtatgggactgggtgcagtttctttggagtctaaaatctaaaggggtggatgttcaagagttgttcccatatgcatcgattatagtggatacaatatggaaagcccgaaatgataaggtacacaataattctctgagtaacctcaaacattatattgatttaatctccttttgttacgcaaattatggttcttgtatgttttattcgtcgagggatgatgtgtcttttgtttggtcccctcctcctgtagagtgggtcaaaatcaactgttatgtgaaagttggttgcagttcgatatgcgtggtggctttagctagggatcatacggaggcaattttgtgtgtagctactagcaagctcaatttctttaatcctcttattggagaagctgcaacctgtctgttagctatagagacaacacttttgttgaatcacccttttgtgatgattgagagtgactctgacacaattatcaggacgctgaaaggaacttgttctagttggagaattagtaactatgtaacaatgtaaaaatctctctaatcatttgttaagatgtaattttttatttgtctcaaaattatataattttgcaattcataatgtggctaagtgagcttttgccctgaatgttgtaggtattgtagatcatctctctctctctctctc

SEQ ID NO: 69720 - DNA, 4501 bp, Cannabis sativa
  modified_base (501)..(515): a, c, t, g, unknown or other
ataatccacatgggaattctattaaaagtacatagaagctaattagatctcacgtgaatcttaggtggcttctggtcattatatctcatgtaatatgcaaaactctcattaaattcatataaataaacaaaaacaatacttggcaaaactgtcggtggtgacccgcaaatatcattatttgttttaataaagtagtaaacaaataaattatcaaactctaatttaatgttaaatctttagtagaaccaccaaaataaatttcccattgaatctataaacacctttaaataattgtataacacaaatttaacattggtgtaatacaacttagttttagtcaatttttactaaacaaaaaccaaaaacttatattttgttttatgttcttattaattttagaaaattctacaatgcatcactttaaatgagatacaccgatatacctctatttattttagtatttgaaataaattttcaatcaaattttttctcatggtcatnnnnnnnnnnnnnnnttaagacatcctgcaaaattttgagaaatttgaaaaaatttaatacactgaaaacaagattcaaacagtgcgttgcacgcgtgactattttattttataaattactccgaatttcataaaattttgtaagatatcttaaataattataacgtacacgaatatgaaaaaaaaaatagactaaaaatttcttctaaatactgaaataaataaagtgtgtatcagtacatccttgtaaatgagtgcattgtagaatcacccattaatttttatgatgtaaagcaatggataataattttgttgggcttaatttctgtaattttttttagtttttaaaattaaaaaataaaaaattattttttaaatttaaaagtcaatctaaattttttaacttattccaaaagatttgtgagaaattatttttaaaattaaaataatttacataattcttaatttactcacatttttttttaataatatctaaatatttaattttttttttttaaaaaaatatcatcatataataactatccaaaaataaaaataaatcaaaacttaaatttaacttataacaaaggtagaaatttaacggaacaaaatttatttagaatacggataggggtgaataaggcagaagaatgaggaggaagaggttaactgaaaaaataactgtaagttatggcaagaaaagtaatagatgaaaaaatggagggtatttttgtaaattggagtccagaatggcaacagagttggccagaggaaaaaagcaaaaagggaaggactgtaaaatgcagagagatagagtttagtttttagagagagaaagaagatctgagttgggatcactgagtcgcgggaacgagttagatcacttcttttctacctgagccgtcaaacattcaaaaaaataaaaaataaaaattaaaacaaaaaacaaagaagaagtaggaagaagaggaagaagaagatcctggccgttagatcccatctcggataacctatacctacctttcgattctgcacctctcgctttctctcttctctgcgaaagctcaattttgagcttaaacctaagattcaaaagaatcagagggagagaaagagagggcttttcaaaacccaatttgttttcttgtagattttcaggtactttgtcgctctcttcattttcttttctattttttttttttttttggggttgctgggtgggggcggtaaagatggtgaaattctccagtcttatttgttggtgggttaaaagtgtgagaacaatgtgtggaaaatatatttagattagggaatcggttttttggatttttattttagatcccaaaattttatattttcttttggggaagatattggatttagaacagaaaagaaatttttggtgcggaaagattgtttctttaggtttatctgctgaggaaagtttgttgctcttcttttaatggtggtttttgaactcattttttttgtttttgttttgcagctttgaagtactgtagtaactcgactacttggggatggagcttagggtcaggtggcgaaagtgggtgtcagtgattgagcagcagaatagtttgaagctttggcaatcgtgaaggattcttgttgtaatttgaatttgaactgaatcttttttgagggttggcgctaaattcttttgtaggttagtttctagggcttagatagtttaaaaatccataattttggcattggtctcaaacccccagtaagttatctttggctcttgcaagtgtgtagctgaagatagagtagaaacttttccaattaagagttcaaaatcttgattttcatagacgatgatggaagtggcttttctggcttagaaacgaagaaacatataaaaattaaacagaatcaatggaagatttatcaaagtatgctcatagtccagttcatttagcggtggctcggcgagactatgccgctcttaggcgcattatcggttctctgcctcggcttgccaaggccggtgaggttaacactgaagctgaatctcttgaggcagagattcgagctgattctgtttcgtctgtcattgatcgtcgtgatgttcctggccgtgagactcctctgcatcttgctgtgaggcttagggacccagtttcagctgagatactaatggctgctggtgcagattggagtcttcagaatgagaatggttggagtgctctccaagaagcagtatgcacgagagaggaaacaattgccatgaccattgctcgacactaccaacctcttgcttgggccaaatggtgtcgtagacttcctcgtattgtggcgtctgcatcaagaattcgtgatttttacatggagataacgtttcattttgagagctcagttatccctttcataggccgaattgcgccttctgatacttatcgaatctggaagcggggttctaatctccgtgctgatatgacccttgctgggtttgatggatttcgcattcaaaggtctgatcaaacgtttctgtttcttggagaaggctacacttcggaagataacaatgtgaatttggcacctggtactctaattgttcttgcccacaaagagaaggaaattactaatgctttggaaggagctggtgcccaaccaactgaacaagaagttgcccatgaagtggccttgatgtcacagacaaatatgtataggcctgggattgatgtaactcaggctgagcttgttccccatctaaactggaggagacaggagaggacagagatggttggaagctggaaggctaaagtttatgatatgcttcatgtcatggttagtgtgaaatcaagaagggttccgggtgctatgactgatgaggagctctttgctgtggatgatgaagaaaggacagccaatgggggtgataatgatgagtatgatgatgtattgacagctgaggaaagaatgcagcttgattctgctcttcgtatggggaaccctgatggtatttgtgaggatgaagaacacggggctcttgatggccaagaaaatggttcaggaggtgcctatgaaaacggtgagtctaatggtatgtctaaggagaagaaaagttggtttggttggaataagaaaggtggcaaggctaacagtgatgattctgaagattcgaagaatttgaagaaggtctcaaagttagctacagaaggcagcaaccagaagtcacttgatcatcaaaaaccaacatctgaatcatatagggaggatacgacagatgccaagaagggaaaagaaaagaacagcaagaagaagaagaagaaaggagtgcctggtgaaattaagcacgagagtgagtacaagaagggtttaagacctgtattgtggttaactcctgatttccccttgaaaacagatgaacttctgcctttactagacattttagctaacaaagtcaaggctgttagaagactaagggagcttctaactaccaaacttccactcggcacttttcctgttaaggtaactaaatatttgtattttttgtaatcccgaacacactttgatttttatggaccattgaggtgtcagttaagcattgaaatactttcaagcttaacttagaattaaaagaacaatcatgtagtcattttttttttgtgaattcattattttattataagcacataaaaccagattctttttattaaatagaaggtttgtcgtgtccttctttttcttggttagttcatgtcacttgtagcgttcatgctgcaatctgcaggtgttggccatgtggttccagcattttaaaatggctgaaattttattgacaatttgtctcgcatgattttaaaaatgcatttggtcttttgatttttggatcttctgttacacccgaatgtgctaagaattgttttatgacagtgagcttctctagtaacggtgtagggactgattttctattacttgagacacggtttaattatatcttgatagtatataaaaaattgttttttagtatttca

SEQ ID NO: 69721 - DNA, 1345 bp, Cannabis sativa
  modified_base (1139)..(1142): a, c, t, g, unknown or other
aagaaaaaaggtgtcaattctctatattattatagtgttcatacagtcaccatcttcataaactaaaaaagaaaactccactaaaactttacttaagcagctggaacacaataacacagccacgaaattcgagtacaaccaaacaagattccctttctttttcagaaaacgactctctcttgtattctcttttatctttcacaaataaaataaatcataaattccactaaaaataataataaaaaaaaagcaagatatttcaacgagagattcggaattttccataagcaaaacgttcatcgaaacttttcaatccaaaaaagtttcgagttacgttttcacaatttagtgagcttcaaacaatactacacacaaagctatatacgtatacatacacgcgaatataaacaaagtcgctggtgaagttcgatctactttcactgactgaaaaatcaagaaaatcaaaaaaattcaaaagaaaaaggaaaacagtgcgtagaatgataatacgaaccgacagatcgagacggagtgaagcgatctggtcgaatcggaaaaccggagaagaaaagcagttttccagagagccaggagctgaaagtgactgaggcaatgggagcaagtagagtcgaaagagggagaagctgaaaaaagaggtttgcccttataatactcgattggacggttcagatttaatcctgatgatcctgggcttagattttgatgagctgggctttttcttgggctgggcttggaccagtactgcatttattactagaacagttggttagattgaaaaggaatctaattttgaatggggaaaataaaagatgctttatgataattattttcaaattcgttttaattaaaattttgagagaaggaaaaaaaatgatagtaataatattttgaataatttgcggtataaatatttatatttaacttttaattgtaaataaaaatataagtatcatttttatcagtaataatacataaattataattctggaatttttataggtacatgttgttaagtattaaataaattgtcacgtgtaggggtgcacaaaatatgggccaaactattcaacccgaccaacccaactcattttttgtagtaaagggttatgttaagagtnnnncatggctcattgggttgaaaagtgataggccatataattatgagttgacacattttaactctatataaccaaaaccaacccatttattgaaagatgttccaaatttaaaataacttccacacataaaatatatgttttctgttaggctaaaattagtctaagtttcgggtcgtattttcggttagttttcactctttgtttct

SEQ ID NO: 69722 - DNA, 1156 bp, Cannabis sativa
atgtttgttgaatcaaatgtaataaaagtatttaagggcatcctcagattttcctttttcttttttgaaacaaatttgttttaatttctaagaagattacaagggagtgaaaaagccactggacaacgtaaacatggcgatacagaaacacttgcatacaagacaataaagaaaaacataacatatattacataatgacattctaaactctcaataaaacagagaagggaatctctttcaacccctacccacaaccttatttttcccataagctgtccaaatcgctgctttgttcttaaaaggtcatcttcttcctctccagccatatagcccacagaatagctgacatggcagtgactcatagaacttgtctttccttgcatcctctaatcgagaacatcaacatttcctgaacaaccagcgggggttccccaaagcatcccaaactcatttaatagtttgtaccacaatctcaaagagatgtcacaatgaatgaatagatgtttactgttctcattatcttttctgcatagtacacacgaactaggggaaatgaccatagaagactcttttgaagaacttcatgcacattcaatctatcacacaccatcattcttcaaaagaaaaaaaaaggtctatcagatatcatgagctataagtaaattcttactttgggaggcaattgtaatttccaaagaacatccacccaatttagagacaagaagggactcatcctctcttagcaagtcaaaagctgacttacaagagattttttttttattatttcccttccaatttccgcaatcttccaacaaatcacaaacttggatgccatccattctttggagaaagtgagttgactccagaatgtcattttctctcaagttccccaagagatgcaaattccatgttactgaatgcatattgttaactataaaatctgaaatgacatgcgctttttacaactttgtcttgccaaatctggaaacgattcctttaaagtggatccgattgtaatttcccaatggagtcctaagagaccatctagagctgatttttgtgtcccatccattttcttgcaatccataattttagttttttttttttatttacaaaaaaagagtaagaggccgttgtcttagactagccacccccc

SEQ ID NO: 69723 - DNA, 1868 bp, Cannabis sativa
ctaaactatttttcattataaaagacaaattgatgaaagatgtttatcttatatatcgtttacatatcaatccaatcacgcataatctaattatactcagtacattggccaatttggcatataatctaattatacttagtacattagtttagggccaatttggcatagttgtgctgtgagaagctgctgtagctatgctgtaagaaaaaacaattgtagcaaaattgtggaaaaaaattgagctgagtgtttcgtaaattacaaattttaaagtaatgtaagtaatgtaccttaggacatcctcacgatctttagcattagtttccttgtttggtggatattttggtagggttgatggatatatgaagcactgggaataggaaagatgaagcacattagttgagagaacagaagaagatgacacaataaatggataaagtttcaattattgttttttatttaatataaaaaaaaagtaatacaacagggatatagataaagtataagtactggagattctgttagggttttagaggatccctagctaccatgacatgtgactttcaagatctatgacatgccaccactctggagtagttgtatgtcattgatttaaagcaaggtaatggggagtgggatgaggattttattcgagctgtcttcaatccaaatgatgctgagttataaatccctagatacttttgattgggatatcgagaacaagagtttgtggtattacagcaaaattctctatttgcaatggttacagaatggtatcaaccttacaaattaaggagatgcaatctaatcctgagttggaggagacgtggtggaaaaagatgtggaagttgaagataccgacgaaagtcaaacattttgtgtggagaatagcttattcttggattcctatcaactcatcccttacatatagagaagtgcagatagatccttactatagtcgatgttcatcaggtctgtatgagaatgtgtttcactcttatggggctgtagagctaataatgatgtgtggaatatgagtagttttcatgggaagttacaaagacaggaaattccttatgagagtgtcccatttatggtgccaggaagagtacgaattacttctggtaatatcttagactttgtggtatatccgaaatgatgttacacatgctggccataaaccacaagcaggagaaatccttgactggtgttgtaaattctttgcaaaatgtaaaggagttcataccagtaaagcaatggagaatcttaggataatattgtgtggtctcctccgaatgaataatggtttgttgaagatgcatgttgattctggtataaaggctggcaaaagtgagggtagtgtgagttttattctacgtgatcacgagggccaaaggaaatgactcctctatggggggaattacaagctattgcggcaaggatccaaactagagttcagaagaattcctcacgattttgggttgaaaataatgattctctccaagctgtcaatttggttaggaaaaaagaaagttaatgtcgagatgtggattggcttctcctacacattaggaacttaatgcaaaattaaagggtagatggagtatcttgagaagctttgcgcatgtgttagccaatcaaattttggttaataaagttagtaccgtattgattggggttaatctctcttgtgggagtcttgctatataacatgattcgtgttatatcctgtgtaatgtgtttttttttttttttttaattaaggaattccgtttaaagaaaaacttttaaagaagtcactacaaaaaattgttacttttagtgacaaatttttagttacaacgtaattttttttgtgactaaatgtg

SEQ ID NO: 69724 - DNA, 5139 bp, Cannabis sativa
  modified_base (4748)..(4765): a, c, t, g, unknown or other
aaattacgatttagtacatgtcaaaattttgggggtgaattactaattagccaatactaaataagaagaaaatataacaacatttatttggtgtagtgttaaagggtcttactttaagctaagagatcaaggttcgattctcaatctctatatttctattttttaaaaaatatttaatgtgtagttatgaaaccttggagctttaagagtttttaaaaagtttacctatacaccaaagcactaaaattattatttgattttaccttaggtcccacatattttaggaccagctctggattatactgccagtttcgagcttttttgaggttaattctgtctaccagtagcttggaatcagtgaccagaacaacctctaaccacgcaccaagcaagcaaagagactctgtgtggtggagagcgtttatgcttttaagggactgtccgccccatacatgacagtgagagcctcaatgagggttccctcaccatcctgcacgataacagccgcatataacccctctaaccgctgcattaacaaagagtaatagaacttttaggcaaagacattttattatcatcagtagacataatagaaggggcatgtaaagaggtaacaattctaaacaactccattaatcgaagtttggaaaccttccaacgaaaggtagtattttcatgataagcttgatttctcgcactccaaagttcataacaatgacagcaagcataaagcaagatggccagcgatcatcctcgtgagcattttacatattacttgggaataagaagtgttagaattttgatgaatattttaacaaaatatagaagtgtttgtgtgtgtagtggaaagagaattattaagagtcccacatgggatatgaactcttgtttataagagtatatagagtgcaattttgacatttgaattttggtcgtatccagttttgtacgaataggtgaggacttacacacttgacccaccacacgcgagggtaaattgaaaaatactttttttatttatcaattaaccaaatctacctcttatttatatttaattgaaatatattttttttatatgtactatacttaaaataccctgacataagggagtcatatgaagagtatattgaagtgacataagcaaaattggtaaagtgtaaaaaaaaaagtaaaaatgatagatttaaaaaaagagattaaaaataaaagaggacaatataaaaataatataaagtgtaatttctacaggatagttgaaaaatacttatttttcatatctattaattaaaaatactcttatattatattttattaaaatataattacttttttgagtggattgtctaatatatccttactctctacttaatatataatttatattaacgtctaatagagatattattcataaaaatgggtatatcttaaaaaatatgaaaatagagataaaaattaaaataaataaagtcaagtggatatacaatatagggtctaatagagacatcatctataaaagtagatataattttaaagaatatgataagagaagtaaaaatgaaaacaaataaaataaagtggtatacactataatttgtattttgttggagcgaacccatcatatcaccctctcaatccaatagtccacccctatttgtcttcccttcctctcctttttcctggactgagcaatagaggttaattctctctctctctggttctgattattatttctttcaaatgaaaccctctccgccttagcccaacccttggttgaagaaaaagaacggttgcagctacacgtaaggttacgattattctagctatatatgtacattcattttctttctaaatattgttgtgttaaattttgcatttggaattcatttgtttcctcagtagttttattatcgtgttataattgattatatgtataacatatagttgtctttttctccctctattttttttcttctgggttttctgtttgtttttacagtccaatccactttgagtggctttgaactcatggctgaaaagagcactgtaaagaagggtggtcttccagagaaaaaaagaatgaagacaacatcgatcgctgaggctgaggacagaatatctcaactacctgaggcaattattgtacatattctctcatttctacctactatgaatgtggttcagacatgtatcctctcaaaacgttggaaattcatatggttttcagtcccaaaactctttttctccgatactagtactactgctcccaaatttcaaaggttccataattatgttgataattgcttggaacaccgcaagagaggtctatattttattgcagattcagctgtaactagtttcaagcttcagctaaaatgctgtctaagaagcaagactcgcagcctagataaatggttaaattttgcagttctcaataaggtcaaggaattgagtgttgacttaaacccaggaaaaggtaagaattatggctattactactactgcttacctagaatagttgtcaacttaagagccttgaccattttggagttgagtggaattgagttgggttactcatttagttttccatgtttgaaattactatcattaaaagatgttcggcttgcagataatgtgaaaaatgatgtgatatccaagtctttgttggattgcctatcccttgagaaattgtttttaacttcatgtcatagcttaagtactcatcatcctctccaggtaaaaagttcaagtcttaagttcatgaaaattagatctgatgtatctcttcaagttgaagccgataatcttgaatctttagtgatataccgggcttcctatggggaattaaatctctctgcatgtaaggcaattagaaagctcgtactatattgttgtgattttcgtatgacagaccaactaccggttcaagatctcattacaagcctcccactccttgaggaattgacttttgataattcttattgtaagtggcagtttgagcatcttacaatctcgaatcaacacttgaaaagcttcaaattgattaatgtgaactgcgagagtaaaatgatcaaggttgtcacaattaaagcatcgccaaatttagtttcatttggttatgaaggttatatcaattgtagcatatcagtggagtcacccaattcgttgaatggaaaatttgtatttaaagatcatcatcacaactatgatacaaattggtttatcagtatgatagatttctttttgagtctcaattgttcttggaatagtttaacactgcacctttcttctgataaggtatgtccattacttatcttttatattttggcttcttttttttttccttaatgttatttgtcttattttatatgatataccatacattgatatatctatatgtttcttgaaattataagtaggctctcatcatgccagataattgtaaaagaatatgttgttctgttttatctaattggaagcatctcagagttattatggatcgttattcaaagaagaggcaatcaaacttgagagatgtgttgatgtggatatcaccttctttagaaacattatttgttaatggagaggacatattctagtggctttacaatattatcataactaacgctatataattagtctgattgagcttgtatattctatattagtatcttgttactaataaaattggatactttcattttgcccttgttctattgtattctggagggtaaagatatcccttttgtctaatgtattttggtggcttctttgttttttgagaccccttgttttaaatgaagatccaagttaatcacctaagacaatgaaaaacttctcttgttgtttattggtaattcataaggctgcaagcctgcatatgcgttttttcttctttcaaaatttacaagtctcatcttgcttgaaagttgttgaggtatgtatgtcgttcctttctacgaatttcgaagcctctcaagtatagcaaattggtgaactattatttggtttttaccttggatagagacattgtatattaatcatattagctttaatggcatattttgtttaactcaatatactactgtgtactgattttattaagtttgcttatggctacagtattagtttttctcaacatagtatacttcaaattagaataaaatatggtggatacttttagtttcaagaaaataaaattttactgtacaaaaaattgataaaatagtgaatggttaatgagaacaaatctggtatattacatgttgtgacaatgtctccacataaggtgaagcccaaaagattaaatatttatgtaatcagcaacttttagatgaaccttttgttattatgtgttactggctttcttcatcatcaataaatgtatattaatctttttttaacattttcaagtatgtatttatatatatatatatatttagttcaagtaaggatctttaaaattgaagattgaaattcgtggtgaaacaatactccagtctaacatggcacactaaaaaattgacataaactgactggtctgcatgcattctcagtttatagtcaggtggtatggtttgatacaccccttaatatatggtgtatgaggaactgtttctagttatttttaacttattatttagacacaggattatgatcaacccgaacagattttatacatatgcttcaattcatatcattatcaagctggctctcaccctagctagctttttatttatttatttattatnnnnnnnnnnnnnnnnnntttttttttttttttgtgaaaaaccgaaaactatatagttaatgattttttttaatgattttatgattttcttaatgatttttttttttcatagttaatatgttttttttttttttttttcaaaaaacttattttcttttatagcttttccttttcatcataaattcttaactgtttttttttttcaaaaaagaaatggaaaaaaacatattgcccacatttttacaaatgaaaatgtaaaagaggaaattacattctatactctttttatattgtcctcttttatttttatctttttttttaaaatctattatttttacttttttttttaagcattgtactaagtatatccttgtcacttcaagatattctcc

SEQ ID NO: 69725 - DNA, 2786 bp, Cannabis sativa
aacagcaaatgagattcagatttgtttttcgtccatgcaatgctcattaatattcttcaattatgtatgatttatatccaatcaaaacggggaaaacatgtacatctataaaatacataatgaatccatgtttcaaaattgaactattgctttcagtttttgcaaaactttcactcttaatggacaacagtactcacatgtattttactattttatatgtccacgtgtgtgtgtgtgtgtgtgagaaatgaaacaaaaaaaattataatcacataccttccccagtcacctaatacaggcccagcacccgcagccctagcttctctaccatcttctgtgaatccataagcaatggttcctgttccggcaattaaaacacatccatggagttttcccatagttccgcttgccagggcagctacagcatcattctgaacatatagcccgacatgggtgggaaagatatccctgtttatatcaagaacaaaatgagttaaaagaaacattacacactaacttaccgctaaaatgtgaaatgcatattttcatcttgtttccatatattggctagataatcaaaattactacaagttatgcactgcagccagaaataatgcagtaattaaacttaaaaagtacaccaccaaagcctagtcaactaaagccaagccacctagatttcattaactatgctgtccatgacactaaaacatccaggtttggagtgcttgtcacatcaatgagcagaagaaatttcctaagggatatgcaatttaaattgagggctttactaccccttcccatctgtttacttataatgccccaacttacatatccatttcagagatttttgattgtttttcttatatgggatgctacaaatacaactactaaatctttactgtccctcgaagtgtacaaattttcttttcttttcctaataactgttgagcaactaaatgcaatcgaatgctattttcaccagatgatagctatcaatatatgattttggcttcaactctaaaaagttatggtacctaagccagtctaatattctttcctgatcagttggatggttaacaccagacacagcaagacaaacagctcgaactgcagaccggtttgaacccgacttcagaagtgcctccgccataacttgctccaacgtctccctagcagcagcttctacaaacacaaagaaagaacagaacttgatgttaacaataatgtttccaaccaaaaagttaatatcccacaagctaaacattcgtgatgacagacttaaatttgttcccaatactcttttggtcaaagttttttaattttgaccaccaccatgagaggggtacctcctcaaacgaaatgaaaccagatcacttgacagacaagacaccaaaataccatttcctatacaggctctaatcaaacattttcattcagttcaagtacctaaaaaaacaattttgattattcaagagaaaagaatatagaaagatcaagcgaaattaccaccaacgctgttgtggttggagcagccggcgacggcgcgtgcgagcacgtgcgggcggtcggggagtgggtcagagaaggggatgaccggcatgcaaatgcagacagtagaagtagtgccaccgtccaagcccagaatgacatctctagcagctaaagccaggggaacgtggtgctcgaaatcccaaatttcgccatttctgtaccttttcatattatcacactctctcaaagactgactgattggttactaggaataagcccaaaagaccaatacaaaggggtctctctctctctctctctcactcaacaaagtcagtcaattggataaaatgatttgattttgatattaattttgacaattaagtaatggaatgagacttaagttgtaactaaaggagattttgtttaccaaatatatattttctaataataatgagggagattatgatgattataagtatttggacggcctaatgggacaaaagcttgaggtcggagttggagtcttatgcttcatatttatacatgtctttccatactatgatacaacagtgtattacaaattatgttgattgaaaattgtttcacgtgattaaaaagaaagaaaaaaaggtaaaaggtcattggtttgactgtgatggattttgatttatactgtttggctttgaatcagaatacattccttctaatcaacatttgttgtggaagtggtgttgctgtcattttcatttattgaagaattgagttccaaattacttaaaaaagatgaataattagcaattttttttattgaatttttgacaatattgattttggtttttaaatatacggcttgttaagaatttttcttgaactattacatttaaagaaatttagtacgttctgtcctattattctgtttaaataatgacgtgtctttgtcaattaataattttacctcttaaactttaacaactatcaaatcgtacccctcataataaaaataagaaagatttaatatttttttagtaaatcttaaaaaaaaattattttgaatgattaagaaattaaaattttaaaactaattatgggatatgaaaaattatttactttttattaaaaaattcatttagatattaaaaaaaatatattaaaaatttaatttgtaaaaatatattaaaaactaaattttacatgaacaaacttgaatatatttttttttatcaaaaaaaaaaatatagtaaatataacatttttttttgtttaatttataatttttttcaaaataattttat

SEQ ID NO: 69726 - DNA, 2681 bp, Cannabis sativa
agaattcatattagggtgttaatgaaacatacttgtaagtaaatctagatcctagtaaaataattccaacaatagcttaaatcataagggctacaaatgtctagacaactctggccgcatatacatatctcgagatatcatctttgatggaacatctttcccattttccacactacctagacagaccacagattcctactcatattcagacttttacccctctgttgttattcctacaataaatcagtctcaatctgttggtcctgatagcagacctgtaaccactaaccataatgtgccaattttggcaagttcttctgtgcctgtgcaggttcctattacaccagcaagcatcactgaggctgcaagttcttctgtgcctgctgcaatatctgaaattcccacaactacaaccaacagtgctgcatctatacatgggaatattggaactcaagatctcaccaatgcaaatctgtaaaatctgggattccctggtgtgatcaatgcctctggtgtgccaaactctactgaaactcaacctactgcaactgttcctgagccaactgccaccactagctctcacaatgctgttgctactccgaatcaattggccaattctcatcccatgcagactcgggcaaagtcagggatacacaaaccaaaggtctacatgaccattaaaattcccaaaacagttaaggaagcactacaagatgagcagtggaataaagcaatgtctgatgaactgcttgccttaattcagaatgccacttatacattggttcccttaccacctggtagagaaccaattggctgcaaatggatctttagacacaaagagaactctgatggtactcacaacaagtttaaagcccgtcttgttgcaaaggggtttcaccaacaaccgggatttgattttacagagacatttagtcccgtggttaaaccagtcaccatacgcattttcattacattagccttgtctcatggatggtgcatcaagaaattagatgtcaataatgcgtttataaatggtgatctcaaagaggaagtgtacatggtacaacctcctggctttgaagtgcaagcctctcctccccttgtatgcaaacttcacaaagcattatatggactcaagctggctcctcgagcatggtttgataaattgcatcactttcttcttcaattgggattctttccatcaaaatcagaccactaactatttattcagcacacatccacatacacaacattaattcttgtttatgtggatgataaactcatcactggcagtgacctgaaagttgtcaccaacatcattactgctctaaacatcaggttctctttaaaagagcttggtgatcttcattattttctgggcatcgaagttaactctacaccatctggtttacatctctctcaagcaaaatatgctcgagatttgcttatcaaagctcaaatgcaagaagcaaaaccttctcctacctcaatgaccactggtgtacgcctttcagctcatggcagtgaaccaatgtcagaccctcaactctatcgatcaattgttggtgcattacaatacttgctcatcacaagacctgatctatcctttagtgtgaataaggtttgtcagtttatgcacaatcctttactcactcactggttagctgcgaaacgaatcctcaggtatctaagtggtacaatctcacacggtctgcatataaaaaggcctatagatcatgacataggtgcattttgtgatgctgattgggccacggatcctgatgatcgacggtccacctctggtttcaccatattttttggtgaaaatatagtgcttggcaatgcaaaaagcaataaacggtctcccgttcaagcactgaagctgaatatcgcagcttggcaagcacggtagctgaaattacatggatccattccctctttacagagctacatattcagcttcctagaccacctactgtgtggtgtgacaacttaagcaccatccttctcacagcaaatcctgttcttcacgcccgaactaaacacatcgaacttgatctctactttgtgcgtgaaaaggttatgcaaaatcaggttcatgtcaaacatgttccagctgtggaccaacttgctgatggcttaactaaagcaatctctagtcaacgatttccccattttcgatccaagcttataattcaagctcttgcctctgccacagaagactcgaattgtaattttgaggggccgtgtcaagggtattcggttatgtctgttagtgacaggttgtatcagttagtttgttacagtctattttgttagattagttttctgttgtaacaacctactggttcttgctctaatctgttcactatataaccttgtatctctaacactgaatcaatgagattgctctttccttcatcaatcctctttttctttctttctgtttctctttgtgactttctttcagtcttgttcttgttcttgttctgtttgatctttagctatggccaagagattcaacatatatacacaaaattatacccaaatcaaagtatacacaaataaaaattagagcttaccttgactaagagcgggagagtcggcggtgtggattagctcgggcaacggtctggaggtaggcggtgggttacctttcaattcttttttttttttggggg

SEQ ID NO: 69727 - DNA, 3075 bp, Cannabis sativa
ccatctcacgttcctgagaatttttgtcctcagttgagatcttaacggaggaatttttatccaataaggaatttattatcaatacaatgaaaatcctaagataaagctgataacttaacggagttaactcactgttaaattttacacataaaaatcctaagatagatatattatagatatttttaccgaataatcctaatcctatcagaaaactattttaattttaaattattaattaatcatttttccttttatataacttttatctatatataaatacgtatccctactcagcagacttcataaattcatttgcatacaatacttcatcaatttctttttacgagctagcttaaaccattttccatatttctcaagaacacacttcaaatatacatatataaaaatatatatataacatcctctttcttaattaaacttagtgaatacattttcggctacgtaggctgataattagtcgatcaaaggaatattgaaggtactttatttcttttaatcaaagttaacattattctaaaaataatatttgacatcagtccaatttcttgttcaataaaataaaaatataatttatgttcttattattgttatatacagatcaatatagcaatggagtttttcccaggttttcaatttcaaccaactgatgaagtattaatcaattattatttaaagccgacggtattaaatcaacaaattccttataataaaatgatacatcatgctaacatctatgcttcccaaccatcatcattggcaggtatatatttatgtatatttatagttagaaattaattaatttaataattaatgatcactaatcaataaataattaattgtttgttttggtttatagattcgtacgaaggtttcgaaagagaaaatgtgaaagaatggtatttttttagcccaagagtgtgcaaaatgggaattcgtgccactcgaaaagcacatttgggttattggagaatgtctcaatcagcaaagccaatccaacataacggtgtagatattggcctaaaaaatgttctcaatttttatatcagagacaataaaaacagcatcaagacagaatggattatgcacgaatacataataatcgacaccaacgatgattctaataataataaaaaaaatgattttgcgttgtgcaaaatatacaaaaatccaaaaaaatataaaaataataaagatgagaagcgacaacagcaacaaccacaatcaatgttattattagaagctcaaaatcaagaagaagaactacaaacaaatgttactactagtaccgatgaacaacaacataatcatcaacaaccacaatcgcagctacaatcacaaccattcatagacaatgattattatccgcaaccacaattaatgcaacaaggtgatcagagtacttacgaagaagtcctttcacacaatagtcagtatcaaccacatactagtactgatgaacaacaacaatataatcatcatcaacaatcacaaccgcaactacaatcacgggcgccattcatatacaatgattattatccgcaaccacaattcatacaacaaggtgatgagagtacttatgatgaactttgttcatacaataatagttatcatcaaccacaatcacagctactcatacaacaaagtgaccagagtacaaatgaagaactcctttggcacaacagttattatcaaccacaactacaacagcaacaacaaccgcaaacacagtcatccatacaacaaagtgatgaagaatccaacaatgatcaatatcaaccacaacaacagcagcagttgatacaagaaggtgatcagagtactaacgaagatcagtcccttttatataatggttatgatcccattagtttgttttctactgggcaatacctcacttaagtacaaattaaaaggaaaacaaaacaaaaatctaattcagtgtaattttaatttgagtgtttttaaacatggattcaagatcatcctcaaagctttgctcaactctcttttgaatcacattctgttgtaatttacaaatacagaggaataaaaactgaccctttatattttgtcaaatcaaatggtaacatgtaataataatattcaatgtttatccttttccacatattttcattaacactatagtgttgatcacttttttgattacttaattcaaaactttcaaaagacagaagagcaaattcatactcttgaccttgtcaagtcaaaggtttatcaattggcttcattataattcctttcattttagctttcacttcttttatttcgttcatgcatcatcttattttaaaaagcaattttgcatggttcaaacaaagatagtataatcttcatcatttcaatttgaaaataattatgcaaagcagctgggaataaattaaatactacaggggaatttgttgtgttttaactgtttagttactaatatctaatttgaaaagcaaattacatgaaaacaattgtgcagcctcagaaagccaagtgtgagattagttcagccacttaagactgttttgctgatgttgaaaatttcacttataggtaactaattctgttatgcattaggattaactatcagtactctaatttaaagagcacatcatatcaaaataaggcagccttacaaagccaagatttgtaacaattgcaacaataaataatatatgtataaagataaatctctacaacttaatatagatagaacaatatcagctagttcacaacaaaataaatatctcattctcattcaaaatagtcaaattcttcatcagtgcaaagctacaaccatactctcagcagttacaatatgacttttttattaatagataatgtttctaaagaaggtgaaatccacatcaatgcatccttcaactccaactctccctcatcgtgctgatcaccagtaataattctaagatgcttccaattaagcaaggggtaacgacatatcttcttcaaatttgctggccaaatgagatacttcacatatataacgatacgtgaaaaacatataaatattagtacattttataatag

SEQ ID NO: 69728 - DNA, 1824 bp, Cannabis sativa
caggatgagtagcttgaccgaagaactgacaaccgaaaagtttagatacatccaagtgagttgattcaaaatctatcatctttcttatacatcactaatcatttgttgaacttttctaataaatagattttacttcttaaacagttgcaacaacagctaattgccgtttcaagcgaggaagaaaatggggatagaggcgaaggggtaggcatttaagagcgaaaatatccattagtaaaatcgaatgtacatccgaacaagatctgatccattcttttcgcttgtatggggactgtttccggctgtttatacgagtagaccaccctatgcaaatttaaacaaacaaaccgaaaaaaaaagatggagatgataattcgggtctcttcttctgctactttgtgtctttagtttcgcttgaagatcatcaccgctacctcgaacgggagattaagcgagaaatttacaggtatgaccctccacatgaagtgtggttaacattcaagctgaaggtgaaaaaaatttgttagtatctataatatagtggtagccatgcgaagggggaaaaaggtttagctataaatcataatattggtttataatattatcccatagtttcatataattattaattaattaattatgatgtttcaaacatagtatttcatctattattattattatttattatttttgtcaaaaagggatttatgagtttgtatatgatggcggtagaagaaacgtaatgggacttaattcatttccaaaatttgtgtaaattctacttgttcttcacaatattctggttctgtatttctgttttcaattacccccttattttattttgcaatatattttacatttacatattaaatgaattctttaacatctaactatattgaattttatgtcctgttttggtggctgaatatatagactttgtaacctcaaattatggtatacattttttcattgtgaaaagataataataatagtgaattattacgaattacgtagtagggaggaaaaaataatcacctaataattgaaggggatggctttgagttcaagtgtagcaaggattgtatattttgacaaccaaaaaaaactaattcaacttttttctagaaagaaaagaaaatagagtgatttagtacaaaacaatgaaacatcacatttgttgagagtagagatggaaattgggttggtaataaggggtaatgcactttctaatcccgtttttgtttttcatgtaaattagggaagattaatcataaaacaattatatgaaaaatttagaaattatatatctgagtcgaatatggggtgagtagtattactcacgattccactttgaatctactttaggtatataaacttgcatctcactcttgttacattcagggccggccctaggcataggcgagttaggcccgtgcctagggctcactctttctagagttttatttataattttaaaacttcattacttaattattatatttaatgaaaattaacacttaatatagttaaattaaatctagcatagtggtagcctaaagaatggtaagtattatatttttcttggaacttgagttcgataccaccaaacttcaatttatattattaatttgatttatttttaccttaaataactattatataaataaaaaatattttttaaagtatttggatatcattaaaataatttttttttaaagtaaattaagagttatgtaaataattttaattttaaaaaatagttactcaaaagtcattttgagagaaattacaaatcttagctttaaatcaaaaaaaaaaaaaaaa

SEQ ID NO: 69729 - DNA, 2397 bp, Cannabis sativa
tttttttttttttttcaaatagatctaattgagcctaaaacgtacttaccttggtgatgagttgatcatatatgtacgtaagcactttgatatgtattaaaatagcataattctatacacacatgttctctaatgcaagtatttatatatttatatatatatatttaaaatgctatacattacaatattcgtatgaccatttatatgtatatatgtattgcaggttggtatatatattatatgtttaattacaaggtttttaggggtatgattctctctctatctctctcttgattttattttatttttaatttttttgaagacaaaatctttttttttttcgatatcattagatgttagctttacatattctagtggaaactaccttttccttgattcccacttggatttatatttatgtatatataaatacaaaaatatgatgagagaagaaaagctatgtataagggataaagttttgtggttctatatctgtataacacaatagccaaataaaatataaatatataaaaagtctgtggctgtgtatatatcatggaatttaaagagtttgcccccaccaaatccacacttcagtaggtcccctaataaaaaataaataatgcatgtaaagtttcaaggaaaaattaaagagctgctacaaagaatggacatatatatacaagtatttatggatgtggatttgtcctccaagatccaaacaccaatacaaattcaataataaatagatgactaaatttatatgataattaatgagagtttacaatttttatacagtatttcatacgaagcacaaaattaaaagtgatgttattttgtttaattcctaatatatataaatatatgtataaactatttaatttgaaagaataggccttatagttttattacaacttttgtgtattccagttatttaatattgttcaaaatgaaaaagaagatggaaagaatcttggccaattactattgtatacatatttatattgctatactttgttttaatttttttggttgaagaaaataaaaaataatgactagaatcgtatactcatgaattagaatcataaatcataattaccttgaattgtgtgaaatatattaaattctagaagatatcataatctaactaaagttacataaaacatggattaatttttattagttcacttactttaacttgatgtgatcatttgattcactctcatgctaattaattgcttcttatcgtatatataagttctttttagaaaaattattagaaagtatgccttcttttaatattgttttttcactatataaatgttatgtgataacatttgtagcaatatagtttaggataatgtttgggtagaggcgaaaaaaaacataaatatctgtatgtgtaaataatatatatatatatatatatatatatatacacatggcacatcatgtcatctttttaaatattttttttatctaaattttccttacatacacactatataccatattttttttatttcattttaaaatgatgagacgcttaaaaactcaattttagatcatataaaacaagataatattttatttgtaaaaaaaaaaacaatccttcacattcattcaatcattgattcataattgtgaaatgaaaagctaagctttttttagttgcttattattaagtgatactaatatgtgctagaaatcattcttatggattgcgagtaccaaaaaaaaaatcaaattcattatgctaattctccttatagtagttcttgttcagatttcaagttatgattaagctatataagcttcaatagtataagaaaaaaaaaaaaaagcacaaacaaaccagtcaatacactaggattaaataaatatataaactatttgattgaaatcctcaatatggatttatatattagtgtgtattgcttttaaagtttgatccaaataaagtaattattttagtaattgtaggtcattaagtattaaattgtcatgggctaaatgtctagatacctcaagtgatattttttattaaggggctaaattagaaatactaaaaattaataacctattaggttatatattatattggtagtgattcccaaaaaccgagagtcattctattctcatcttctctattaagagagaaaattaaaaaaaaatcctaatcttgtttttttagaagattattacccaaagatcatctctattcgatggactaagatcattacaagatttctctatcaatgaattaaagtagtcatgggatctattgaattaaataattatcgtaattaatagaatcaattagatgtgactaatggaaggttctagattaatcaattttaaaagggaaatttgattttctatacttattaaatttaa

SEQ ID NO: 69730 - DNA, 1980 bp, Cannabis sativa
aggaagaactcggttttatatataccttgtggaattgatgtaggagaaaacagattgaccgtctttgaaagttatttgggatgcgggaaggaaatgagcgtcggcaatgagttcatttccactgagatgatcattgcagagtatgagtccaactcctccggctagagcaacctgttgacccttgtcaactcttggagtctcaccccttagacaagccacaatctttcccttcaccttggtagggtctagtgttcctggcttacaaagtattctgcataaagagagagaagtctcatattattaagggtctattttcgaaatgcgaaaaaagttacatataaaactattaggaaatgcaggtgttcttacgcgtcagaatcagtggcattggatgctgtagcttgtgccccattgattagtgggtagaatttgtcttctggtaaaggtacggaaaggcttgttccctggtattacaaaaacaaatgtataatcctaaacatgttttataattatgagtaggtaaggtttcagcaagagaaaagcaatgaaatgaaccttgaggcgtaaaccattttggagttcaacaaaagcttggaactctctatccaaagtactagctcccactgtaatcaaccaaggtgcaacgtttgaaacacttcctggatctggccctgaatttccagccgaggtaacaactacaatgccatgcttgacagcatggaatgttgcaacagctattccatcgtcaaagtagtcagccgggtctccaccaagtgaaattgaaatgacatcaaccctgtcatttatggcatgatccatagctgccatgatgtcagcatcgaagcactcgccttcatcgattgggggccagcaaaccttgtaggttgcaactcgagccataggggaaccacctttagctgtcccatttccggaaccataaacactggctccagcgacgaagttcccacctgctgtggacagagtgtgagttccatgaccatcatggtcaagtgcactcttgtaggaggagttgagattccctgcataggcctcatatcctttgttgaagtaccttgctcctataagcttcctgcactcaccaaatatgaaacatagtgttatgtttgtaatttgtggtatttagaacaaacgacaatgttaacatctgcataattcataaaagtaagattctttatccacctgataattgattttaatctaagcatgaatcaaacattgcaaggatgaacagaaaaaccaatgagaatcaaggactaatacaaacactgtttatatttgcatgatgagtagataaaaaagaggtaacctgttacctgttacaaaagaatccatctgtatttgtccgactcttctgacagattcccctccacttccctggaatgggtccatatcctttgtcgttaaagctctgtgatttgggccaaacacctacactcaaaagagaaaaagaaaagttagaaattgttttgttacaattcaatggtccaccaccatgataataattcaaaaaaagatgaaacaaaaatattttaaaaaaaaaaccagatgaatttttttctgtactagctaatcataaaaagaacttatctctacagtttgaaaatctctcctctttctagtttatacaactgaaaaaatataagaaagtagataccacactatgtgaaataatgattctgtctatgtagtgggttcttggtcaaaactcatatcctttgatccatgcagattacagaatcacaaagatatggtataattaaaaagatcatgattataatgtcgccatacattacaatgtagttataattaattataaacaaaaaaacaaagaaggtgcagagaatgtaaacctgtatcaagatttgctataattgtatttcttccaaatttggctttattccacaatgacatttgaggaacatcaccattctcattttcaagcctcataaaaccccatga

SEQ ID NO: 69731 - DNA, 2435 bp, Cannabis sativa
ctcttcacttaattattattattatttgtttttttaaatggtggtcacttatttattattattacaacatgtttcccttcccacttatttattatcattacgtgtaactcatcccatttataatggaaatggttattaagatttgacaattatactcaacagtcaacacacggtaacaaagctcttaatagtaataatcattttgttctttagatataaataggtaagaaatacatatggctcaataaatttatcggtagaacttatgtgcattattacgctttacaagtacgaaaaaaaatgctttcaaaaaaaaatacgaaaaaaatataataattatatatattttttcctttaatgtcctttctttctcattatttattatgttgttgcttctaaagtactattatttttacatatactacgtagttttttattatttttatgtatagtattatttatttcatttgaaatttgcattcttggataacttttttgagtgtatgtacaatatcatatcaaagcatattcacgcacattctcactttattccaacttcgaattcaattctattcctacttcatctcataagttcataacaataatgtattatatataaatccaacccaattatcttaacaagattaatttggcaaaaaaaagaaacatatatctgatccaattagtgaacagcactaattaatctcatccaagaacattaatatatattctgatttcaaaatcagaataaattctctttctttctttgttcttcaataattcagtaaatatttttataataaactagatttaactttttactccatttttggtgagaaaatattaaccatttacagaaaaactagttgtggtagactagcagtagtagtagtagcttttagttttgagccaaataaagaagaagatcagaaattatctttattctaaaaatttctagtgctcattcaaaattagtagtagtagactagtagtagtagtggattgcgattaatctcagccgttgattattttgatcgtggattgagatgaacacgacacctcagacttctcgtattccaaatccccatgttgaagctctacaccacaaccaccaccaccaccaccaccgtgctcccggcgacggaatttcaactgtttcgcgatgaatgcttctactgtacggttgaaatcatcgtcactcaatttatcgtgagaagctaaattttcgatcggatgtttttcgcgatcagaaacgactatctccatacacttctccgattccgatcgttggagatgatggcgatcctcctccaccacacattctctctcgaattgctccgatttccatcgcctgtaaacttttggaaagtccgaatatggatcgaagtgatctgtttcagcttctttaataacgaccgtcgtattcacctcagatatcacttgtttgtcttcgtagaccgttgtcccttccgtctcactcaaaacgatatcgttttttagctttttacagtccctgctgttcttaacgattttctcgtagagttcggactctgtatcgtcggcgatctggttttgatcagagagttttccggaattggcgatgatagtaacaacgatgatgttacagagcaagaaaacgaagagaggactagttaagaagcttgaaacctggcgaaagtaaccaccggagatctcgacggcgagtgggagccgattgaagatccacatgacaagaaacagaccgacgcagagttccgcgaaacggaaaagcttcgcgagacttataatgcgattgtaaaactccttcgatgtcgaactcgtcttctcctcagcgacgccatggaaatcgaacgaatccattacagaatcgagagagagagagagagcaggagagcagaacaatcggtgaggtttggattggaagttgaaaaacagagaatatttaattcatttgtgtgagaaagagggaaagtatttatggagagagaagaggaggtttgaaggtgtttggttgggaagaaaatgttaaaaggaaaactatataaaagcgaagagaaagtgagtgagtgagtgagaaaatagctttcaagaacttgaaactgaaccctctctcttgtctctgcagagaaatcacaaataatatttgcttttataacaattttttttttattttgtctttataaataaataaaaaattaaaagaaaaagaaattacttgacttgacttgatttgataaagagagcaagccagcagggattagagtactaaaatatatcatatttttacattaccttttttaaacggagaatttgaatttttgtcacctaaattttattatatactaaatcatattttttaattttttttttactgttaaaatttttttctaaactattgagattattaaatttatagatttttgtctaattttatt

SEQ ID NO: 69732 - DNA, 1864 bp, Cannabis sativa
ctagcagacaagtgtcctcattaattgtttccgcattagatatttccaaattgataatatttaatattccttgatttttaggagctggaaaatctccctccacaatcatagggagttgaccacgctgaccctcatttgtaggagctgaaaaatcttcatccacaattatagaaggttgaccacactgaccctgatttgtaggagctaaaaaatcttcctcccgtgataccattgctgcacgatactgacccgtccccatcatccccatctccactaacatcggaccggtccccaccaccatcgtccccgactccacctccatcgaccccaactccaccctcatcgtccccgaccccaccatgatcgtccccgactccaccatgatcgtcctcaactccaccctcttcagacctgactccaccgtcgtcctccccgactccaccctcctcggacctgactccaccaacctcgactcttactccaccatcctcgactccggctccatcatcctcagccccaaatccattcgaccttgagaagccatcgtcgagcctctgaacaaacgataaactgtgttcgctgcatcgtcgaacacctccaatccacctacagttgtcggcatcctcaatcgaacctctgaacgagcagtcgtggttgttgcaggctcatccatggcagtcatgaattgcttgagccatttcgctccaatcatatgatttttacataaaggccttactcatccatttgccatacgagttaactaacaaaccctcgccaacctcgaaacgccgtgggcaaagacgttcagaatgccccataatgccacaaataaaacagaaagtgggaagatgttcatacttaaagttaacccagaattcaatcctgtcagtattacaaagcttcatccgtctctttaatggctttgtaacattcaaagtgacacgaacacgaagataatccctccataagcccataaaattcctttcatccgcttcaacaaatttcccaatatagtttgctacatccttaacaaccatagccgttttaaaccctgacctaatatcatgtaattgcacccacatatccacttcatttaaagtaaccaatcttggatctttcccccgctgcaacctcgtaaaaattaacaaaaacctgttagaagtccaagggctgcggttcatcatactttggatatcaatctcatgatagaattggaagagataacgattcgtatccaactctttgacaaacatctccttccccggctgccacagcgacgccaccaagtgttgcatggcctcaaagtcaatttgcctttcagtcaagaaccttccaatgatacaccatctgttatcatagtcggcatcgactgtagcagttgcttcataagataagacagctgcctcttcttcttcaagcggaatttgcacgcctataccctcctccatactcgaaccagaacaacaaccaagactccgaaaacaagaaccaaataaaaacaagcaagaaacttaaaccgagagagaaacttaaaaaccatgtcaatagacaaaactaataacgttatatatataagtgtttaaatataggaaattaaaccaaagtggtatatagtgaatcctcaaacaatactcatgtatgcaacgtccttagagctttaatgaggaggcagtgcagtttgacaaattgatttgaccatattatttgcttaagtgcacgtgaatcgtagttttatcaatgtcacttgcattatcgtcaaaagctctaatgctaattgaatgtgctaaactaaagatcatcatcaacctagaacgcacaaacaccatcccaattgatttttgctaaactaaagatcatcatgaaa

SEQ ID NO: 69733 - DNA, 9040 bp, Cannabis sativa
  modified_base (7292)..(7296): a, c, t, g, unknown or other
  modified_base (7451)..(7457): a, c, t, g, unknown or other
actagtacactttactcaagaattgagtagtgttactaagtgtggggtgttggaggatactgtcgcagcccatgtggcattctatgtgaaaaatggcaccccaaaacacatgtattcaataattatcaccaatgtcatgaattccaagccgagagaatatcatttgtcactccatttcaaattgctacgtacgttcttagcaaaaaataactattttctcaatgtttgtgagattttggcctagaaacaaggggatttttgtagatatctattttcttgtaattttttattcattattaaggatgatatacatgatttgttagtgagacactcagcatgtgggggatcactaacacaccctacaacctatataaggagagtaaagggaccttctttttgacttactagacgactgccaagaacaccatatcccttgtttcatctttttccttgagcccaccatacttttaaggacggccctaagctaagatgaaggaggtagccgccttaggccccccaccacgcgggccccatttcgaaaaaaataaattaaaatatagttagtaataaaataataataatacttttaatgcttaatatgtgttgtagcctagtggtaatttgattagtttaacaattaagagattgagagttcaaatcttaatagcttcactttttcactgggccctaatttttaattttgcctaagattcaaattaacatagggccggccctgcatactttgtcgacactaagaccccaaacaccattgatatacatctctttttctactttattggtctattattcccaagaaccttataaccaccaactttgataagatttatgaatattgagtctctcatgagtcctgtgttcataggtctcgattaagatttcacctagaaatactttggtgtatttttatccacactcttgagaacataactctagtgtgtcagatctaatcaataaaaaaaagtagacatagtcccactataccatcgcaacatgggggtcaactactataaattcctggtatctacttttcttattgcagttttatttagtcgaattaattcatcgtagttctctttatttttacaattttcttagatcagttgacgaaaaatagtgtcaacatataacactttaagggggatgctattataataaaatattattttaaattagtttatgtggcgataaaaattatttgttatatagggataaaaaagttaaaattcatattgtctcaaaatttgaacaattatttattttaaatttttgtaaaagagaaaggtctcgtttcaaattttaccctaagcctctcaacacctcgagacaaccatgtagatatggtaagtatttgtttgaactttattttcagtcttataaattattcaaaattttctaaaattttagagataattttaaataattacaatacatacacgattatgaaaaaaaaaaaataaagaaatttcttgcatactaaattagatagagtagtgtatcaaaatattgttttgtaggggtatacaacttacccattacttttaactaatattaatatgcagtaattttttacactaatatattaaatttatattagaaggaatataatttataataatttgattggaatttaatgaatttggagagtgcggaccatgcaataattattggtgtaataataactacagagttgtttgtatcgtatttacattacacactcttggaaaagttaacttaggggacctggttattaaaagctatctaaaagcatgcatgtgttagtgaccaaaattaattagtgccagcaacaaacttgtactatcttatttacaccatgcattgcatgtgatatatattgtgatagattccaaattgattttctaaatattattaagaaaatagaatactccaaaacgaaaaacatttgaaaaacaaaaatcaaagtagtaccatatatgtcttcatatacacgatatataattgttcaggtttgaaattataaaaggaaaagaaagaaaaagaagaaaaaattatcaagggctaattagtgtcatggtcatgttatttcttaatttcagaagtttttgtttattattattatgtgagtgaaatgaaaccaaaccaattattgtccaattccaaatgaaacataaatgttggtgggattttacttggaaagttggaaactaccgattaggttggaaattggaatatatataatatatagtatataattatggtgtttgtctatacatatactattaaattttggtttcctatagactggtccttataattattatatataattttctatatatatagaaaattaagtcccccaataattgcagggggaagaataataaatgaaggactttttatattattcaaatgggctgtatctatatatatattctagaagaaagcaaagaaagtgtgtgtcaattaagagaaaactcagctttgattaatgatcttcatgcgcttgtgtatggttagtagggggaattaataatatgttgtacttttctagggtttggttatggtttaactagtcaacaatctatttgtaatatattgtatatatatatatatatatatatatacatatatatatatatatacacacgcagtgttcattaaacacgcagtgttcattaatagactttagttggtatctttgaacgtagtaaatgatctcaagaacgtgttgttattttcatttatattgaccttttctggcatatatgcatacgtcctcggccatcctctttttttccatcttttaggtggcaaataaatggggtttcttctgtggtttagtttaaattaataatgttattatatataatatatatgtatatatttttatatagtaatggggctggagagagcaatgcccccaacatttttaactttttttagattacatgtaaaagttaattaagggtttgtttggtacgtcctattacaccgtaatgtattgtatattattaaattgaattgtattttatgcaatatttttatataaaactgtatgtgatattgacttatatgggtacataaatatataatattttaatataaattaaaatttaacatagtattatatgaaaatatgatatataattcaatttaatataatactatagaatatgtacaatacgacctaagacaacatatacgaaacgagccctaaaagatacaaataaatattgttgtttatttaaaaaataatttctaattaatttataaaaaaaaaaaaaattaaatctcaaattagactaattataaataagaataatctcttttaaattataatttgttatatattataagtcaataattatatcttaataaaatatataaataatttataagtttatttatataaaattaattattttatttaaaattgtaatacatgtataaatattatatttatttaaaactaattttattatgatgtagtattaaagattatttatttctattgttgctaaattttgatactttttggtggttaagttttatttttagtatatctctatttagttataacatatgaattagaatataatgttcttggtctcaaatacaggttttactgtataattataatggattatataattttcctctatgtaacgtccacgcttcaagcctccatattaggccttcccccacggacgtatggctcttatacacaggtacgttactctagttgctttatagaataaggactgatcctacaaactaacacaagtatttttagcatgttttgtcctcactcgcacgcttcttgagaaaactttccaggaggtcatccatcttaagattactctaggtccagcacacttaactttagagttcttaaatgctaggccaccaaaacaagatgtactttgtggatataggtagtacctatcaacctatttaagccctacttaattgtgtagtctaatacctacacaatctcaaaatcatcacacttgaccttctccaggcaatgtgggtttgcagtttgcataacttacccagtattttcctttacgaatcacaagactactaactgtcacaatcacgcgctcttacgggattcgacgtcctcgtcgaccacacttctagttaggttaaggctctataccatatctgatatcatgggtttaaagaaatttgcatgtttagaaattgttttagtaaaatgaccatatatgaagttgtataactccaatttcagtggttctagtggtgttacaaagataattcaaatatatgtaaattttttagaatagttatatcataattcataatttttttaagtcaaaactaagccctaaagttataggatggaacttagaatttaaattttgaagttagatattgatttatttaattaataatttatcatattattattattcctaaaactaaacctaataagagttgatatatattttattcaaacaaccctaaaagttatattgttcgattttcactccaccaaactgctcgttctaaaccctaaagtcatcttcaacctcactattacactctttgcaaaatttatggcactctttattctcacaatcagtcaccataatccaatgtctcttaatctaagaatcttgaagtatttgagggagtagtgatgggataacaaaggatttaccagtgggatttgaggtaagaaaattaggtagttttttgtgcttatgtgtataaatattaattctttgtgtattagaatatgatttatgatttattataatgaatgtgtatatgatatactgagagtgtatgatgttggagacaatatgtattatgtgaatcgatatgacttgtatatcttgtatgttgtatttgtatgctaatttctcaagtaaagtgagggatcatggtggggtatgatacaaggtaaggtcgttgaatgtagacataccttatcttgcattttttgagttgtgtatgagattattatggtaggggtatgatacaacaatattgttattgaatgtagagatatcctatcctatgatacaatattgttgcatatccctaggttattgtatgggccggttaaagctaggttaggcccatattatgtatgtaatggctatgatatgccaatattatgataatgtcgacattattattttatagtatcagtatgattatgtaatgagtatgatattcaagttatgatctttgtacatgtgtatggtgtgaatagttatagacctatatgataaaagtttccatgtgtagcattatttggttatggttataaaataggtataagatatatgtggtattgtatagtattgtaggataaccatttccttattgggtttttagctcacctccttactttccccctacaagtattagatagggaaatgttagtacgtatagtgagtagggtgagttttggtatgtatattacgaggggctacgaatggacaagcaatgtagaatgtcggtagtgccttagttttatttttagcagttgattattaatgtattatttaaaatcatttacttattgtattttactttattaatgaaggattaatcttctttgctgcattttgatttctataacctaccgttgtattttaagtagttttgaaccttttcaagttatatacgtattaaaatggtatttttgaaaagcaaggaaaaatatgagagtgtcacagttggtatcagagtcttgacccaactagaagtgtactcaacgaggatgttggatcttgtaagaggctgattgtgatagtcagtagtcccttgatccgtaagaggaaatatcgtgtaagttgtgcaatctcacatcgcttgggaaaggtcaagtgtgatgattctgagactatgtaggtatgggactacaccatttaataggacttaaatggattaataggtactacctatatcaacaaggtgcatattattttctggtggcccatcccttaagaattccaaagttaagcatgcgtgacttggagtactcttaggatgggtgacctccaaggaatttttctcaagaagcatgcgagtgatgacaaagcatgcttgaaatactcgtgttggtttgtagggtcaatcgtcattccaggaagcaccagagtgacgtatctgagtttgagcaatatgtttgtggtggaaggcctaatagaggcttgaagcgggaacgttacaaatgtattagatctgatcatctgttagcctaatggatactaatagtatacacacaaaagatcaaaaaagacccctctcactatgttgtcgtaagtattatatgattggatgaaatttatgctaataatgtttgaagagcttgtacgttgaactagtaactttctagaattagagctcctatcgatgttgtacttaatgaattataggtactcattccctataaaaggctccattagttcattttttacattctattaagtctccataaggtcagagcatttctctctactttttctcgttaaaaatcttagctctttccttagtcaattctcttgtaattgtcgtgagaaataaaaactggaagtagacgtggctccattaccatcgcgacatgggtagtgaactactatgaatgttgtgtgtctctctatattatttatttaaactcgttattcatctcgacaatctaacgagttagtgttggccatttttcagcgtcaacattctttaataataaattattagaaaataaattagataccaaatgataaatactgaacatgatataaaaagataaatatcattaatttagattcatttttgttaaatttaaattcatatcttatatttttttaaaatggtataaaataatgtcatgagtttaatttttttacttagtatataagactgaaatacctcaattttcattagtttattcattttctcaatgtttaattcatatatttaatttttttaagataaaaattaaataattaatttttttaaaaaattgaagaacctaactatcatctcatgaacagctagaaaaaatgatttatgaaataaacctaggctcatgaacttaacggaactctttgcttgtatttgttggaaccgacagagtatcatctccgataaattatattgatatattaatttacttatttagtagtttaaaaaaaaaattattaatgttttgataaaataaagaaaattttaatataccaagtatatcaatgaacgcaattattaaaatttcttaggatatattttgggtttttttttatttttacacnnnnnaatagttttttttttttttttgtatttttttatggcattctatatagaaattctcattgcaactagcggagcaaacttaaattgcaactaaaaaatgtatagtaacccacatagaaactatcggagaaataactttagaaactcaaaccgtaaannnnnnnaaaaaattaaaaaaatagtataaacaataatttctctatatttttttagattttagaacctatttaattcaagatctctcttactaattgaaatcaaagaactagtaaattttctttgaaaaaaaaatagaagatttattacctccaaaaagaaaatggactaggcactactacaaacttgccttttcccaacagtttaaaactgtcttttatactattttatataaaaatgcggaactttaaatgacagtttataactgttggaaaaaatcactttaaatgactatttagaactgttagaaaaaatccactttaaatgacaatttataactgttggcaaaaatattataaaaattaaattactttttaatatatatttttaaatattcaatatacataataatatttatttttattaaaaaataatatattttaataattcacaatatatacaatattattataaacaaaaaaatacaattgaaaataaataataaacaatttgtttttgaaaatattacaacttaatgtttaaacaaatatgtaataatattaatctctaaacaaaaaatgtctccaacctcagcacagtgatgttcttcttcacaataatggtcttcttcacaataaaaaaactcagttggtcttcaacttctcatattagatttcatctcattttttttagatctcaatgatttttcgaaatagaccaacacaaaatagaccaaccgaagcaaagaatgcattcacatggatgaataaaaaatataaaatcttttaaaattaaaacctaatatgaaatagactaaaagagaaaagaatacacactgaaaatccataaatggagacgacgactcaaccggacccgtcgaaatccatggattttgttgccggacacgactcgtccgagaacacgagagagggagcagccccggcgatcaccccgatccaaccctcactgtgcaaagcatgtcgccatctcctccaccaccccctgcgcaaagcccgccgccatctcctccacaacttcctgtgcaaagcccgccgcaatctcctccaccacctcctgcgcaaagcccgtcaccatctcctccaccaccccctgcacaaagctcgtcgacgtcgtctcctccaccctcggcacaaagctcgtcgacatcgtctcctccattgatgcctgcgacagagagaaagacattgagttgtgcggctgtgagagatgagagatgatgttttgagttaggtttttcaaattagggttagaaccttttctatatataccataattaataatgattttattatttatttatttaaaataaactaaatctgatattttttttttggaaatttgatacaatatttaatttcattctaattaatgattttattatttatttatttaaaataaaataaaatttgataaaatatttaatttcactccaattaataattttactattattttcaaaaaaaataaataattttatcatttatttatttaaaataaagtaatatctgatacaatatttaatttcaccccaattaataatttaattatttaaaataaaataaaatataat

SEQ ID NO: 69734 - DNA, 1556 bp, Cannabis sativa
ccatcttagtattcaacaaaaacatagtttagttgagagattggttaaggtgactgaggaacataatcaaacattcttgatcaaactcaaaaattgcattgacaggttggttttatttaatattattacaagtgaccaaatagaaagtagttactcattttttaactcaattcaaaagtgttggaattgagctacctattgttgaagttcattttgaacatctcaatgttgagagatatttatgtgggagaaaaggctctaccttcattcaacttcaccacaaattttagaggtaaaaaaatgtaaaattgtattcaaatcataccatggtatttgtattgattttctataaaactattttgttctttgatttatttttaggcattcttgaattatctacacataatttcaaacaagaagaagaaaattactatactagatagccttagtggaattataaagccatgcatgtgaatgagtacttaatatccttttagttgtgtgtgtgtgaaagaaaaataaacaaataaatcaataaataagtttattatttttcataatgacattgctattgggtcctccaagttctaaaaaggatttttactaactttggctggaaaagttgacccacaattgaaagtgataaaattttcatttctttgccttatttatgtgtgtatgtttaattaagtgatttgttgcttttttagtcttgtggtaaggtgacttataattggcaaggcttggatgagtttatcttagaaagaacagcaacaaatgtaagtgagcatgattatcatgttaaaaaaatgaatgtgagggaaatcttagacttttcttctaggtgccaaagagttacaaggcattatggtacgtgtgaatatctccctacaccttaattaacctccattagagacttggcttggaattcatcttcatttggctatttattctcacagagttgctagcagagctgtctagacgagagaaagaagccaatatcaagcctggtcctaatattgatgtcttcatgaaggtgacccatgtgacaaaattccttacttgaactgtgaagcttcttttctttttttttttgtcaggacaaaatttagaagagacaaacaaccctagagtagatgcctgagatgttctctatgcttatttctgtctaatctatacaggcagtggcaacaaaaggccaagagacgagtgttgtaactgagtatgttctaaaggtcagcatctaaaacatcaatttcttagtaattggattcaaaatttatagttaagtgaactgagatacttgatacagttgtgtctggatagtatgttattacagctatggagtctttagttatttgaattaatgttagtctataaataggcaaatgtgaacttgtttcaaaaatcttttatcgaaattgttatcatctactaaatgatcaaatatttataaggtaacattaaaaaaagatcaagagcagtattgggcaagagaagaagaatcttataaatttatcactgtcaatgattttgtggaagcattccaatccttt

SEQ ID NO: 69735 - DNA, 7457 bp, Cannabis sativa
tgtaaggctataagtattatatagctattaatataattaaatattaaattttatttgatttaatttaataattaatataaaaaatcattaaccatatatagagtttaggcagatgcctaatagcagttgattatcaagatattggtttaaaaatacttgtccccgtttgcttttagagagatataattattaataagtaacttaggtcacttcccattgttgtgtcagattatgtttatctcattcatcaactcagctctttctagtgtgtttcagccttttaggaatgggtggcaaaacgggtttcgacatgacacacgaacacgatagggtcaaggaaattagacgcagctcaaaaacggatcaacacgacttgacataaaataaaaacgggtcaaacacgacacgacccgcttaacatgaatgtgacacttttttttttttacgcggtgatcaaaatcacacatgattaacaaagcggcaataatagcaaactatatatacagaaatgtatataagttttctaatggaacttaaatctatcatttttttctacaattccaatttcaataatagcaaaacgggtcacagtgggtcgacacgaacacgacacgattttttacgggtcgaattaggattgagataattatacacgagtcaaaaaacgggtcgacacgcttgacacgaaatataaaagtaagtcacataaaatatgacacgaacacgtcacaataacacgttttgcactactttcagtaacacaaactaaaataacatatatgatcttaaaaaagaaaaaaaaaaaaaaaaaaagaggtgtcagtgtcagtgggaatctatacatatataaaccaatcacttgatgacactaatatatatctgcattattttgtctttctatgaatcataaacccaatgacttgatcctaaagagaattataatttttcttttctttttgctagcttgaaataattcaatatgatgaatttgttctgaagatttaaacaatttatttagatcccttttaatgaatagtatttttttcatggaaataaacaagtttcagaaaagacaattgtctttttaaatccagagaagaaaaaaaaggcagcttacttgatgagaaagcaataattcatatacagtataaaagggccattagtcacctttttttcatctatgccaatgcttgagccattagagaacgatgagatagttgttgctcgtacagctcacggaagatgcggtatttcgcttcgtggtacttcttcaccttaggatctttagatggatgaattacctacaaaatgattgttgtctaaattagtggacacaaaacagaagtgtggtgtcgaaatcatttagttttctttttattaaatatcaaaggttctgtgatttgttatgatgcatacttgaccagctgcatttagagccttcatagcatcatgcacgctggaatatttttttgcagcaacagaaccgagaatggcagcacccaaaagcacagactcgctttctcgtggcaaaacaattgggcagcctgtaaagaacaattagtgtagagatgttggatggcggacacagcaacaatataggaatgagaaaataacacagaaatgagaaaataagtaaataaattagcaagaaggctgcaagagctgatttctgttaacatacttttaacttttgttccttaaatagtcattgcatcgtaaccttatccgattcacaaggaaaacttacaatgcaaatgaaattgggcctaaaatggaatgtaaataaatataaaaggacaccactaatgaagaaataattgatttattgagcattaaagtatagcaggaaagacaagaaattggaatgaacaaatggagggagggagacaaaataccaattatatctgcattttcttgaatgaataatgagttcttggcaagaccaccacaagcaagtattgtgtcaatctgaaagaataaacaataaggaaattgatcaaaatgatgcaacgcaaaccgtagcaaaggattataatacatgattatcttgtaactttaaataaagattgtatcgttttataaagatttttaataatagaagtagacatattttacacggtagagttaaaccaaaatgaaggtgttaaaatgtgtccagattgatatcattaccttgtgaccatgggcattgcagtgctccacaatgtgacgtgtaccatatgcaataccctgaacagtagcaaggtacataagagccaacttcttctcgcttgtgtcaagagttaaaccactgatcattccctttgctttggggtctgcaatgggagacctgaggcatcataaactaagcagcttagatttgaaaaagatacttacatgaagccccaagaaatgaggttaatactataaaatgattcacctgtttccgtggaaatcaggaagcacgtgtatatcttcagtcaaagaagcaataaatggtagctccagttcagtcattgttgattccaatctcttatttagaagttcatagatagatatacctgaaaaatgagaaacaaatcaacttacttgttaaagaaatgcaccgtatctaattaatgtaacatttcactaaaaactaacttgagcaaaagatcttactttgtgaagcagcgcgattagcaaggtgggaagaagcagcatggttttcgattatgtgatccaacaatgcaccagtagcactttggccaccttctgtaagccaatattcaggtaccatagctgaacatgtgcaagaaaagaacagaaaaagtgttaagagctatttactgatgaattatccctctggtcaatatgtcctgttaaaaatggaagaacatcctttaataaggtagcattcacaggaaccatgaacctttgaccaaaaactggctccaattattcttccctatataattgtaccaactttctgaatttcaagagtggtacctgaccagaatggtccccagacccctggaatgaatagcttgctccgagacacagccatatggcaagtagaggttccacatactaacaccatacggcggcatagagcttccacatcatcccctaaacaaaatggatttactttaataatgaccaaaaaaaaagatttgcatattataaaaatatacattaacacatatacatatatggacaagtctagtaacctttaacttcagaatctgacataggcacactttccataactcctactccaccagcatgcgcatcaatcaatgaagtcccaacaggtattcctgctactaaacctagttcctgaaattcaaattacttttcttaggaattataactatatttgccatatgcaatagtttatcatgtcaagacacccttttaaagcccaccaagaaagaacaaaatcctaatttttcaactaaataaagtttttgctttgttaatggacctcaagggagcgccagtggaaatcaattggaaatcttcagtacaaaatttcttgcctgcgctgcagctggagtaagaccggaacccaatggatggccaggaaaggctacactacgtcctgttggcaatggacattgtcaagaaaccatcaggagccaaaattagcaaactttagcaaaataaattttactaggtaccaagaaagttgatgatgttcaaaacaaagttaaaagagaaactaacaaaataaggcaaatatttccaaattcactcaagtttttcagttctaatttctaacaatcaaattatggactgagttttattcagaaaaaaaaaaagataattatggaatgggtaggtacttagtatttcataatatcttgagaaattataacataccaatcttagcatgatgtccatctacaagatcacctaatccaatctcttcccaaaagtcatcatcccatccacaagcttccatatctcttgagtccttctcattgtttttttgcatatgcgcatgaccaagatatgtccatttgcacactgtggtacagagactcctggtatcatctcctgttgccctataaaagttgatattatcagaaatttatgccatttttagtcaaatttacttgtacatattcctacttgaagaaaagtcgcaaataattaaagagaacaccaaatgaaatcacctgtatgacaaccaatcactcaagtccatccatctgaacaccattgaccaagattcttgcaaattctctttcacccatagaagctgcaatagaagagtaaattggtcttttaaaagaattaatcgaacaattgcaaactcttaagaaaataagcgagaaaggagcaaaataataacagtcaataaaaatatattgaaaagataataaattgtgaaagctagcatgttaattaatttcataaggtagactatgatctttttgtacaaacttccaaactatactaactagccaaagagaatttggaaacagataagataagccttcaaagaaaatgcagatatttaatatgccattataatgttctggcacaaaccatgtaactggattaggtatggtagtacctttggtggctgcatttcaggggaaaggcccccgccacaatactgcaatacaggtgaattacgcgagttaattctctgagcttgttctacagctctatgatccatccaaactacaatgtttctcctagagtccccactccaagataccgtaacaggagagccatcggaatccacagcaactgtaaggagataacattctttagctttgtatataaatcaacaatttccttcccccttaatctcgatagcctaaacaaccttacttgtcaaagtttcttcataaaaaagtatggtgaaaaatttacataccaagggaacaagtagccgcaaatccaataccctttacttcttcccccgcaacatctgcaatagagcatgctgctttaacagcagcacagactgcatgccagatatctgtagaagattgctgttttataaagtgtcagtaatatttcagttcagtaaatcactttcccatatagtttaaacaaatcagttcaccgacaacttgtagttagagtaatcagccccatgattcaatcccacagggctaaaggttcaatatctaatgtaattgataggaatttactgctgcccatcgaactagaacagaatgataccagaaaataaaccaaacagggaagagaaagtagctagaaactaatgggcagatctgatactagataacaggtgaataaaatgacaaagagaacaatagaacaatagaatagaacctgaggtattcgagagacctgaactctcccaatagccaaagctcaatcccatacaatttccatacctcacccattcatccccatttccttatacatattgcccaattcatacaactacctttcattacaattactcctttacccattttacatattatcctaaggcctaacagtgatccaacccaacaatttgctaatttttaagttatgtacgttctaagaaggaatcaaatcattcaacctacactacatgttgcaatcttcctcataaggatcaatatataaagaaaacaacaactagaaatgaagtttcgtttattcaatctatcattacctcaatacaatcaccttctttccatatctgaattggactgctagacgaaccaagcagcttcccattttcatcaaacaaacctgtacaaacacgtccattgtacaattcaaatcaaacaacacgaatcagaatcgccaaaaaaataataaaaagcacaaattcaaagtcgatacctgcgcgagcgctgccagtgccgacatcgacaccaagaaaaacattacggtcgtggacggcaatggcggtggtggaagccatctcgaggtagatagaggcggtggagagagaatggtgagactttgactttgattttgattttgattttgaagaattttgaggcaataacggcaccgtatcggaccacccctttctattactacctgacatttttattttcttttttcgattagatctccgattttaattttattttttattttttattttttattttatttgggtttatattttgatttgatttagttaatttataattattggttaatccggttttttcgaatttatatatccttgttgttgttgttgtctcattaaaattatcgaagaaagtctaaatttaataaaattaaatttatgtgataaattgctacaaaaaaaaatgtatgtgataaatataaaatatatttatttttgtggtatcgtgtagtccttctatgttggattttctggataagttggaaataaaaaattgttgtaatgaattggaatatttatttgggatttttacactacatatggaaatttttaactttttttagaagtaatttttttaaaaaaaatactgtgtaatttttatactgtatattatgttaagttttcactgttgttccacggttggttttaattgtttcactgttgttttaattttctgtttggttgttttacggttgttttatgattgttttataaaaaaaaaaagagtatttttgtaaaaaattctgtgtagtagtaaaattataaatttttgtctaaaattcaatacttttttgtaaaaacccctattgttttataaaattgtgtttattcattgcattaattatcgtttaatgttattgcatttgctaaaagtgatcttgaacaatggctttttgctcaaaaaaaaacttccactctctcgttttattcgattcaaagtggtgaaggggtgagcaatggtgtgctccagaggtaaacaattacaagatcaatgtggatgcagcaacgtttgcggataagaatatgtttgattacggttgggtgctccgtgatgcaggagggtcgttttctacatgcacgtaccgatttgtggagtggttactgtgaacctgcccttgccgaagcgcttggagtgaaagaagctctcagttagataaaggcatcaaaggtcacaaaagtcaccatggaaacaaatagtctcattactgtgcaagcttttcgaaactcggtgacttctacctctccctttggctattgcatcgacaaatgcaaaagagtattttcgaatttaatcaatgtttatttacgttttgttaaatgttctggctcatgatcttgcccgagcttcatggttatatgttgaacgtagttactcggttgattcccttccgagtaacattattgatgtaattgtgcaagaatcgttataaataaagttcagcttttattccaaaaaaaaaaaaaaaaactacataagacatgagaaaataatactttttaatagttaatatttaaaataaaaaataattttattaatacactcaattctcataaagacatgagaattagagagagtgattaaaactcctcaattacatccaattacgatattagagtgtaatcacatagttaa

SEQ ID NO: 69736 - DNA, 3149 bp, Cannabis sativa
ctctctctctcccagaccagttaacctctcatgggcatttctgcggagaatcaacccccagagaaggtaaagttgaataacagagaccttagatgtttatctgttttcgttagggctcttcgattccccaattcaagttctaggttttctttgattttgaatttttttggggtatttattaatatctgaaggtttctttatcttcgaatatatataaattgtatatatatttggtttgcagaaaaataatattatacttgatgatttgtgtttccttgtctgatgagttttgccatcgtctccattttacatgtttgattatcagaaattgaaattttcgagatttttcgtgcaatattcaacatcttagagtatctaatttgcttttgtttgtacagacatctacggaggtgtctgctggagagaaaaaaagatggactttgaacgatttcgacattgggaagcctcttgggcgaggaaagtttggccatgtttacttggccagggaaaagagggtttgttctgccccctttttcgttgtaaagtaatgtagtttttcttattttatatagcttgaccatgcgggtgtcttactctttgatattgatgcgttttgggtggtccaagattattaatttaactgcatatattttggttatgagaagataaagatttgacttggaatatgatgcatataattatgtgtgtgcaataagaaatagtctattagggccctgttatggactgtgaagattagcttgagttgaatctaatgtttttgtcttggatgggttaaagttcaaagatctacaatttttgcaccttttttttaattacaatgtatactattcttggtatcattgcttaccttactacagattaatgacagaaaatggagggtaggtatcatcattttttgttctgagttttgcttatgagacaaaccaggttgtgtatgagtgctaggtggccgattttattgcagttttgttcaccataagtcttgatgtgtcttaaacagagtaatcatattgtggcactgaaagtgcttttcaagagccagttgcagcagtctcaagttgagcatcagcttcgacgagaagttgaaatacagagtcatcttcgtcatcccaatatattacgtctctatggctacttttatgaccaggtatttggcaattagctagctggtaaatgttagaaaaatatttgaatttatttagccaaatagggtactttaccatagctattccaatgttattgcagaaacgagtttatttgatactggaatacgcagccaagggtgaactgtacaaggaattgcagaagtgtaaatactttagtgaaagacgtgcagctacggtaagccgttaatttctgggaatttggttctcctacctgattttttggttctcccaacaatggaaaagaaattcggaaactgagaccataatatgttctgagcttattatctacaaaaattgactagatgttcttacttgtgcgaacgaattgtgtgcagtatgttgcatcactggcccgagctctcatatattgtcatggaaagcatgtaattcacagagatatcaaaccggagaatcttttaattggtgcacaggtactgatcaccatgtataattcttgtttttcgtcaggagtttttctgcctacttttggctattaccttgtgttaatgtttggtatacttggtcagggtgagctaaagatagcagattttggatggtcagtgcatacattcaaccgcaggcgaaccatgtgtggcacactggattaccttcctcctgagatgggtaagttttaggcaaagacataaaattttgaagcatgttttgttcattttattgatcaatgttcaaacctttgaatttttatgttttacttagttcgggttcaaatttttatgttctcattgaatcagtttcagctcatttataattctgtgtgctaaaacagtggaaagtgtagagcatgatgctagtgtggatatctggagccttggtatcttgtgctatgagtttctctatggggtccctccttttgaggctaaagaacactccgatacatatagaaggtacacaataatgctgcaaactgagtaactataatactagctccaactttgttattgtaacatctttgatcatggaacgattgaagtttgtataaaagctttgttattgtatgtggcgtggctaatatagctgtttttctatacttgcaggattgttcaagtggatctcaagtttccccccaagccaattgtatcttcttctgcaaaggacctgattagtcaggtaagttttgtttgttctcgtgttattttggtatcatttaacatcaaaatttgtttattatcgtttcaacaaaattatttcttaaaaaacagatgcttgtcaaggattcatcggagcgcttgcctctccacaagctcttagaacatccttggattgttcaaaatgctgaaccatctggaatatacaagtactagtttgtattatagatgatatttttacgtcccgaatttaaggggtagcagttccatgtggcagttctgagtgagcaatccaatctgaagattacacatttgaatttgtctgtcatatatttcatcgtatgaactatggacatttttttccgattacaatattaactatgaattttagtgaaaaataacgggtagatacttgtaataataacagttctttgtattattgttgtactttgtttaattgtcctgttttgcgagcatataatgcaatttaaattgaagagttcagttttgtacatttcaagagtattgctgctggcacctgccaaaaaacagcaattttatttcacattattctattgaatgagataaaagctgcacttttattttcacataattttatttattcaatcctatttattgaatattggattttgtcaacccaattcaatcaaatggagtcaactgatccaatctaatactgatctaattcgatatattggatttgatcggttccaaccattagactgcattggatccatctaatctttttagctatatatataaattaaattttttttttgagaaaaagcgtttcatacattaaatgaaatagttagacctcgcggtcgttacacaa

SEQ ID NO: 69737 - DNA, 1937 bp, Cannabis sativa
ttttttgtactgtaaattaaaacgatgttacaacatgagttgtaaatagtgacaatagtgtggtaactaattgttacaaaatttggaactttcacatatttgtgaaaatgagttaataagtttcgattcaaattggtgtaagatgataaagtttatagtggttatttacataattttatttgttgtagaataaataagaaatttttggaatgtttttgacaattttaaagtggcaagggagagctgaggcagaagtatctgttacatgttgatttgctttgctttgttcaaacacttcaattaagtaactcccatattatttatttatgcccataattaaatgcctaagcaatgtttggtaacaaggaaggaattagagaatcatataatttaaatttcaaataagagtcatttagccaatattttacattctcatcctaattaagagcactagacttgataaatttaaaaaggtttgtccgttgtgtaatctccacagcattctgagatggattaaataagcatttcggacaatgtaatttgaaacttgttgaagtatagtgataattatttcctatatctttttaattattattattttgacagtttatttgtattatttgttttgagtagtgtatcacttcatctttttctttaccttgtttaattttgttacttgtaattttatgctattatttgtaatagtctcatcttctattcctttattttcctaacagggacttaaattgcacgttttcaaatttcaaaacatcttaagatttggaggaaaaaaaaataggaaaacctaacttacacctacaaagcgtgcacttgagtaatcaggcggcaaaacctttctttgccgacctaattattaattaagaaaactctaaaaaggttacagtaaacactactgttactataaacttcaagtgctcttttttctttttcctttttttttttatttatagtcggtaacatggaatattctcttcttagcttaaaattttcttcttcttctatattgtatatatagatatatagttttaaacaatcagtgtcaaattataacaccctaaatggagcactatctgatttcactacggaaagggattgaaaccaaactatattccaattatatttgtgttccaaagtctttatgcaaaagatactcattcaaagttctgtttatatctacaattatacatcaaattgcacaagccaatccctgatcaataaatagctgtttctaatgtccaccattgaattgtaacagcaatgtttgggttgttccccaaatttgagcaagtcaattactcaattatttttcacatatacatatgaattcatacccaacatgtcaaatcaaaataataaattgacatatatttttgacacatgggatgtatccatattcataccgaaatgatcattgtaaaagaaaaacactatttacgttttagatttgggttaggtaaaaagagtactttcggtctcagccaattattatctaattaaaaccaaagactcattcctcaatttaaactaacttgatttattatttcactaagttgtggaaatcactatcatatacatttattaaaaaatttcaacaaaatattttcaaattttacatttattatactttgataataaattttttatatttatacttatgctaactcttttcttttctttctattttttttttcaattctctctctttgtatatataaatatatatatatatataaatctttttttagctattttttctcttacaaaaatattaaggcacttatcctatatttttctattttttacatgattaataaaagtaatatatatatttttaaatattctgtaatttatttaaagttaatttataaataatttgcatattttaagaagattcatttcttatttttctgctgatt

SEQ ID NO: 69738 - DNA, 1864 bp, Cannabis sativa
aaattataacttaaattttcttatataattatgtaaaaatataattatagtagacatgttctatttattttcaaaaaaaaaaaaaaattagaataatttatagtattgaaaataaaattcaaacattcagatataagttttcaaaaataaataaatatttgaactctatttttaaggttataaattatttaaaaataaaaaaaatgatgaagatgcctactattatataagtagagtgtaaatttttacataaaaatattgaattataattttcaaaataccaaaaatgatgagagatgcctacttataaaactagagtatagagacaagactttaggaagggtcttgatctctttgatgttataaaatgattcctcttcattaacttcacaatgattgagtgccctttaagcaacttataattatacatatgattatttatttatttattatatatatatatgtataaaaatgtgttataaggctctaaattaatgcatatattatgtcattaagttaaagggtgacaataatgtgtgtgtataatatgcatggatgtgtattattggttattgtgataaatatataaatctagggaacaataaagaagaatagaataaccctagggctaatccataacataggatgatgtgaaattgtgccatgatcaagtaaaaaaatgtgacttgaaaatacttttgattccttatgttgtgttttacttttcatcaaaaagttaacaattcaatatatgcacaaaaaagggtcatttatgtaaaaaagaaatgtcattttttagtaataattaattaatcaaactcaaaatttaatttaaaaataaaataaattatgatttctattatcatatattgatattgaatattaatgtatatattagctaggcacatttaattgtttattaatttatatatcatattaaaataaaatgtaattcaaattatttgtgttcatgtggttactaaattaatataacaatatttaaatagtgaggatatgtacatgcaattaatcaaggttgataatcatactagtgacaagttcattgtcaccaaatatttgttagtgtatttttatatatttatacaaatcaattataattatttttatatgtaataagaattatggagtgtttcaacaattcgtactcatccacaaatcttgccagtcacatgtgttgtttgtctgaattgagtaagacttataattaaataaggttcctcaatcattaagatataaataagtaataaaaaatatggtagaaaaatctaaaattttctcaaaaaataatttatacctaaagtatattattatgtggcatacatataatatatataagttatattataagtactataccataaccccaccacatatattcctttcctaatggcaattaatattaatgagatatttattttagaagaataatgttataggattgggatgatgataataatttgctacttagtattttaattatgtgtagacttatctcatgtgaatatttcaactttagtcaacaatccaattcgaatttaattttggtggcatacatatgaaatatagaaaaacaaaaataataaatttaggcaaaaaaaaaaaaaaaacatttaatataaaatttttagttacttgcaatattattctttaataaactactgtgatgagaagacaatattttatttaaaaattgtaataaattaataaatatttttttttcctattaagctcttaccaatattgtagaattttcggtaatttattccaagaaaaatttacataaaacacttaaaatttaattatttctacttaaaaaaaattttcttacatttttttacagatt

SEQ ID NO: 69739 - DNA, 2346 bp, Cannabis sativa
  modified_base (2295)..(2319): a, c, t, g, unknown or other
ttcccagctttcgagaggcttggtctctccaagaagacctagacaactcaattctctatatagatctcccaataacaaggactagctatttatacaataatctataggccaaaactaacaacaaacacctaattcctcctcctcccaagataactacagcatctatattacccctttgcctatgttggcattaaattcctatcacggtataccctgcttattttttttttatgtataaaaaaaacagaagtataacaagcacctgttgcaatgctaatacttagagtttttggtaacaaacctaattgtcttggaaacaccccggcagcatttctcaaattgcagtataaggtcgggaataggaatatgtcctgaaaacaaaatatagaggtaactatgatatcaatatttataaattaaactatgctaatgtcataacaataaaatgaacttctggcaccactataaataaaaatctaaattatttccagatcttgacactacttgatgatctatctaaacttctggcacttatgcttcaaacacaccttgaatagcaggatcaagtagctgagcgaaatatgaaaatgtggtatcttcactatcagacagcaactcatcctctcgtttgcaagcttttagtgaagagcgctctgaatcaaaacagatatctgcttctgggattccatgaccatccatgctctcaacctcttgtttgatattatctagaataagtgcagcatttgtggggctatggatattttggccatcataaaacaatctcgtttcactgaattttgaaggtgaattcccctggaggggtgatgagcctgacgctgagggtctcttcctgcacataaacacatataactcctaaaaattgatcgataacaaggagtctttccatagttagagttgcccattcttataactccataatctaaccaaatgtaggagtaacatacaaaggaaaaaaaaaaaaaaaactcaccaaaaaataattaaaataaataattatgtttgagaattgaattcaaaaatttaagttgataatttttcaaactaaaaaatgcaatcaaaactaggcaagtccaaaccaagaaaccataatgttaaaagtaacagaagcaaataaaatgactatgaagtgaaagttgtttgaaggcgcacccgtatcggcgaaatcgctctctgattgtctggtcttcaggatcgaagtatcttggagaagcatccatgtcgacgtccatattcgctgaccactcgaaataggagagtgaaaggcccaaaatcagagtgactgaatgaagcttaaaccctagaacgaaaagcttcgagcgcgggaagcctaacttagccggaaagacagggaagtgaaacacaacgtctacagtctacacagacagaacgcaccgtttaggctgtactctctgttttaccaaatgtgtattatttttttttattattttttttaaggtaattgtaaaatctctaataatttcacttttctcgcaattaacttttaaaatttaatattttaccatataaaatattcttattacaatattttacaattattgtgaatcatcataacaaaattgatttggagaccactctagtgttactgtgtaccatcaatacttgaggtagaagatgaattttcaatcttaacgaaaataaagaaagattttaaagaattggatattggtgtttttatattaaaaaaaaaatcatatttttaagtatctcataatgtgagtgctctaagatggtcgacatgtacagtaacattgtggtacttcacacctctagttaataagctacagcttgtaatattaacgactttctgaaaaattaggtaaagctaggataattggcaagcaattcaggagtaaaaattggagagcaaaatcaatcgcgaaggctttttcaccggagttttcaatatttttttttttattttcttcttttattctgaattaatatgtgtgaatttgttactataaacacgagtagctaaataatttattaggggttatatggatattgtttgacattgatttatggttttaatatgatttaattttctcctaatttctatgtattatatttcattcgtacttaatcaccaattaaatatttatgattttgatgcaaaatctaagaagtgagtatcaattatgctatagtgaaatagaaacaaatttcaatataagacaagagtacatatatggtttggatagcttatagggtttttgtgtttaatccctttaagagctcgtttggaacgccgtnnnnnnnnnnnnnnnnnnnnnnnnnattatattgaattgtattttatgcaat

SEQ ID NO: 69740 - DNA, 1465 bp, Cannabis sativa
aagagacaaaataagaggctcaaactcaatcaataactcaataaagtccaaccacaagcttctcttctcacactcactcactccaaatctattatccaaaagctatagcttttttgtgtggctctaactatttttttccattttgtcttctaatatcaataatgttaacaaatttcctatctctacaccaccaaccttttaatccccaaaacaaaatattgttccacttctacttttcttccatctttctcactttaagctcataacaccatgaatgacacagtagataaattggtcatatttctagccaagagagatggaatcgacaaacttgtcaagacctttcaatatgtctccaaactggtccactggcatgccgagttcactcacccgaacatggctcaaaggttcaagcaatgggaagtagcatcagggctaagtcgaaaagcctttcgaacaggtcggttcttaactggtttcaataccctaaggcgcaacccaggtgccaccccgtctttcaaattcctcggtgttttggctaacgcgggagaaatggtctacttcttcttcgaccactttctttggctctccagaatcgggaccttggacccgaaacttgctaccaagatgagctacatatcggctttcggtgagtctttcgggtacattttttttgtggtaatggacttgataatgctaaaaaagggagtagagaaagagagaaagcttttgaaggaaaaagggagtgatgatgatgaagtgagtgagagtataaagaagattaaagttgatagagtaatgaggttgatgagtgtggctgctaatgttgctgatttgttcattgctttggctgaaattgagcctaatccattttgtaatcatgtcctcacacttgggcttagtgggctggtctctgcttgggctggttggtatagaaattggcccacataatcataaaagaataaataaactatgtgaatatagccatattttattatatttaaagatttacaatattaattaagttaatgtttcaacttattatatttcttttgcttgtttggtggtactattatttctttcattcattttgtattgaatgaaattacgtgctattttgaattaaataactcttattctctctctcattcattttgtattggatcaaatttattattttgaaaaagaaaaagaaaacaaaatatctcacatgataatttggttaattagaatttttgctcctcaaattttgacaagtactaaattatgccccttgaaatttttaggctgttaaaagtttcctcgaactattgaaattgttaaatttatagatttttgtttaattttactaacgtgagtgagtgtgatgtggatgaagttcaagaggcacgaattggtacatgccaaattaacttaataattaataatgcttatcaacaagagtaaatcaaatgatattttagtg

SEQ ID NO: 69741 - DNA, 5470 bp, Cannabis sativa
acactagtcgtttagtcgtcactaactgtctagctatcacctaactactccagctgacatgactcatttagtcaacctagtcgtagtcaatcctccaattctggccagccaactaatcactcagcagtcatccgtcttccatcattatttacttgtttatttacattacttcaattattttatcgattatcttactggcttgagcatgagaatccctttagctcacactccagcagtgctcccaattgaacctttggctccttctttgttcttgataggttagtacccgaattctgtaattataaatttcaccctctacaatgctattcttcactaaaattctattgttgtacacttaataaacacaccaagtttaatagaaatttcgattttgtaacaaaataattacaagctgttaaacatcagtgatacctaataattatattccatagtaactattaaataataatattaaaacttaatatttaattttactaataataatatgactcttcccttttaacattttgcgagaacaaatgcaccaaaccatattttaaagaaagaaaatagaataataaatgaggcaataattagaaaagaaaataattctattttcttaataacaatatccagaagtcagcaaacagagacatggtatctccccaaacagcttatcttataagagttattcaagagtagtggggacaaaataattaagataaaagcaccaaatggcacatacatctcataaaaccaatgtaaagcaactttttcaaccgacctcccatttgcgttgcttgacctgtaaataatttcaaggagctacatacctgtatttctgcccacacaacatcttatcttataagccaacaatggttattggttgctgttggactggtcttcaaccaacgtcaccttaagtacatcactaagtatgcaagaatattattattatcaaaaagagaagttgtgagaaaaatataaatcaaatcctttaatattataacttgaaaagttgaatataaaaattaacaaacaataccgaactaagagaatgatacatacaaaagaaaaaattgctaggtttaatgatacattcattgggaaagcaaacaatatggcactggaaaagaagttagcaatgagctgctgtgaaagaaatcccaatcagaatcgtaaagggaaaaaagaccaaaggattgtacttgtacatacatctatgtaacaaatcagctcacgtctttgagtatttttatcaatgcatctagtgatttctttttgggattttgcctggttcctcggcttccaaaggttccaaatagtctatcggattgatctttcaatttctcagaaattgtcagtactttcctgtagtccaaagcattgtaacttctttcccgaatcacgggattcaggaagttttctggatggttgctcagcagcaaattcatcaactgcctggcctcacaaagtgcagattttaactggctcgcttcctcgtccgagaacaaagatgcttgattatcagcgaaagattccaacatccgaacatccacatcaagtccaataattgcatttagattaaacctcttaactaaatcgccatataaggctccaataatcttttctgatatgtgggtaaggacatcttgtaacactctcttaaggactggaactggcaaaatttgttgggcggtggagaccaatgtttccaaatagatgatcacctcattcacgtactcatttccattctgtggaggttcatcggccatccaatttacgttttcgatcaatgtcataaacccatcaacctttgttttaagcataccagatagcatatcttcagctgcatcacgggctttgcccaagggaaactgcctctttctctctgccactcttagaggtatgccggaaagctgtgcagcatgacgaaagaaaaaatcgcaagcacgttccatgacagccatattggctgccacctgcattgcttgggcaacaccgtgaattgaagaactaataagcttcaacaatgccccatccaacacctcacccaatagccgatccaaatacttcttcaccacatcataaaaatctaattgtcccccgtaagacatgaaactcacagaatcctcaataaaagatcgtacaatgcgacaacaatctggtactgtggaagaaaatggtgcaacgtaaggaaaagccggtgtaatgtccgacgtttgtatttgaaatgaaagaacattcatagaatactcgtactccttcttcatcaacatctgctcaaacttatcagcagcaagagcttcagcaatctgttttcgacaatcggacaacaacaactcgtggtacttatctctatgcttactcaaaacatcaagtaaggaatccactgggtatccatacctacgcaatgttactcctaacaagctcacataatccttaattaacaacaaatggttagcagtttgcattctagaaaactgatcctctaaaacagaacacattttgctaacagcggtttcccaaaggttctcaacttccattttcgatatcaacccacctccagttctcaaaacccgatcttcaacgatgaagaatccagcaatttgagcaaaaaaagtttggtgggactcaaggaacggagtcatagaagatacctgaaaatccgaagtgagttgaagcttccgattttcaaaatagtattgcttgaacccgtcctcaagccccaatgtctggtgtatgtgataagctctgtacaacggagtcagatcaaaccctagaattccactcccgccgttattgtcatcgccaactcctccaccgcttagtccatcgtcgtcttcctcctccaaggcgtaaacacagtctcgcagacttagacgactctgctcctccgcctgtcgctgcttgattctcagctcttcttctcgttgccgcgccgaagaggcttgaccgatcgccaattgacccagattcctactcacgccgcggatatctaccagccaatcgccaagatccttgctaactttcctctcgatatgcgatcgaatctccggaattttcttctccagcatcctcttcagcgtcgaagacggcgtcttcttcaagaaatcagcctccaacgagtcgacgcacttgagtgccatgtagaagttattattcgacagatggtgattcgatctagaacaaagctccatgagccgaacgcaagtcccaactgaatcgagagcaagattcacgttctgcgagatattccgagcttcaacgaaggcatcaagtgatgaaaggagaggaactccgacagtctggagcttggagttagaatccgaaagtgatgatttgagagaatcgacatcggagagaagagatcgtagatcatcaacggcaaggatgaagtcctggtagtgagccttgcaaacttcttcaatttcggactctttggagcgagcgaagtgacggagatggtgaagtagggtctcgggcttcccggaagcgaaggtcttgcggatgaaggggcctaaatcctcgccgttacatatggcggaggagagtaagagttggtcaagtttgtcagcggagtcaccgttttccgcagccgccggagcgattttgcggcgagttttggatgagttcatggggggtgtgggtgacaggtaggtgacggaggcgtaggagacggagaaggaatttaggggaagttattgaaaaacatttgagaaaggtttgaaagaaaaaagtaactactaaagctaccgttattatttgtctttggatattattttcatcctattctaattctaattctacggggattcgtctcgcgaggaaccaacctcgcctcgctgataagacttgtatttatttatttatttatttcatattaaaatctttgtatatttagttattaataattagtaatttatttagttatactttttttaaataaaaataacagtgaaaattaaattaggatgttttgttttgttatcttatttttcacataaataatttattacggaagttattttagctgttcatggcttggctaatcaaacattggtgttagataatgattgtatgtggttcgaggaaattccctctgccatcttttctgttgtactaaataactaaacaaagcattgctgtacaactctgcattaatcgggctctcgccaacgtttttaacagattccatgaaatgactccgaaagactgtcaacactctcggatggagttgccccaagcggaaccccctctgtctctatccattccgactgagagtgttattattgttgatggttcgtacgctaacgggttgtatgggtgtgccttggtggctcaaaccagaggaagttcagattgggtttggtgctctactgttggtacctgttctaatgccctggcggctgagttagaggctatatggtctgttgagctatgggcagtcgatcaacaagtgaacaaattatccattgtctcagattccaagatcctggtccaagcgctgaatcagaagaagtgtcccgattggcacttgtttgctactttttcctctgttttatgtttgttatcttcttttgtgtttgtaatttcctgtttgttaagagatgtttcatctccaatgtggacaagcttgctaatgagtctcgtcactctcgcagcagctttttgaactgtaaaggggagggatttccccctgtaaatcccgacatcctttggagttaatctatcccgaaccgaggttctttcaaaaaaaaaaaaaaaattataataacaatctttttctcaaaaaaaaaaaaattattttagctacaattatctctacaactcaaccaaaaagtgatggtacttaattttttttttggttcgtgacctgttagaagataaatgttggtgaagaaaataaaagtgtggaaaataaaataaacaatttttcatgttggatataaaagtttgtcgcataaactttccgaaaatattttttttcatactttttttttggcctacatttttgcttacattttgcttacttccttttttctccatcaatccaacttatatgttaattttattgttaggaatatagaagagtggaagttaatttcttttaaaaaaaattaggttgatatcgttttggattctatatttttataaaagttataaattcaattttcagttttattaaatgataaattgaatactatattttttaaaataatataaaataatattttactttaatttttgactttttttatataactaacttgaaataatttttagaatgaacatatgtacaaaataaatgtaattaatgttgttataacacttgtagatgatgtattatttagttttattttgataaaagattaatttaggtactatttttattttatattattttaaaaatatatagtctaatttattatttaacaaaatataaaattagaatctaattaataacttt

SEQ ID NO: 69742 - DNA, 2783 bp, Cannabis sativa
aaactataacattgttatttatttatttttttgatttagattggagggaaagaatttgttggagatgttacgtggaagaagattagtattcgtaggtgattccctcaatagaaatatgtgggaatcgcttatttgcattcttaagagctctgcaaagaacccaaaaaatgtctttgaagctcatggacgacaccgttttcgtggtgaagcagagtattcctttgtattcaaagtaagttaattcgatttctggaatttttcaagaaaaagaaatgatcaaatatctcaatgccatttatagtaattgatggattttggcttctgtaggattatgattctactgtggagttctttgtggccccttttttggttcaagaatgggagatgaaagacaagaatggtaccaagagagaaacgcttcgtttggatttggtaggaaaatctttcgagcattttaaaactgctgatattattgtcttcaacactggacattggtggactcatgataagacctccaaagggtatgtttctagattttcaatatctttataaattgcataaagatattaccaagaagaagggactcattcaaaattctttatttaccttttgcagggaagattattaccaagaaggtagtcatgtttataaggaattgaatgttcttgaggcttttcgaaaagctattaccacttggggtagatggattgatagtaatgttaatccaaagaagtctttagtgttctttagaggatactctcactctcatttcaggtaaaaatataaatcttatttggcatagatactaaatattttgacttcatttttgtatcctatctgaattggtttctttcttcatcaagttactcaaaatggtaaatgataaaaaggatataaccaactttaatttattgtattagacaagtaatataaaaagagcaacatgagaaactagaaacagagaatcatatatacaatctttacttaaaaagtacaaaatctagccaatttcatgcttttgaatatttgatctttttacagcggcggtcaatggaattctggtggagcttgtgacagcgagactgtgcccataagtgacgagaagtatctgaggccatatccagacaagatgactgttcttgaaaatgtttttaaaggaatgaaaactcaagtcacatatcttaatgtcacaagattgacggatttcagaaaggatggtcacccatcaatttaccggaagcagaagctgacagcgcaggaacgaaaaacgcccctgctgtaccaggactgcagccattggtgcctcccgggcgtcccagatgcctggaatgagcttctctatgctgagctcctagtgaaacttagccagttgcagcagcagcataagagaacataggtaaaaaataaataaagaagaaatactaaagcaattaaaagaagctgcaaatatatttatttaattcttggagtataagtttatacacacaaggtatagatattatcttattcatttgttgcattatagagaacaaacaactaagtgaaggtaaagagaaaatgaggagactatttgtttatattgatcggagagctgaggatttgagggtacataggaagagatttcatatagtgattttcaaatttcaagttggaaggttacttctactctttttataaacattctttttgccttaaaggcttcgagaattgtacattcttcaattattttagttttgcttagtttataataaggggatcagtgagttgtaattagtgagttgcaatgcaatcagtttacttttcattgttttgggttattgatattagaataaattctattcaggatttaactgttttccctatctaattatacctaaaataaaatgaaagatctttatttaattttatattattttttgattgagagaattgtgctttcttggaatcataaattcattttaatattaagctatttctatggtcgatttcttaatgtagaagctccggccagatcctattttaaattgctaaaaaggaaaaagagaaattgatgcttttaatgaaacataaaatatatttctcttgttatttattcttagaaaaattacttgtcaattatttagtcttctgaataagaataatttgtcacatgggatgtttgactattaatagaacagatattcattcagttagatataggtcaaaattataaagcctattatgttgaatacaattgaatatttgattaattctatattggaattccactataaatatagtaccaattgcataggtgacataatgtatggttttcgatgtctccaaatacatgagcgttttttagccgtcggtgcttgattgattcctgtctaaatttaaatagtattatatgtttgatgaggctgatgaggagggggtatggctaggcttgacagctaatattggaagcaaatgaatgagtaatgattatctttttgttttatgttcttctctttagaacattttcattggaagcctatgcatatgttttatctctattttgccccagtaataattatattataacttaaggtaagtgatatttggttggtgtgtggacaatattcaataattttaattggaaagagtgattattgaatgttaatcttaaaatttaattaaaaattgatctaaattaattacatctaatatatattataattttttttttcttgtaatagttagttgttttattgatttatttttagaggaatttgctgtgaaattttttatattttaatttt

SEQ ID NO: 69743 - DNA, 1710 bp, Cannabis sativa
tttaagtggtgcaccacatatgtccagtagcaatatattacaaatgcaaattgcaatcaatataatctcacactcattaggggcatcagtgccttggcatggccttaaccaatcaccaaaattataagctgaatcttactgtttacactcgtcttcacaggtcacacaaataattaaggcccccttctcattttttaagtcttgcacatttaaaattaaaaagaaatattggtgatttatagaaagatgctattagagcaatttgccaaataaaaataaacatagaaatataatgtatttatcattcaatttttataatagcaaccattgttattgtttatcttttagctttacaaaaacaatatcacaaaaatcatatttttcaaagcacatttcctatatcaatcttttatagctgctcagtcaattctaagttgaactcaaagtaatttgtgataagaaaatggtaataagaaattagaaaataacaagtgcggttgttaaagaagagtcaaaacattgtttttccactctagtgtattcttgtcttcttccttgaaatgaatacactttttgattatgtgatagtggtaccatgtttgtttttaatatttaaacttggaaaagaaggaagaatgatttcgttctatgtagaaattaaaaaaaaaaaacacacacatagcttttacttcggataatattttccaatttttattttggttctacaatatgaaaagtagggctaagacattgatagtctcaaaagcttaaataacatagataaatagttttgaaatattcaaaacttggagcttaagatagtgtaagttccacatgtcaagtagaagagagacagtaggtaaatcattttctttttctttctattatgctatattttgatggcccatctatttgcttaactttattaagtacatcactacagcttggaaatggtctcctcacccttgggtgtttgacatcggaaaatgcatgccaccttatcaaaatctacttcctttacttgaattttgagctattttgtacaactatcttactttaaagaaaaatgctacaaaacactattatgtccagcacatcttaatttactcatattatttgtttatttatttattcttgaggagtttgaaagcctacccgataaagaaaaatgtgttagtatttcttttactatagttgtaggcatcggcggacctatatagagttcagttttagtccaccctcaaattttagaacatagtatatcataaaattagagatagaaataatacataattattagataatataatttgtgtaggtatttattcgttacttggtagacctgattttgaatttgattcccctcagttctatcttctattatattaacgtagagtattcaaacaacaaataactttctcactaaaaaaaaacttataaattatgtttaattatatttaatttataattaacacaaattcccacaaaaaaaaaaactagaacaagaattataaaatctcatattattatttagatgttaaaatttgttccaatttatataataattttatatgagatctaaataaaaaatataatatatattttaaaaaattattattttaaatttcagtgtaaaattttgttagctcaccctaaaattatatcataggtccgccactagttgtaggtggatggaaaagaaaactaaat

SEQ ID NO: 69744 - DNA, 3396 bp, Cannabis sativa
tggaggcttgaagcggggacgttacagaacatttctcgtgctcaaaagaaggtgagggacctgaacaatgagagtgatcaaaccccaaatgctatccaagaactgaagcatcaggaaaatgtgttagatgatttgttggcttaggaagaaacctattggcagcagcgatcccgtgtggattggttgcaaaatggagatcaaaacacaaaatttttccatgcttatgcttcatcaagaaggcagcacaacaccatcaagtctttaatggatgaccgaggcaatactgtccattccaagaatggcataactgatattatagcatcctattttggagacttattcaaggctactgatgttgatcctgatgctttaaaccacacagttgcagcaattccaactacagttactgctgccatgaatgaatcattaatttaacctttcacaagtgaagaaatatacaatgctctcaagactatcaaccctgacaaaagcccaggtagtgatggtatgtcagctatgttctatcacaagtactggtctattgtaggagatgtggttaccaaagttgttttgggtgttttgaatgatggacatggtttggaaacaattaatcattcactcatcactctaatccctaagacaaagactcctagtagtatgggagatttcaaacccattagcctgtgtaatgtcatatacaaaatcatctccaagactcttgctatccgattcaaggaaatcctcccagctgtaatctctgaaactcaaagtgattttctctcaaacagacttatcactgacaatatcattgtggcttttgagttaatccatcacttgaaacataagataagggggggtaggagctattcagcgctcaaattagatatgagcaaagcttttgacagggtagaatggccctacattcaagaggttatgcgtaaaatgggtttccacaacaaatggatttctttgatcatgggttgtctcaattccacaagtttctcttttatgcttaatggtgaagaagtgggatttgtacaacctactaggggccttcggcaaggtgatcctttatcaccttatttatttctgatttgttcagaggggctatccaggctactatagagtgaagaatcgctacagaaccttaaaggcttacgtttaacgcgtcatgcaccttcagtttcacatcttctctttgcagatgatagtctcctactttgtgaggcagcaaataatttggcaagagcgataaagaaggtacttgacatctacaacaaggcttctggtcaattactgaacacaacaaagtctgttatgtctttctcgcccaatacctcacaagcaactaaagactactttcaacaaactttaggcatgcctatcagtgaatgtcatgaacggtacctgggtcttcctgctttttctgagtgtgataaaaaggaaatgtttagtgatgtgaaagaacgaatatggcaaaagcttcatgcttggaatgagaaacttttttcagttgggggaaaggaagttcttttgaaagcggtggtccaatcaattcccacatatgctatgagctgttttcgtttgccaacgactttttgtaaccaacttgaatcaatgatggcaaatttttggtggggttttaacaaggatggttcaaagattcattggagaagttggaaattgttatgtaagtcaaagtttgaaagtggaatgggtttccgttcttttgtgcactttaacaaggctctccttgcaaagcaagcatggcgaatctttgaaatgcctaattctttgctcagtcgattgcttaaacacagatacttttccaacaataactttttagaagctagacttggccattccccatctcttacttggcaaggtatacattggggacgtgaattattggtagaaggtttgcgccacaagattggtaatggattcaatgtcttggttggttttgacaaatggattcctggtcacaatgacttcaagcctatcaactatactggtcttgcaactctcaccattgcaaacttaatcactgacaaaagataatggaacatacagctcttaaatgaatacttcctgcctattgatgttgatagagttgtcacgattcctcttagttttttcccttccaatgatcgtctcatttggcatcacacaacgacgggctgttacacagtcaattctggttttcacttggctgaagtaagggaaactagtggctctaacaatcatacgaattggtggaaaatgttttggagtttgagcttgccatcaaaggtaaaaaaatttgcttggagggttatgcaagatgcacttcctgtagctactggtttatgcagaaggaaagttatagattctgctacaagttctctgtgtcataatgcatgggaatcggtgggtcatgccttgtttaattgcatcaaagctagaaaggtttggagagaaactaagttcatccttgaccattcacatgctaacaatgtgtataagggtgattatttaattcatttgtccacacttcattccaagcaagattttgagttaattgtatgtactatgtgggctatatggcatgaaagaaataaagtcattcatggaggtgtttcgaaaccaagccgtgatattactgtttttgccaatcaacaccttgacaaattccatcgttcaagtaggaaaaaccagcagcagtatacggtctgcaatacttcaacgagccctgtcgatgttcaagctacaatccagcaacatagcaccacagtttcatggactccaccaacactttcaggccttaaacttaatgtcgacgctgcattaaaccaggaacaaaaaattttgggggttggagctattattaggaacgagaatggcaatgttatagctgctttatcaaagcctgttcagggatgctttcggtctgacgaattggaggccaaagctttatttcatagtcttaattgggctagacaattgcagcttcgaattacacatgtggaaaccgatgccttacgtgtttcttcagccattaattctccatttaaaaatctttctagttttgatgacttaattatggatgtctgttatcttttatttttttttctcgggagtaacagtttctcatgttaagagaaacgctaaccaggctgctcatggtttagctaggtatgctcttgagttggatgaagatgtttgttggatgggtgaaattccgaatcctattttctctgttgttgtaaacgattatcagttttaataacagtaaaatttctcaaaatatatatattttattacatatatatatataaaaaaacatttaaaaaaagcaaaaccctaaataacctgacccctctctctcatctcatctcagccctcattgaagccgcc

SEQ ID NO: 69745 - DNA, 3348 bp, Cannabis sativa
  modified_base (2601)..(2604): a, c, t, g, unknown or other
gctttgaaagaggtgagttcctcaatactattccattttgttccgaagagtagctatgaccaattcagttacgttttaattcatagtgtatagacaaaaactaagaattttgtgagaaagtaaacaatagagacttcattgatagtgttataacactcaataacttcatctgttaatcttttccaccctcaaaaactgaattatctaactccaaaaaaactttattattgttattattctcgcattatatataaactattaatgtcaattggtttccaggccttggggaaggacattgaacagtcattatatgtggaggagttaagtgagcatttgtcaaaggaagatatattcaaagttctagtgattgatcaaatggagggagccattgaggtggattggagagatttcttcccctatcttaaatggattcccaataagaagatcgaaaataaaatcgaaagaatgatttttcgaagaaaagtagtgatgaaagcccttattcaagagcaaaaaacgcgacttgcttctggagaggtttgtttttattatattaaaacttcaatatactcattttttttttgcggcataaatacttaatgttatagtaaaacaataattttgttattgctgtttcattagtgttgttaaatgttgactcaattttccgttgaatcagcatttaacggagaaactgtaacaaaatcattgtttctacaaacattaagtactaatgccgaaaaaaaagattacaacaaaatacaaaaattggtattcaacaaaagataatcattgtaaatcaagaacatagacttccaataatcatacccctacagtttaataatgtttacataggtttggtctaatgattatgacatgaaactacatacaggaactaaattgctacatagattatttgctgtcagaagcaaaaacactgacagaggaccaaatcagtatgttgctatgggaagtaatcatagagacatcagacactgcattggttgcagcagaatgggctatgtatgaaatcgctaaagatccaaaacgacaggtcgtttttcattactcattcttaataataatcttcatacatcacttaaattaactctaatattttgtattatgttacgttatgttatgttatgtccgaacaaatacaggatcgtctctacagagaaattgtagagctttgtggatcggaaaaactaacagaggatagtttgtccaagcttccatacttgatggctgttttccatgaaactttgaggaaacattctccagttccgatcattcctttgcgttatgctcatgaagatactcaattaggaggccactatattcctgctgatactgaggttagtattactaactaaatactgtgtttttgtgtaactaatgaacgaatgtagaatattgttataaggcatcagtattgttaagcaccgggcaatacgataaacggattctcaagcattgctataagacaatgtcaaaagtgtattttgcatttaattttgatattatacatggattcaaattacacaagagaggtagctcaaatgatcaaacatgtggtttgctttcacaaggttacatttaaaacaatttattagaattctaaattcttatgtgggcttcacacttgtattaaatatggtgtccaacactatacatactctcattgcattgtctgcattggtgacaatgcaatgagttttataatgttcgcttaatgttatcatgttgttgtaacgcagattgcaattaacatatacgggtgtaacatggatgagaaaaagtgggaaaatcctgaagagtggaatcccgagagatttcttgatgagaaattcgatccaatggatttgtataaaacaatgacatttggtgccggaaagagggtgtgtgccggttcgcttcaagctatgttgatagtttgtaatgtaattggtagattggttcaagagtttgagtggagactcaaagatggggaaaaagaagatgtggctactgttggtctcaccactcataaactccaccctatgcatgccattatcaatccaaggaaatcataaattgggatatcaacttagaaagctctctatggtaatagggttttctattattgctatttatatgaataaataaacacaagtagttaaaataaataagaagttatttatatatgtaattttttttttgcatgttacaaatgatgtatttaatacgacacagttcattaggccattctccacccatataacattaaatatgaaattgcaccaacacaaatgctgcacatggaatctccaccaaccaacctcagcatcacagtttagagatcccttaattggtgaggcagcggcgtgtcacctcgctttggactcggctagactcaagaaccacaactatattttggtggagagtgattctgaattcgttatcaaagcactgaaaggtcttcaatctatttagaatattgataattatgtttatttttgtaatcaactctctacaaactttttatcttgtaattttacgtttatttctcgtcgttaattttgctgtataatgtggctaattgggcgtttgcccagaacnnnncaggttttgtggaaccctcctcgatacctgatactatcctttgtaatgaccgagaggtctaattttcatatttatcaaatgctttatttttcaaaaaaaaaatatatatatatataatcttatgtatatatatattgggaaaacaacctcattaaaacttcaaaagtaaactcaatgaaaaaaatctcaatagaaaaaagagtgtcatacaatattactaattataagagtctatctgcaaaataatctagatagttagaccaccaaacatgataattattcgagaaaatgctaatttagctaaagtgtgagccacactattaatacttctaggacattacaagaaagaaatatcaataaaatggttacaataaataagaaaatctttaacaaacctaaataagactaatcagccttgctataaataatcattgataacagaaagactgttaaattccaccaccaccctctggtaaccaagatgacatgcaagtatagcctccatattttctcatcttgtgacttaatgaatgttctcattctgaccttccaatatagacaattcgagtcatttaacaagagtggtcgagtaatggaacttccttctgcaaaaaataacatctcacacaaaacaaattatacataatagaataatcttaggatctcactaagagtatagtgacgagctttgataccaattgaaattttgtattttaatactattaatttattatttaattaatc

SEQ ID NO: 69746 - DNA, 1797 bp, Cannabis sativa
tcattgaacctaatatatctctcatacggcagcatagaaacagaccagtactcgacctgcagaaatggaagaatttccaaacctgagcatacataaaatttcattcaacatactctatacactaattaacagccagtccggtgctacatcataggcatattgagaacgtagataattgtaaccatattcaaatgaaatgacagcaatggaatgctaatcctcatacttcatatgcaatagtgaccattaaaccactaatgtttacaccatactctgccttgtagagatctttctctaacatgtctatttgttttctccaaatacataaaactaatcgagaaaaatatatattcatataaaacttaatctgcaaaattctcatatttcttaatatggttataaaagattcccatgttttgcaaattcctctttcccatgcaatgttcttaaaacttgaactctttcaatcataatggaacaaatatttttcttcttgctcaaactctcatgagaatggggagttcaaaattccatttagaaaaggtgtgttttatttatatttattataagtactaatacttcaaatgctgataagctacaacatggtaatgttttctggcagtagaagtaaaagccaacaataagaaaagaaagatagtctaatgtaatgtaataagttggattgaacccatcaaagtttggaacttagttcccagcaagaagggcatcgattttgttttccaagtgggcttcatggtcttcaaggcgacccttgatggcgtcattttcccaaaggatcaaagttggaacaccggttagcttgaattttgagtctactctccaaggatgcaggggagtcctccatgtaggacggtctcccacataagctctcaacagaacaacatcattagaagtagcttctagcttcttgtagattacaggctcagctctcacacaatctgtaaagcaaaaacataatagcaaagatcattgcattgcataaagatataaaagctaaagcataagcaaagacagcactcacaagagaggaggtaaacacctcgtacctctcaaaaaatgaagaaaatttagctttaagtgtcaaaaaggaactccaatatatgatgtataatttagctataatagctaagctcttggttaaaaaaattgtagctacatttagctaagaatctagagtgagctaaacactatttaaccattctttttatatttgtttatttgttttctcttttttttttttcttaaagttattatttttgtattttttattatttaaaatatattatttagatgatgttgaagaaatacaggaaaaataaaaaaaaataaagttttggtgaggtattttaaaaaataaaaaaaattagtgggagtgcttaattctatctctatgtgctctatttagtgtctctctcttttcaaatcgggagcgtaatactccagttccaacatattcaagaaaattaagagttaaatctccaaagctatgaacattttatgagtacaagtctacatcatatgcatagaaaaatataataataataataataagtttggtggtggtgcaagcaactttcaagaacaattatctttccaaattcactcttcaatcaaagacaaaaaaggaatatatgtttggcgagtgatatactatgctttcccagaaagagaatactagaatcttgccagaaaatatttgcgttttattctaagtcaaaacttaaatttgatgatacctaatacaaatggtattgataggataggagatttgtgaat

SEQ ID NO: 69747 - DNA, 1369 bp, Cannabis sativa
aaacagaaaactgattaaaaaaatattaccaaacggcaccataaaataccacagtgctctttaactctaaatacatattgaaataaatacatgatatattttactattattctagtagtgctttatttgttcttttcccctaagacaaccagcaccattctttaggtaaaaccgtgagaattgcattaaattaccacaacaatcctatcaaatatgataaatataaatacaaatatagtacttggaaactaggacacaagaatctttgttattttttttaaatgggggaaaacatacttataaagactacaagattcgacatagtaaaaatgaaatgatttttttttttctatattattattttacattaagttcatgtattgaaattaatgccagtcaccccacatggtgttcttccatcttcttcttaatttttttttttttttatatgtataaaaataattaattaaaaagaacaacactttgcatcattgtattctaatacttcatgtgcccacctacaaaaggatcactctattcttttgaattagacatgattagattttaactaatttaaataataatataaagtagtgttcctttatggcattataagatgtgttatatatgaaaaaaaattaaataagaaaatgtcttctttctttggatgcctccatttggtgtggaatttattatactttgcgtaccaaaaatcatttgtcctttttaataataaaagtttaagatactcaaaagaaaaacaaaaacaataagtgacacaatctttctctatctctcaccaccatgattatacattatgtctttacacattgaattattagatataaaactaaaaaaagaaagaaaaaaaaaagcatagaagaatataataatgagatacatagattaatttggttaaaagaaaaacacaatctcatcattatatataattgagctcttgatcacaaaggttaattaaaatgccttaatttgaaattaatgtaaataataataattcttttgcatataacaaagtgcctaattattatcactaaacaaattctaattaattaggctgtctggtactattgaatgatgattttgaaccattattattagtattattattatagctaataatgtaggcagtactgctttcttcttgatcatcttcttgatcagtaactccacttgaacatgagaatgaaggtctaggtgaaccctcatcactactcaaaatcaactgatttctcttcttttgtttattataattattattattatttttattaatattaagctttctcttcttctgaaacactccgcaaacaacccaattcatttgtagctgagacatctgcatatatat

SEQ ID NO: 69748 - DNA, 3768 bp, Cannabis sativa
taaagttttcatttgtcttcaaaagattagctgaaatcagatttgtttatttggcgcatccatgtaattttgatgaaatgttataacttcaatatgataatgaaaatgtaacttaatggacatttgatattttgaatttaaatgagggatactattgatgctatttttttcttgttccggtcaggaattatatcatgagctgcatgctttggaccgatttgaacaagattatcgacgtaaacaacacgaagaggataattcaaatgctgctcaaagaggttagagcttatctaatgtaatgtcaaattgtgttgcaatgctatattatcacaatatgaccaaaaaaaaaaaaatcctcaaaattagaattgtgccatgtttgactcaacaataaatgctatactcttaaaagaatgctaattaaagttgactgatcaaacttcttctttgtaatataatttatctatttatttaaaaatcaattcttataaattttattgggcatttactgaatattattttatagtttcgatcttcaaataacataatacgaaatgcggtgccagatataacattttagtcactttttgttaaaatataacattcttgcttacctacgtactcccttggcatgtaggagacagccttgcgattttaagagcagaattaaaaagtcaaaggaagcatgtgagaaacttgaagaaaaaatccctctggtccaagattctggaagaggtaacaagtcattacttttatatagttcatctattgtgatcttgaaaaatggatggttgaaacaacttgttatatttttctgatgctatggagtacagaaattattaactggaaactccttaaatgcaggcactttctaattaaaaatatatttttttttcacttttctagacaatggttgtctctcttgaagtttttatttgtatttacaggtaatggagaagcttgtcgatgtagtacatttcttacatgtggagattcatgaagcctttggtagtgctggtatgcattaaacaaaatgctggatcaaatttctaattatcgtcagtcatttacttttgtgtggattatgagatgctgctgagatactttgttttctagcttaattatttttacattttattcattacaaagtaatacattcattattgatgtgatgatcatcttctctctgtgacttgcagatgttgataaaccaataaaaggttcacagaccaagttgggttcggctggtctcgcattgcattatgcaaatattattacgcaaatcgatactcttgtaagattttgtctatccatttgtatattttagtttgctgacatattacgttactcatgtttaggcatcatcaaagtcagagcaaaaaaaaaattgaggattttttgctacaatcttgccataacaatgttttcctggcaatttgaattttttatttacaataaaactacaaccatcgtagtattggaaagatgattgtatcctctttcaaaattttggaactctgttctgtttttgtggccatcttattaatatctcgatttcatttcttatcattacttattatctttctataaatttcattattagaatgtgggggtgtcatttttcttaatagtacactgaaaagtaattttacggatttaatgctaagttgttttcgagcgaatgaaatatgatgctttatgacataaactcatggtagcttctatatattaacaggtgtcacggtcaagttctgtgcctcctaatacaagggatgccttatatcaagggcttccacctagtataaagtcggcattgcgttcgaagttactctcatttcaggtcaaggaagaggtaactttattttcttccaaaatgaacttgtttttcgctgaaatatgatggtttgtaacagtccttgtacttagaaattcggtgattgggatgaattgtcttagtcataatctttccacatgcattttcttgcagcttacaatccctcaaatcaaatgcgaaatggagaaaacattgcgttggcttgtccccattgcaaataatacaaccaagtaaagcttcattctattttttggagtaaatttttgtttgggttgatgatgtctggtatccccatttcataatttgctttatcaccttatattcactgcaaaagaactcgtattttaatatccaagagagggtgacaaagtaattaaattgttttgatttgtcttttcagtataattgtttaaaagttaacctgtgagcatttctattgcaattttatcgaaatagggctcatcatggcttcggttgggtgggagaatgggcaaacacagggtaagctttcatacaatttctgtcctataattgttttgttgtactttccaagcttatccgatttaatttctttaggtctgatgtaaaccgaaaacctgctggtcagactgacttgttaaggattgagactctacatcatgcagataaggagaaaaccgaagcatatattcttgatttggtggtatggcttcaccatttggtcagccaagcaagggctgcaaatggtggcattaggtctcctgtgaaatctccgatacgttctccaaaccagaaaacgattcacttctcttcgggcaagcccaactgtccatcgcctttgttgactgttgaggatcaagagatgcttcgggatgtgagtaaaagaaaactgacacccgggataagcaagagtcaagaatttgacacagcaaggacgaggttaagcaaacaccatagactgagtaagagtagtaatcactctccaacaaatgaaagtagaagagatccattccccattagaagaccgtcctccgttccagtcatcgactttgacttagacaggatcaaagcactagacctcatcgatcgagttgacacaattcgaaacaattaggtgaaaacaatgataggccgaaggattctcatctccggctacgttcgaaacagacccatctcggcatttgtcattgtcaagttgtgagcagtgggtgcctttggatttcggacgccacagtcggatattttatgcgtgaattagaaaaaaaagagagaaaaagaaaaagagataggtgagtggatagtggttgctgtgtttttgaatgtggaaatttaggggtgagaagtaacatatggttcgagggaaatttaattgcttgtagagatggaaaaatgaacagataatgtgagttgggtttttatagttttcctttgttctatgtgtacagagtaaattaactaataattaaatgtcaaatgtccttttttttctttggtcttgcctatgttttttcttttcatgtcaagttttgtttagctgtagcacttgaccatagtatgaccaggttgacaattgttggaattggcagagtttttagattttttgaattaagcaagattggccataggtttgttgagatcaatcaatgatgtggattgatttagctcaaggcgcatctcatgattttgaaacatgtattggacttcttggagactcagttaatctcttgatgtgagattgacaactattggttcgtatttacttccaacacaagcaaggatgtatagaatcaattgatcttctgagactggatttctagccgcacgtaagctatcgacaaagcttttcgtcttgagcacgtatttgtcaatggtcatagagctttttttggtgttctgtaacatggacatcagatggatcatacgtgctttggatctggtgttgaacagttgctcaa

SEQ ID NO: 69749 - DNA, 2454 bp, Cannabis sativa
aaaatatattataactttacacgatcaattaatacaagtcaataccaaacattgtattgtattaaataatactaatacaatacaacacaacacaatacagtacaatacgacgtgccaaacgagtgcataattgtataattactggatgagtttgtttagaaattggttcaggccttacacaaaggtgctgataggatgtaatttgatgtagtcaatgaagtttttcgattcaccaaataaataaataatgtgaggtggtgcaattagttcagtgctaattacttttaacgacttataaatataacagacacactttgctcttgatgtgctgagaaggggcgatgtctcagctgctctatttgctcctggatgggtctatgagactaaacaaccaccagattttcaaactgcacaaaatcagtaatacatttccttggactaaatccaaaatcctatactgctacattaattatgttttacactttaccattgtagttgttgaacatggtttattttacaattatgagtattactcatagtcgtgtatttgggttttgcagttggtggagccttgtggagaaatcatggggaataggaaaacattatcctagaggcctaccattctactcaaattttgatcaggtttaaactaactagaaagaaaatattgtttttatcttttgggttcctattacagcacttttgtatgaattaggttcacttttggtcaacagaaattaaatctgactcaccggtaaatgaaaaacttgatacttattttctagggccgtgctcatcatttttctgttgatggagtgcatattctagattcttcatggaataacctttcaactcgaggctttcaggtttgtaataaagctaacctttctttcacaatgatgttttctaacctggtcaagagtaactagtttcttaatataacaatttaagtaaagttattatgatgtgctcaaagagccaaaagttataatgattattgatttggcaactttattagttttagagtggctggttctgtacctataaaaaatcattcattgtggttaattatttggtatattactcaacaaatgatgtgataataaaccaaagatactattatgttcttgcatattaatccacacactctgcttgggatttgaattttataattcaagtaagctaattaagtttgctatctaattcctgaatttgttgcagccatttctcgagtacaaggataattctaccttaaatgacataaaagtgcttgttaagtaagtttaatgctgtttttgagattataaaattaacagtacatataggtaaagagattggttaaattttgattaatttgcatgcatgaatttttcagttattaaatctcttttattcataagtgtactagtgattaatgccctggaaaatctaaaaacaaaattcaaaaagagccaatcaaaacctgtttacaaacaactaggaattattggcctttataagatttgagtagtgctgccattttatattggctagtctagtctattcactctaaaaaagaaaagattgaagtcttaccacaatgttagcatgtctaatgcaataacaacatttgtgaactagtttcaatggagcatcttacggtggtggaagtaacatcactttcaaaggaagacttaataaaggcaatgcttatttcacaacaagactatttcatgggaagcttcctttggggaactcacctctttactttacatactctgtaagcttctcaaacaaaagtcctctcatattaattctttattacttagtagagtatctagaaaaacactatgaattagtttattgtccaaattctgataccaggataatttgaatttgtaactatccaatctgaggatatttaatttctaaattctcagaagaatttctttactgatctaatttgactattgcaggtgaaatctaaggcggattctctgcttggactaattctcaatttctcttctggggcatgggagaaaaagtctgtacttcttgcaccagctaaagtagatcatctctcaggcaaatttagtaccgtggtcacaacacgtcaactagaaaatcttggagcttcttcagaatggaccatacaggagagcagcatctcacttagtgaacacacattaacagaaatctctgcttgttgctacaggcctgatcctcaaattgtgaaattagacgacgataacacttccgatcaaagtacagcctcagtcgagtactatgctgtgcttggccacataacagtcaaaagttcagaacaaaaatcaaatttcccaccctcttcttcatgggttgtcgagggtgaacacatcaaatggactccatcctctgaagattctaagactgtgagtgtaaagattatttggaaattgaaagatgggattgattctacattcccaaaatacaata

SEQ ID NO: 69750 - DNA, 2637 bp, Cannabis sativa
accgcgggagtctcaatttctatattttcaaattcgataatggcattgaatccaaactcgcgcccctctttaaatgatgctttgagttcatcggcagattgagttgtattgattttgttgtccttcaccttcagattttcctggtggaggcatcaaagtaagaaaataatatacttgcatgcatggtaatgaaatagaaaaaaagtgcgagatatagtaacttgcctgctttacatattgagccattgttgaactgacaatttcttgtatcacaaacttagtcacacgttcctcaccaagtatccctaacagaaagcttttgggaacctataagcaagagcacagcatgtataaatttcccattctaaatcagctaattaagacagcctaattaagtttcacaagcattcccaaagaaaatcaaccataagaacaacaaccagcaaccaggtgagctttttggttcacctggatgcaaattcttcgtaattactaatacttagtatgttttggattggcaatgtgatattggggcattatgaaggtaaatggttgaatttctcttcatttttcggagaacacaaacatgtatgagagagtcaattacatcaaattaaaacttgagaacaattacttcaaaagtttcctttagagttctgatttatgaactttgaaaaagtttcctcaaatcatttattgttaaatatttaagtagctgttaaaaggaactaacaatgataatttattttcactctttcttaaagttttggctttggtgacaagtaaggctccaactaataatgcaattaatagtgaaaagaaagataactgaaacagcatgaattaaatagaaatcccccatcctgaaacaacttaccttagacgtttttcctgatgatccaacgcgcatgaaaatgaaacagaacataagtttcataagatgctgaagtgaaaaaattctgggaataaagttggtaaaataaggacactataagcttgtgttatgctgtacacagtacacaacaagtgcatatcagaatataaaggtccaagtatgacaaaaacaacagaagaacgtattaccccctttttctcttctaaatcctggaattggcggtgctgttttggccaaattagccaaaacccgatcaaacactctttcagtttcctcaccagtcaagtccactctaacctgccatccgcatcacaggaactacattcaattttgttacccaaataaacaattcatactagcataactgaaaacatgacatttttgtcttcagtaagcttaccttgctcaaaagagatacttgaacagcacaaactaattatgtatagcaaaaatattgtatgcataatgaaaagtgctaaatgccattgattgtcatgttactcaataatagatgccaagttcaagcagaatagactctaaaataggttgtttatgagtgtaattttgcaagcttacttgcatcttatcattatcttgagattccacaactatctgagggttcttgacaatgactaaatcttctcctgagtctactgatgcctcaacacctatatatagcaaataaatcaacaagaggtcactcaaaatagctaatataatgacaaaggaacaaaaagaaaataatctcaaggaagcttcacctgaaccagcttcgcatatgagtttctttagtccaaactccctcctttggggactacaggggaacaaaaagaaaacccaccaagcgaaaaaaaaaaagttgaattaatatgcaaatacagtggcatttatctccaattgactaatggtatatgggttttttttacctggttatcaagaaacacttcccagtttcaaagttcacttttccacgggcatgaagttgaacacatccattggagcttgtaatggtaaaattctagacaatattaagaccataaaagttgctcaataataaaattaggtaattcattacatatactaaagtggatgtaattactttggcgatatgtagctgttgaaactgtgagagagctgttcttggtgttattgtggatgccatagccatttcctgaacagagatccttttctatgtggttgagagttcgcactcactacggttatatgtaaacaaaatgagaaacgacatatcttgtgagcctaaagaattaaggattaattacacagtacaaccgcattattaaaatatttgtaaaattaccttcacctctttaattaattgaaataccgttatgatttcaattgcctttagggcacgtatacccagatgaagttatattcctttgtgtggctgatagtttggtacacgaattcaattccaaaaatttctaaaatttatatgttgaacttatttctctctgcttttattattattattattttagttatttgcggcataacttctttaagggactagatttttgcaactaatttttaattttaaaattttggttgtaaaactcactaaactcgttctgttagcagtttaatatttccatccatttttagctgttaattagtatggtggaatgtctacgtggacacagtgtacatgtggtacaattttattggtccacgtaaatatatatttaaaaaaataaaaaaaattaattattttgaaa

SEQ ID NO: 69751 - DNA, 4125 bp, Cannabis sativa
aaacaattgagaaattctcattcactttctcttatgctcttcttcctcttctttcttttcatctattttatattattttataacagttttttctaacaataagttatggataactaaacaaaaattaaaagttatttcaatatttaggatatactttttttaaattttctaaaagaaaaaaattaatattgttagtagcacttacccaattcataaattaaaataaatttaatatttcagtagtgttatgatttaatattaaaaaaaatagttaaaaaaattaagaattattagtggctaaatttttactttttttacattttgtaaaagttaatcttaaactttttaataaaaaaatgcacaaatacctcacaatgtacagttacattagtaaatttaaagtaacgctcattagttattattattaaacgccaataaaaattgttcgcatgtacaggacatatgaactaacactattagaaaaataatatacgcctttagttttttagaagacataggtcttcaaaaccctaaacccatattagatctgcggcggaagcctgtatctttgttattatgaaaaatttgaagacataggttcttaatgatgtgcctgaaatggaatttttgaccctcccactcttttattttattaacacagttgtgttgataattgagaaaataagatagaggattactatgatcatcaagattctcaattttgaacgatgctgaagaagtcaggctcggaaagccaatgattttcaaaacaaaacctattggtgtggaaacttttatttttaggatcgttaaggattattttttaagctctatggtcagaaccaaaataagaaagatgtctcagggtagccttaggaaaaaagtccaaccaagctttattgataatactccaatcgagcctttcaaaaacattaccatgcttccaagtaaaacgattaccaaagaaaggcaatggagagagattaaatttattaatgaaagattaaaaattggacatggcatatggaggaggtttagtacaagtagacttgacattaagacctaaataatcgttaaagtctccaattatgatccatggggctaaaggaacaacatcatataaatgagtaagaagagtccaacaaacagatttattagctaaataaggggaaccatagtaacatgaaaggtgaaaatttatattaccatcaatatttacataacagtcgatatggttactagaaaaagataaaacattgatactgacaacatcattccaaaaaagaaaaagtcctcccccaaaacccttcctgggcaccttaaaaacattatcaaaagataattttaccctaaatctatcactggaaccagcccacaatttggcttccattacaaaaagaatttgaggttgatgttgtttgactaacagggagaggttttgacatgctcgaggactctctaaacctcgagcattccaactcatgagactcatttttctaggcgggggttgcatcgcaacacccgcctgttcatcaggagttgaaatagaaagaaacacaacagcatcttcatcatcagttttagctcgagccctttttcagcatttccctaacagagtttcccacctgacactttgcttggtgaaagacctctccacaccagatatgttagtgggagaatggacaactctaggtaactcagaagacataacagccttacctttattagaagtagaaataacagatgcggtcaagattagggctgctggcaatgaacaattgagattaggaacactaaacgctcctagaggtgtggagttaaggcaaaccacagcagcaggagaatcagactaagtcatgacaacgtgagaatccttagacagtgtagtgttgacaatatttgggaccaagaattggttaataacatcttgaagactttgattaagagagagtccccttgaggacgactcctcaaacggagttgagttggaaagatcaaagatgcttttcttgtaaattgacttggtaggagcatgaagtacatctttgtaatttaaagcaggtggtataggagaatcatcacagaattttaagagcttctcacacttgttaaaagtatgatccaacattccacaatagtagcagtagttatgaatgatcatacataaattttagccatttagtgcattagagggatctaaacttaatgttcatacccctacgaagagacttggtaacatcaacaaggattcttataggcatgaagggactaatagtatcataaagggaaggaatgtgaacttaattaagatcaccaagtttttcagacaaaaactgagtaagggcagtagatcttttaccaaacagaatgagatgaatctgaactcaagcaaaaaaggatcaggttgcggtcaaaatgcagtagatcttagttatcaagatatacacaattttatagtgaagagatattgattgaggaagaatggcagcaaactgaattttataaaattgtgtatatcttgatagagagatatataaaggttatgggcttctttattctctatattgcttctctgtcttctttttcctcattttttttgaagcactcatttgaatctgaagctaatcttctcatccataagtattcactttcatctttcaatatattttacaagctcatctatcaatttcacgaccctttgaattacgacactaacttccttacaagaataatgtcctgtaaaaagagggttacaattataagtaattgatctgcataatgagcgaaataaaatgaaaatcgaattaatggagtgtgtaaaaatatttataccatcatcctccttacccaaaaaaataaataatagattctatcttcattgttgtaggtgtaaactattaaaccctgagaccaaataaaaatatcttcttcaaaactatccatatatttttagtaaaactacccaattttttttcttttgcaacaatccaaattttattaactaacaaaacatatgtacaaaaagctatttttacatttataagctttcaatttaaatttaaattctcacataaaattaaaacttattaaaatattatttctatttactatccagttacaaaatcgattatacaaagtaaaatatatatttgttacagtgatattttatttgttttatttgaggtatgtgaaacctcatttttgaggtcagattttatataattccccattatttatttatttttagagaagaatattatatataggtattatcaataacataccattaagaggaaaaaaaaaaaaaaaaaagctatacaactcgggtgtttggtgatgtacaccattaactctttattagtcttgattattgtcctccaaggtaaaagagattaattgagaaaaattatttataaatcaatatatctattctatataaagtgtgcctatataatagaattattggtttatgagaaatttataggtgactttttatttatattaaaaataaaataatttatgagaaatctatagatcaacttttacttatatataataaaataaataaaaaatctcaattaaatcaaaaaaaaaataataataaaaaaaatacgcaattcccatggatctgcaatgcgaatcacaattcatcgtcgtatacttttcatttttttggtttcattagtgataataggaacgtaaattatacatactttgtaatatgaacacatgtacaaacacgtacctgtagttttaagtagctatatataatgtatatagctagcctataggctccatattccataaatgtttttattttattttattttttaatgcgtgatttcaatagaaagagaggtgtatattacttcttaattacatagaaaaggtgcaactgaaatgaaagatgattctatacgtacgtagtcgcgccgcgggtggtgttgtgactttttttttttttttttgaaagagagttgtttgttgttgtgactctattgagggagagccctccttcgaactacggtctactactcagatagatagtaatgtaactacggtctactactcatatttttttgaaaaatttaaaattaggaatttttttataaatgatttattttt

SEQ ID NO: 69752 - DNA, 4045 bp, Cannabis sativa
aaataaatcaaaagattatattttctataaataaaataataaaaatcataaaactatttaaaattccgtacaaccatatttttataatatttttgttatttttgtgtatttgtaaaataatctattcaaaaaactccaacttaattacaattttagataaacttagaattacaatttccctatcgtagttattctcacttaagaggtaagaaaaaaaaaaagctataattacgtaaaaaaaaaaaaagatgcgttttgtaaaatttttgttttcaaaatttttaaatcacaaactaaatatataattttttttttaaaaaaaataaataaatatgtgtttgtaaagcattttgtttttttattttaaaaaaagaaaactaaatgcacttcctaacttctatttttgaggtgaaaaaaatagagttcatatttataaaaagagaatacaaaatgtactatgattgagcaactgtttaaataaattttcaaaatcactttttttttttcttgacaaattaattacttttgttttcaaaaatttaattttaattcttattttaaaaaataaaaaataaaataggtttcgtgaagcatattttataaaaataattttacttttctaattaaaacaacaaaaaacagtttattacaaagattatgataagtttcaaaagaaaaaaatgaaaaaaaaaaaaaaaaagaatgattaagatagtgtgataaattattggaacaaaaatagaaattgataggtatcgtcacgccactccagcattctcctaaactagacacattaatcgatttcactattttttttaataaaagtattaaaatatactgcccatatgcgatttcaatgcggtaaaagttcacacatttacttagctttattttgcttttttctcaaaaagaaaataaataagtacttttttttaggagagataaaatagcttcatttaagagccaaaaagggctacagaaagaaaaggagcaaagtccatagtacgaagataggagaaccaatcaacagaagctagaatggtgcctacactacacctgaaagcagcaatgcaatgagctgcaaacttggaagctctcaaagtcaaaggcacttttccatgcaatctaaaagcaaactaaaaaacaatgctttcaacaaaatctcaatgtccaaagccatctttagaattttaaaatacatagcaacttctagcattaatgagagaaatgcaatccccacatgaaaacataaatcgatcaactgctgtttggcacttctttcaaactggcatggttcctacaaattgtgcaaaaccttgcatggtctttcgtatttctctcagcctaactagaatcatatctaagaatgtatctatcactgtctaataaaacagggtatagatttcaattttttcattttttgcaaaattctcctagtttgttcaaatttaatgtcaacaacacttcacaaaatccacaacttttgacattaaagcttccaaaaacagattccttcacatcatggtagatgaaataacccaaatagtcagaagcatcacttgtttcccgggtccccgaatatttccattttactgtaattagagcacaaaaatgtcacattttaaacacaaatcgatggagacaaaagtacaatgcttttaactgacaaataaacaaagacatatgagtacaaggtttaaacaagccacaaacttcatcaatgtaatacataacccaatgacaatcagaaaaatcaaagagcaatcccaagtcccaacagcttctctactctattctttaaaatacctcaccaaaacttactttttttattttacctcacacatttacattataccatacatcaacttctttataattttctctaaaccatttaaataatatatttataatacacaaattaataaaatattatatattactaatatttattcatttttacagatacaattaaataaaatacattataaaaataataaaaaattatagctaagtactaaactaagataagtattagctacatttagctaagcactattcatgaagtaaatttttgagctattttagctcatcaattgaatgtgcttctttgaccttttttttcaattcttagctattttttaacctttgtagctattttacattagctagtgtgagtgctagtacaaaccatatttgacatctatgtgttaatattcgtagctcttgctttgcttgattctactaatggtgcactgcgcacacaatactaattaagaataactgaacattcaaaggggctaccacacttacttaacttgatgcttattaaacctactaatcccatacaaaattacaaaccattgctgctaagttaaaaacacaaaattaaactacattaaagtaaagaaacttaccaatttaacgagtctactgattagagtccgtagcctgagtacttggattaaaactatcatagcctccacttgatggtggtgctggattggcttgatacatcccaggtggagcctgcgagggggcacccatggaagaagctggtgcggctgtcccgggaatggctgagggaacgttaatggttgggggcctcgggagagaatttaattggccaggcatggatggagcaccaggaggagccccaggtggagcaccgggaggagccagcattggtggcatgtttggatgaagaccatagcctcctagaaaattatcgttaaagaatatttcaacaaaaaatgcatctacaaagaaacttatacagacacaaatggtatgcatttatgtatgtacattatacatataataagagaaaattagtaaagagcaatttaacatagaaactaaacagcaagtgagaaatgcagacatttggtcttaatatatagctatgaaaaaataccgaaacactgccatgaacaacagatgaaagagaattaaaaatgccagcagtaaaagctgtattcaaatagaatattaggaaaactatatcccaaaaaagtacaccaacaagcaataagccattcaagaacaatttagaaaggggaaagctatgaaattggcaaaataaataaataaatcatataaaagactgaaacagaagtgcaaacatttaatgatcagtatcaacctggagcaccaggacctggtctaggcaaaacaggaggtctaatcatcccgggtagcattggtggtccacctccaggcatgtgtggcatcataggtgttggtagaacaggaagacgaggcctctgagcaagtagatgttgattataagccgcaccaacctgatgataagctccagcttggtcaaggtgttccttaatcctttggtcaatcaaactttgggtttgttgctcctcgaactgctgatagtaggttcgtacatttgcctaagataaaacacaaaattaagaaaaaaaacgaattaacaccaaaattcgatgtaattaatgctaatcaactttgattacaaacttaacgagagaaaaaataccttgtgcttgtagccagcattatgctgttttctaacagatggctgaaaaatacgaacacccaatttgtcactcaaatgaaacaaaaataaaaaagcacccatttgttccctcatgaatcatgatcaaaatttaaatacaatgaacaacggtacgtatatcccagtaacgaatatgaaaatctcttcaacttgggttgtctcttatacaaaatgacttaccgaatcatgggttagataagtgtcgcaatagtcacagtaatacctgaaaataaaaaacctcaaataagattattcgatcgaaggatggtgagtagtcttataaacagaatttgcgagtttgagtcttaccgaggcattgtcgtatgttggaagaatggcaagtagaacgaactacggagttgagaagagacccaaaatgagtacccaattcaaaattaaaaaataataatatggtagagagaggagaaacggagacaagagggagaagcttctagttctacttctattctaggtttctggttcaacaaatttaaagac

SEQ ID NO: 69753 - DNA, 3008 bp, Cannabis sativa
tatgtgtttaatttcattatttttgagatatgcatatttaggatgttaattcaacatacttattagtaaatctagatcctggtaaaaatattcccaatagatatggccaaattatctcgagcatttcttacacttaacagccagccattcataatctatatttttctccattaattgtccatgttcattaaggtactgaaaggatctcgagggtgaatctgttacaaaaactcgatcaaattgaaccctagtacgacctttagtatgttgttctacaataataggcttccgagcaatactaactaaggcactaaggcgtttgttttcccaatattgaagacccaagtcatgtagatgaatcaataaaggaacagacatggctagtttaacagcattcaagtctgttgtccatggtctaactatgatcgacttcttatcaaactaaataactcttgcttccaaaacttcatccctagtctcctcatcattgattttcaccatgataagtcctatggacatcctagtaatctaaactatccctagatgttcccatattcgtttgatgaatccttcaaagacagccgttggaggatttacaccaagagtcatacatattacagttgaattccatgtatcattttgttccctaacctcctcatagtccacttgagcaattctcatgccattttttatcaaaggttcagtgtaagaaagcttcgaatctcgattcaataccttctctttagcaaaggtattccagagactcttagctgattcttgaaacggatcttgttctttacccacttcttgttctaattccacatctttagcccagctcataataactagaagtgtatggaatgttggaacactaggagattgtcgaacagtgttctgacctaattcctcaatataatcaccgttagctaccttattcagtttgaaaatcgtacctatagcgtcattctcttccttatttgcgtgtactccatggctagaatcaagctcatgcaacttgatagcaggcttacgaaccattctcttcttctttgccatgggagagagagaacagaaacacacacttcctcctctaatcttatatgattatatatattttcttttaatttttttagtgtcattcctcctcaaattttatatagttattttcttttctttttattatcttatatggttacattataatattgtatcttttttcttcattgcataagaatgttgtattttatatactattcttcataaaatgaatatttaatagaatgaaatattttccttttattcgtaaataattttaattttattaatgaatgattataaaatttttcaaaacaaaaataaaaataaaaaaacaagtcattttaaatggattagttatttttaaactattttaataaaaaaaaagttatttttaattatttaaaattttattatattataacactttttcttttggtattattatagatatttgtggtataaatttcaattttttttaatttttcttcaataattattgataatatttagtcaatttttgatatagtagtaatagtagtaattatcaatgatatagtgatgacaacgattttaaatatactgacaactataagtgagatacaataatgataatgattttgaatgtagtagtgactacaagtgagatacggtgataacatcgatttgaatatttttgcaaattaacataaagaaaacaaaaaaaattgaattagctggaattaatagatattaattaaaaataaatatttaatattatttgtatgtagatattattttttaaccaatgtatagatattatttaaaattgcttcaaataattctatctattatttctttaattctcttatttttctcattttttattctactttaaattctctcatttttctattttttattctactttatttaattagagatcattaattaattaaaaaaatttaaacaaaatctatctattctctctttaattttctaacttttctaatttttttattctactttaaattctcttatttttctattttttattctattttatttcattaaaaattattatttaataaattttttattctaatttatttaattagagatcatcaaataattaaaatttttaaaatataaactatataatcatatatgatagtaacgattcacttaattaatctataataaaataattcaatacttatgtataaaagtaaatgcttatcaatcattgtttgatttattttatatattgggaatgatattaatgataactacaaatgagatacgatgatgacatcaactttaaatatattggtgactacaagtgagatgcactaatgacatttgaagatattttttgtgtgcttttgttatccgtattcctagatgcctggtacgtggcaatcacggaaaagttccacgttagatcatgcgtggttggcatgtacatcctgcctttcagaatcaaggaagatgttatattccaagagttaccccaagattctccttatcagcgaggacggaaaggactctgggactcccattattaattcgctattaagaaggatcagaagctataagtattccaagagggtagcaggttagtctaatctaggaaggctatggacaaatgatcctggaacctatttcgttgtatcttatccggagctcagggcgaaggttacatatcttctaacaccaaatcagatcctgtcctctgtgtcagaccttggtagtgcgcgtacgtgcctctgaagctccattttatccaacgacttgtttagacaacaactttgcaaggtgaaacttttgggcaacacgtgtccttattcccacgtattgccttgcagcagccgtacgccacacgatgagaaagctttctacaaaccaaaggtcagattgccatggtgtagtaccaaccattgtagcgtgtttaatacaaaaccctaggtgagtgaagggtatgccctcaccca

SEQ ID NO: 69754 - DNA, 4255 bp, Cannabis sativa
taaagagccattgaacactggaaattgcaaatcaagcaacacaaaagctagcaatacataaaaaggaaataccaagaataagaacaaatttcagcaccaatcaggaactttctatgatttgatatacaaactacatcagcatacagaactcacagtaatactaaccatgtaagagttgtgttaacaaagttcatagagccgattcaaaataaaattaaagctatctcaaacatttgacccacccaacccaacctccccacgggtcaaaataattagtgacctcaatcaaatacagatttcgagtaataacagcttatttcctgccagggatggggagggggggatcatgtctattgaatggtgtgcctgttcaagtcccagaatcaaggtgcaacatcttagcacaaaaacttgctggaaataagtgctctgtagtgttttcaaaaaacacttgtttgaaatattataccacaaagtgagtaaagaatacatgatcataacaaaccaaagccataaaaaaactcttcatatatatgcatggatagaaagaaccagatcagataaatccaaaatatcacaagaaatctttcatacccaaaatttacttggctgaaatgtatactttaaaaaaaaaataactttgactgaaaaatagacaagaccaagaaaattgtgggagggagagatgaactagaattctacctcaaatagtatggaaaattatcaaaagagacgtctatattttttccatcaagaatcccagcaagaatatcttctttaaatacagcacatcgcagagacagaccagataatgacgctggctgtgaatccttcgccccatcgtttccttcttccaagacctgtttacagatacctttgctcaatttcagtttacaactaggtgatccagcaaacatcctcaataaaggccttatcaaatcagtcatcccagagagttttacattgcctgcttctgtgccagagtctggattgaattctgggggcatcttgtcgattgctccaatatcatcagctttttcacttcctatatccggagttgaattgccttccagaccgtcaagctcaatgtctgtgccatcatgaacaacagaatgagtaggaacctcagaacctggatgaattttaccagtggagtgagctggagatttccatcgcgatagatcctgtctcaggcttgagagagatgccagtatggaagccccagccacagctgaagggtctcctgtccgacgttccatacgaagttttgccaaacaactctgggcctccatacccttaacagcaacatctgtcataatttgctgaaaaatctatggaaaataatattaaggaaactacacaagtataacactcataaatatggtataaagacgcctatatgcaattgaaaactaaagcatataattgttgtttaaaggtttcacagtatactacaaattaatgattccggaaggatacataagcgtggctccctagaaatccaagcaccacctcatcaccggagctaagctcgtggctcgagtttttcttgactgttgtcccattcacgtgcaccgtccccttgcttcccatattttctagaacagcaatagcattgctctcacgctgatcatgtccacaaagaatgagtggtcatactgcatgtacatttacgaagttcaacttgaaaatgaaaactaattaaaagacaccccagaacacattcccaaaacccctctccattttatttttaaaaaagaaaaaagaaacactcgctgccgagaaacgaatctgcaagctagtgtttgtatgtggctcccaagctatcaatgccgcaaaaaactgctgaaaacgctttcaggtaatacctgcgtgcgcctgatcttgcagaaaacaccactgacagcctggtcgttcaaaagataattgcaggttctgtgtgaaccaatggtgaaactcgtccccaagataggaatgttatgattctgatgccaaagagaaacactttttacgttcaagaaaccgtaaaacaagtaaaacccatgttcaaaatcactgcttagctttaaatttagtataggttggaactgcaactatactgttatctaaaaaaagaaaaagcaagaaaactcagaagcataagtagtaataacctgcccagactgagacaaaagccggcaccaaggcgcaagtgggtcgaaacttgagtttcgcttctgataaaactcaaaaacgccacgcttatccaccgcaggggaagtccctttaagccaaccaaaaattcaaaattctcaaaccaagaccagaaatgttccaaaaataatcacctataataacttagctcatgcgaatagatcttcctcttcaaaaataacacaagaaagaaaacaactaccttccgcgatcggagttgacacagctacgtcctcagatgcaacctcgttcttagcggaagtaacggcatcttcggcaatcggagcatcgccggaaccacattcaccaagatcagctggcggtggagtcggcgtagaaacttcctttgaattctccgccgccggcatcgacttttccgaacccccaccattttcgacctgcaaaagaaaacagaatcaaaaccctgaaaaaactcaaaagtctcccccataaaatccccaaaaaaataaaaacccacacttcaagaactctccaaaaaaatatatataaatatatgaaattgatttctttcacggtgacaccttaggccgcttcggcgatggcggcttgtcgtcggccggcggagatcttttgttgctgttaccagtgagagatccacttcgcctcgttgaaaccatggctctggctctctctcttctggttgttctggtcttccttctttctttatttccctctttttatttctttttttttttaattattttcttcactgaacgaagatatataaaatataaagcccaaaaaaatccttttttttattaattttcttaaattgctttcaccttttttttaattttaaaataatttcaaaaataaaaaacataaacatttttaatttcaaaaaaagaaaaaacatttattttcctactccgtcttgtggttggtgcacggaaattcgatgccacccaccaaaagggcttaatgatacaatacaactgagaagtggtatacggtaagcggcgcattttagtgactaacattataagcacgaatcgatgaggttgttggttggcgtaggtttaactagtttcttctagttctgtctaacatacgcacgaattaagtttagctagctcgtaataattattgttccgagtttgttttttttattgtttacgtgttctttgtttcttctgtacttgactcaagtgttcacacttgttgagtaagaactatgaagtggtaatgctattgtgcggccgctcccacttttctacttgtgagctctttttttcttttttttttattaatataacccattttatgacaattaaaaattacaaagatctaaaaggagaaaagtcaactttctaattttgagcatgtggatattttggatgaaagaaaaattatagttttcttatccaaaaatcaaagtacaaataaaaatttaataagaaatttatgtattaaattttttgtaagaattaaatttttaaatttgcactgacataatttgttatttcatttttctaattttttttctgagagcttaaataaactattttaaattgctgtctctaatgcaaaatctctcatcactgtaacatataaaataaacatataagtttattggtatttatggaagatatatttttattaaaaatttagaatatttataaagaaatcttgaagcattaagttgaagacaaaagggcagatatttttttcttttcagaagaaatctcaagggattaattttcaagtgatgagcttatggcaattatattataaagtattttgagtcggaataaattaatgaataaacataattaaataaataaaaaataatcaaaattaatatttgtaatatgttatttatcataattatttgaaaataaaataataatgattattttatttactttatgaagaataagtataatgcttaaattgattaaattgttttttatagttaaactataatatatgatagttattttgtaagacatattttaaagaataaaattggcattgtacagtagaacctctatccaagaatacatttgggaccaagaaaataatattctaattgagaggt

SEQ ID NO: 69755 - DNA, 3030 bp, Cannabis sativa
caacttcatgtcatttgtcagagtgagaagatatcctatactaaaacacctcagcttgatgggggaaagagtttctctgcttgatctgggaagaatgttataaaaagatatgcacctgagatttgattaaaggaaaaagtaagactgagaaaaacaaacgaccagtcgtttacaaaacttaaaaattctataccgctctggtttaaaaggacttacaaacaagtacagttccaagtacagctgagattttgccttgaatagtgattaaaccagctttaccagcatcttgcaactcagtggtaccaacagtatcaaatgttcctacaaggcaagaacttatatcatttctaatgatttttactaacatcaacacagtttaaacaaaatcggtcgatctaattcttacctggtttgacagtttgaaggccggatattatgcatgccacattttcgaacccggcttgctctagcttattagcagcagcagtagaccttgacatcaaaaacaaacagtatcctgtgtcaaatttggttccaaattaggcataaagactactagtcatttagaagaaataaaaagtaattcaattgttttcaaaatgaaagacacaatacatgaaaattttcatgcctacttaactacatcaggaatgaattcatattttttttgtcaaaattgctatcacttattttgttctgcttattcatgaatcaaattatctaacattgtacagtagtttttttttttgtcctgtactctctttcctgctcatcaggcaacaattttgtatctcacaaaacactcattggtatcttttttcattatttctatacatcaagcataagaacttattatgggctaaatatttaatttcagaattacaagaaaaaggaagagaatcaacattttcttacctcaatccttcttgacacactaacaagagtttatttccaggttgaaatttgcttttgacagattgcacaaactcagaattgggtttagtaaatggtaacccaaagaagagacctgaaaagttgttgtgcaaagttcttttcacaattgtacctgcaaaaaaaaaaaaaaagaagcagattgtaataacaagtaatcttttaatattattttaagatacataaaggataccaagtggaaaatatacccaagtcattgtctttgttttcaataaatagaggcacatgataacatgatttgatatgagctctatcaaattgagacttgtctcggacatcaaggactgtatatccctcaactgcaatgagtttcttagcttcatcagcattgacataactcacttctgctctaatcctcaaagctcttcggcgaatcggtttccctaagaagattcctcctcgaatagtaagagactcaaattccaatggagatgtcctgaaactgtcacattcattaatgttaacccaatatcaatctctattgaacacatttgaatggcaagtttatagttccaaatgagagctaccaaatattgtcctaaagcttcagtttgagaactttaaaagacaaggaaacatgacatttttccagtttcgggcagctaacacataattgtaaatgaatgttctttgtcaaagctcaacaaccctttattctactgaaaaaagttagctaattgaaataagaacttagctagttagactcaaaaccaaaccccatcaataacaacagtgtttccagatacttaaattaattttcttctttaaaagaggcagactatatacaaggctggaattaaactgaaaataaacatttgaaaacagtttaccttgtggaagaaagagttgtacaacaagtgccgattcctgccatactcaacttgaagtttctctctttttctctcactctctgtgtcattgttgatatatagccacaaagaatgggcccggtaatttggaagagggaataggtttatgccacgtggcaatacaagtggatatatttctagaatatgttattacttgatactgatcctcatgtggcatttcaaaaaaatgtaagaaagtaattgactctaatttaggatgaaaattaaatgacatttaaatgaatccttatgtatagataaagagattaaaaaaattattttaaaaaataaataaataattaaacaactttgtatttatatatatataatatatactagattgaagttacgtgcatatgcacatatacttagttaatttattttcaaatataatatattttatttttaataattatgtcacatatagtaaaaacaaatattattataaaaatagaagccataatagtaattcaaaaaaaaaaagttactgtttcaaatttcatagaagaaaacatattaataatataaaaaaaaattgaacgaaacactgcctaaaattttaaaaaataaattatcaattattatttaaaatttaaataataacaacaacaatccattaaaccttttaattgaaggcataaacaaagaaaacaaatttgttctaaacaaaatggtatattggcagtagaaagaaaatcagttagctcttacaagccccccaaaacataaaattataaagaaagtacttgaattcctgaaatgaattataaggttatggcaaggcactatgaagaacaaaaatgctaaggtaattataattagaggaactattaattacacaattaatcaatatgtgatcccaaaataattagaaccaaatgtactgatatacaaattgctcatccacaaatcataccatacatgaacaagcaagtgtatgcacataattaattaaaataaataacacataaatatcactgtatattttgtctatggaccttcacttcaaatattagtgaaagcaaggatcaagctagctattgcagtagtttgatcaaacaaataaagatcttttgatgactgttccatttcaagacaattgagttttccacgactgtagaatccacataacatggttttgttgttctcaccacccaaacgagaaataaccttggtcttttcctctcaa

SEQ ID NO: 69756 - DNA, 2588 bp, Cannabis sativa
atagaaccaccaaaattaaatatcgtgctttatatttatagtctaacaatggaaacacttgcctcataccaagtacacaacccaaattgaaggctcaaataaaatactaactgtaaaatccaaaaaataaaatacagataacaatgctttccataacaattgtaaaaatgtgaatctatgatagagaaccattttctcgcttaaaatacaataatagataactagatttctgccatgtgctatgaaaatttgacaaataagcagtgactacctcaactccttccatgcactttctaactccttcgagagtaacaaatttccagaaaattaatcaaaactagcattcaagaatttcagcaattcatttcttttattctccgctgccttgtcttcctttgacttgtcaagtttcaatagaatctacagaacagagagaaacatataattaactgtgctaaagtcctataagtatcccaaactaggcaagataaacaaaccgaaaatgtgtccttacctttttgcctgagactgcacttcgacgaacaccatcatctttttgacgacccaaatactgtatgaagccagaataaaaaataaataattggcatgagctaaacaagtaaagctgaaatgacattaaccagagtgcagtgaaaacctttgaaagctgtacggggctgctacgtctttcatcttgctccttctatatatatctcacattgccaagacattgacccagaaaaatcatccaggcaaattagtcaagagtccagtcatcatgccacagaccccagctccaatttcaaagagccaatccacaaaacaggcagaaacaactataagaatctccaatccaaatatggatgtacatgataaatatgacagccatgaagcatatttccgtttggatgtgtattgttatacatgcatgcctaacggccaaagaacagcacatttcatatggccaaactgaaaaactttaaacagtaccttaaagaaataccatgaactaagtgcaacagcgtattagaagttataaatgtcacatagtttgccatgacgatttaaaaaactctgtgcaagctttgattaatgaagcatgcagggaaaaagaaccatagatcgggcctacctcttttactctatgcttatgccttttatggcgacgattcttggttcgttctttatctttgctctacaaggagaaaggaatggaagcaaatcaatacaagaaaacatatatattgttttgattagaaagatacttcaaataaccaccttcttgtgtttgtcactcctcttgagtttctttgaacgattcgatgtttcattctcactgtccgaagaactgtcactgcaataagcaatagaaaccagttgttatgacttatcaaaacatggatcagccatcaagttcaaactctaaacaaacgattgccaatagtaaggtctgaaggatatttcatttctgcattccagttaaaatgtgggacacaaaaagactaatgtttttcttccaaaacattttttaaaaaaataaaataaaaaaaataaacaggttcataatcatgaatgccaaaggttcatcatcaaagtcatgcactccagttaaaagtagcgtacaagattcccaacacaccttgcatatgtcaccacatctgggtcagctaatgaagtaacgggaaagtagataaaagattattttttttatgtgttaatttatatttatataactcatatacaagaatatttaatggagttaatttaatgcctatttaacgaacaaaacaaacactagacatgattgatcaggttagctcattccgacttttaaaagataagttattacaaattccaatccaacccttacaaaattagtcaacattcattgcagttcaaagaaaattaaaaagtacttgcaataagctaggtttacatctggcataaaccttgactagaattctaaaagcaaaagtaacaacagaaagcattcagcatcgattcggtttgctaggtggtcattcactaccaataagtgagtgaaattaaatcagttgtaaatagctacactcattaggcgaaggagaacctaaatgctactagttcctagaacttcaactacttacaaactcttccccaacttgctataaatataattccaagcattcttctccttgttcacaactttccaaagaccaagacttctaatttcataattgtacttacataaccagtttagttttttttttttttttttgggtttctatgaaacaatcccaattggcctaaaggttatactttcagccgaattaaaaaaaccatgtaaagtaattttttttttttttcaataacatgtaaagtaatacttaattgttgaccagaaaaattctcggaacaatatgttggtaaaagaaaacaaagattgctccaagagatcgctagatcccgaattaacaatcatggttaatccaactgtattgcttcatatcaacaaacaccccaatgaaaaagggggaaaaaaaagacaaatttaaaatccagctaaaatatcaagctaaaaaaaaggtacctggaatagtcggatagtg

SEQ ID NO: 69757 - DNA, 4309 bp, Cannabis sativa
ctgttttagagaagttttaatgctacgagtatacatcgtcttaaagaatccgactgtgttcaattctcactcaaattctatgcttattgcaggcgaagctactcgagtacaaggagcataaacgtttctgctgattgtgttattgatttgcccccaccccccaaattgtagttatattctgtttatggtagtgaataaatatttatttataccagcttcaggccagtaattgacagtcatattggaattatttatttattttttttataattaacaaacaaagcatcgataaattgttaaattaatctacaaatagaatttactacaagcgaaaatagaatttacttctcccttgtagacattattgactgattttacgaacgcatatgtgagttgtttgattctaatgagatgaagaaaagttcagcggcaatttcaattttgggttaaaaaagtaaataaacaaggtttattcttgccacatttatgttactttgtaatgtgtctaatttataattgattaacaaaactagcttcattaattattgaattagtagatgtacaaattgtccaataataattggataataaactagctgaactattcttggattggtataagcaatcctttcttttatagcaattacactgaatactaaataattgaatcaaagaatagattttagtgactatttacagggtggtccctcttgaatgctatgtgaccagactcatccacgtcaaacagtctctcaatgaaaccatcccagcttgccctcaatttattgaatgacaacattgacatctcccctgctgacctgctagaattctccccttcctcattttcatggaatgtcccataaggtgaagatgagatagcatgaggaatatccaaagccacagcccgttgaagggctgccttgtactcctcactatgttctcgaacaagaaactcttgccgctccatcctctgcttttccggaatctccattgttcgatattcttcaagcattaactgaaatgtagagaaatatggttgttggatgtagttaaaacaaatggactagggagtttagagaacagatctgcacagttcaaggccaaggtacttacatcaagagccctttgagattctctctctatccaaataatggcatgatcagttgttgcattacatgaaagcactaagtgctcaaatctcccatccactggcactgctgttcttactactggtggaaatcttcccatcctgcaagtagcaagacctgattagttatttcccacacttgtatctcttattcacctcataagtgctccaaaaccagttaaggtattaatatgtcatatgctaaaaagaaccaaaaatcatgtagttccaattcgacaccaccactcagattctgttaaacttcaaggattaaattgtagatatcacactgtatatcaccatataactcagtctgacaattaaggcaaggagacatgttagatgtaagtcagggaaacattcaatcttacaccataggtaactaacaccctgtagacccacagccctaagccagacccaacatgagagcaccgataaattcatttctctgcttgagtttagtgcttgaaaactacggtcaatctcataaaggtgtgagttaatcatcaaacttcagggaatgctctcattctctctttatagagcaataacagtcttctagggcgactaacattttcagaaacatatgcaatgtccccttatagaaacccccgtaaagaatatcatttcattggaatggactgaggatttgtaattttatattactttcatggttcctcatatcaccacacatcacttgaaggcattgtatgcccatcaaactaacctttttctaattctatgtcacctttgcatctatgaggaggcaagcaattggacattaacactcatcggctagaggagaaaacacacacacacacacacacaaaagaacacagacagacaaatcgagagtagagtaaacaacaaagcatacatcagcagggagcatggtcttacctgaagggtttccgttcaacaatatgatagagacgaccaggggcatatagccttcttgggtctttaagcctctttttctccaatgtacatgtatccttcaagcacattaggcaaagtaaacaaggcaaactgttcatacgaaggaattcagctgaattagtatttcagaaaaaatctacagcgcaagtaaatgcaattaaactgtagtaatagtaacacacgaacagttttcaatataaacagaatgagcatgtgatctattcaacaactgtcaaggcttaggaaaatacttagattgcactatgctataaaattgaactaccagaaaatccattgtaatattctctctgtttaggttgaaatatatttattgtgtaaattaggctataaactggggtcttactctcacagtcgtctagagttttgctttatcattcgcgcgatatcataaaggtcgctgtttagtttgtgcgttcgatctctcactttatatcaccttactaaagcctagcgttggattcattttgctacctggaattcctatgtttttactcttatcaaatgcaaaaaaggtgactcaagacatactatattttaccagaaaagtgatctgaatacatcttctagagcagttgttgtccgtggtaagaaatcatcctgattcattgagaagttattagcacagaaacatgtaacttcaacaataatagacagctaactaattatcacgtaaataatgtatcacacattctatgcttgcaaccccatagcttaatggagtacaagtataagttcatgtttcagttatccaagtgcttctattacaaaccagtagtgcccttaattaggagatcaagatggctttacatatatctcaggattcatattaatgcctgtaagtcaatacagcacattttccctatggcagtacaaatctcattatcttcatagtgtggaatttacatacacattatatttaactgaacatcatatattttgagcaactagtgacactacctgtagtactactgaattaataacatctgcatatctcacagccaaattcagagacatgcaacgagcaggcgctatagcatagcatctgatcctcttcctaacaatggttcccagtttctcaagattttgaagtgccactattgttaacaatgctaccacccctgctcctaaggaatgcccagtaagagtcaaggtatatgtcgggtgtatttctgctaattccctcaaaccctcccactcctcatcaaaaacccgtactgctgccttcagtaaaccattatgaacatagccaccatcaaattttgtttgccccagcttgttatcaagtaaaactgcgtaatcactctcctttgcaagattgaggcctctaattgccagaactatatcagcattctcatgatcaagatagaccatataaggaggaacctgaccctgagtttcttcgtagttttttcttaagattacaaaatcaggatcaatgccatatcctccagggggtgcccaaagcgggttgcgtagatcatcttcgtatacagcaaggattagacgacagaggcggggaatgggctcaaattcttcagcagtagctagaccccaattttcactctcatagccagcagtgtagaggcactttaaccacacccaacgagcacagccaagacagtacacacactcaaggataggaaccccacaggcgattgacatggacgcctatgaagcaaccatgtgaaaagataatcaagttctcaacatcagtgttcagattgaaaaatcaatacactacactacacatccacaggataaactggtaaactgacacaaatacaggtatccaaacgggcatttacatgggtttaaacttgaaatacaaacaaaatcatcaagaaaaattaaaaagaagactgtaagagcatttaaatagctgtcaagtgaaaactatcagcttccacacattcacagatcagaaagccttatccaatgaaattgacagtttatgaaggagtttaacggtgtgatcaatgatctatatatatatatatatatgaggtccaagtgtatagcccgagttcaatcacagcagttgaaaggaaaggtttatagcttgaatttcaggctttcagaaaaagaaaacaagttcgcaatcaacgtgaacgaaatcccatgattggaaaagaagaaatgaacccagattttaaaatccaagcatagacttaaagagagtgacccttacaaaaaaaaaaaaaa

SEQ ID NO: 69758 - DNA, 2063 bp, Cannabis sativa
tgtaaaaagattaaacaattcgcaaaaaataaaaaagtaaattgtaataacacagtaaatgtgattaattatgtgattgttattgttattattattatagtataaaaggcccaaaaggtgtagccggtgaggagaacccaaacgatccagactcgaccgattccaccaacaaaatcaaaatggttcgaaagcgttacgaaccacccaaaacaggtaaatttccccaaaccaattatttttcttacaagttattggagaaatcaaactataattagatatggatgtggagcaaatgtaattttcttttgtctaagttctggtgattgccctccatgtgtttgataaaatgtctccaatggtttcgaatgaaattttgttaaccaagcgttttttttttggaaatcaatgttcagggtgggaatggttcaagtccataaattacgacaaatactttgataaaataggagcaggaaaaagacattacttgttctggaaacagtttgggaagggccttatgtacacctatgccttagccggtgcttgttggtggtacaacgaaacttcgccattggggtggtggtcactgaaggttcagcccaaggaggagcaagagttagcacacttgtatgagaggagggagttcccttatccgggagacaaggaagccatggatgagttcattaccaagggtggaatgataggcacagcaattggtcccaaagggattccagagttggataaagattcttttaattttcacaaagagctgcaggacaagaagctgaatcaggaagctcagaaactatggctcagaatgagaaatgaggtaatttcagagcttcatcaaaagggccttgagattgaatgaaatttggtcattatttgatattttacctatctaactaataaggctttcaactcaaatgtcaataaactattgtcattacctatctaaaacgagctttgagattgaatgaaatttggtcattatttgcctaattttttatgtgtatcataaagatcttggaagttggaaagtaaatgcttttggtggtctagaccctgtgaaacttgattgcaattctcaaagatgaggttgtgttcaataaacttcgatgaagtttatggtcttcattatataaggttttatatttcggtataaattcttactctgctgtcttacatattttcgactggctgaatacatagaagttgatcagacaagttcttttctcaatttattgccaccatcatcacgttcctttcttggatatccaactacttagctctgtttattaaaaggaaccagacaaagtggattcaattatatacttgaagattaccaaagaactgattctaggaagtaccatttttatattaaatgtattataattttatattttttaaattacaacaatctcttcattttacaaaaatgttattattaaataaagattgtctgatatttgattgagaccaagaaaactaaaatagtatttctgcaattatattatgaaatgtaactttaagttggaaaatggagcaacactcggattaaaattctatataacacgtattttggcacctcacagacagctaccaccgcttatcgtcgccaccaaataccactgtttattgttactgtgagcgcgtgtttatgctattgtgttgttgccgtccacggctacaagatgagtctcaaatttttatttatttatttattttttttgtaaagaaacacagattctaagttacatattttggttacaatattcaggttgaagacatttgcatgctcaatttcccaagctgaagtcttgaatttaaaatactgtatggtggattagtttttgcaaaatgaaaaagtaaaaatattcaaatcacctctggaacaatatgttttgaaagaaaaatttagtgaatttcgaaaataaaaagaagagaaagaagtaatattaagttttttaattctcttctctataagtactttcttccatatttattttttgttcaaatttgtaaatttaaaccaaaacttttctcactcccttcgagagtttccc

SEQ ID NO: 69759 - DNA, 2134 bp, Cannabis sativa
atagagataataataaacaaacctgaagggctcgacgagctaactgagttgaacgtatccttcgagcaatgctagaaaccctctctcgagcaaacgaatcatcaagcacagaatcacctccaactgcacgaacagcagctgccatggctgcagcttccctgctcccggcattaggaatagaggaaataagagaagcttcaatctccttccatttacgttcttccttctccaagagagcctttcgtctttctttacctttcccttcctcttcacgtctctgcattaatagttcctcttccatctctttctctcttaaataactgcaaattcatacatacaaaagcatttaaaaacacacaatagtctcattcatatatcttaaaagaacgaaagagattaaagaagaaactaaacctctcttgaatgatctcaaactgcctacgatcctcgggcatccattttttaattttcttggcacttaggtctgaaaacccaatgctatcaaggaaaagtcttaagcgaacctcatcctatcacagacaagtacacaacctcgttaacaagaacacaacactcgcaactttgatcgcaataagaacacacaagtaatgataatcgaaagttagttacctgcactcgctctgcctttgcagtcaaaccaagtaaaagaagcaaataaccaccgaacttatcccacatataaacccactcggtatcaattgcctcttccaaagccaaaattcgtgcatgagcacacatttgtcttctgtgatccacatcaatagtgggctcaaatcgaaacccccttccagatctcagtttgccaaagaatgaccccgcaactaattcttcatttctcaacctatccctcaatttcatgacatctgctctgggaagcgcgaaatttcctcccctatcaagcgtaatagtagggtcgccaactaggagagcagctgaactagccgacctctggggagctgaatacgttccggataaagcatttcttgtctaaatggataacaacaaagttttcatgtaagattccaaacacagcaaaacatcactatatcgacaaattcaaggtaggtaaaaatacacacgcattcaaaatcaagaaattttctcttaccatcaaatacatatagtaattttagatcaaaatttcatcttacacgagtaaaagaaaatacaagaaagaaacggatcttgacagcgtacactaacaagaaattatgcccaacttaacaaaatgcaaaacgagtgcacatacataagcaaagacgaacagtttcttcaaaatattttcaaaagaaattacaacattattcatacctttgtggcagatctagcaatagtttgaataatagtttccttactgagaaagtgaactgcatcttccatcatctaaaaaaaatgacatatttaaacaaaccacaatcaaaaaatgtgtggatgtgcaaaactgaaacgatagtagacagcccagttaataaattaatcatttttgctagtaaggcgaactattgccaatacgtcccacttggtgatatcttaagctttagaaattatgaacggtgtgagcaaaccttgagagtcaagcagggacgagacacagcaaaaccaaacgaaacaacaagagtaactgctgatactgcagcaccagcaaacggaggataaattttcaaacttgcaacaacaccccagccttcggttgccaatgcaatcccatagagcatcagaaatgcaacactgttaaggcattcaagtgagaaaacatcaataactaataatgtcacagcatgtgttaaccgtggtgctatgatcttttagttatacagcaattgcataggctatcgagacaaacctgacattctttccacaatcagcatgagaatcgtaaacatacacagggagaactcggggagagtaaacaacaataggtggtgaaagaagaacctgcacggaaacaatgcaaagagaatatactaagtaacaccgatcaagtgagagcaaacaaaaaatactgaacaaatgaaccgaaagtcacttacagacaatgctctcccggcaagtagaaacaagaaagaaaagtaaccaaccgatgctccaacaaatggtttctctgcaatgacag

SEQ ID NO: 69760 - DNA, 3522 bp, Cannabis sativa
cagcgcaataccaacttttaccagtacaaaaatatgctagtaaaagtgacatttcttgtagtgattgtaataaatatattttttttttgtgcaactcaatattcaaatattatataaaaattgtaacaaatatatatattgtaaaaatcgtagcaaatatagtaatggtctaatgtaggagtattcattggatcacatcttatagaattggacccaaccgatctaatccaattatttattgaatgttaaattttgtcatttgattcaatccaatcgaattaagtcatcccatctgatctgatccgatggatgtattggattggatcggtttcaactattggatgcatttgctggtgttctattggatttgattgaatccatccaatctattttagctatcatttaagttgatttaattaaaaaagaaaaatatataaaaaatgacataatttaaaacttaataatccaacctacatatagtaaacattagtttagtcaaatttaattctcacggtctcataataaaatcgtccaaagttaaaacttatttaatacgcattgttaattttattagagtttaggaagatgagaattaaaattttagatctatgattttattctttaatctcatgtattaaatgtatattaaatcaattaatatattttttaaataaaatatattaaatgtataaaattatatatgtactttaaaaatatataaatataattagatgaccactggatgataattggatcagtttagtcggttattcattggatcggatgtctcatccaacaactgattcgatccgattggattagattttcaaaatttacatccgatccgattcaattataattggatatccgatcctattaaatcgattgagaatggatcggtcgattgtaattagattggatgactttctacacacccctaatctaatggcgacctatagtggagaacccaaaatttagtttggggttgaaaaaataacacaatttctaatttattaaaatactttgtctcgttctattattctaaatactttattaaaaattaatttcctctatcttacctcgtatgtttacattacactaattattaatttttctatatcatttgtataaattatatactttaatatatttattattttataacaattaaataaataattataataatatcacacacttattataaagaaagctttaaaaaaaaattaatataatttttataactctcaataaataatatttctctatatatgctattcgaataaactcaaatttaactcatttgatggaaaactattttcactacttttatttatagttttggaataggtaataatagctcaaatttaatttttgagttgttatttttaataaaatttttcaatttacattttaggggtagagttgccaaaactgttaagggtgttcatccaattcaatctgtattcttaataatttatttatagtgcatcctatccgtgtataataggtcaaattcaatctgattcaatctgcaaaagttattttagattagttactttctaatattaaattatttaatatttatgaatttttttacacataactatcatgaaaataaaataaattattattttatatttccgacaagaaattaaactaaataaaacaaaaaataacaaattttaaaggaaaaaaatatatataataataaaaaaaagtgtttaattttattttaaattagattatccttataaataaaaataaaatatacatttaattttctaagttttgaaatatattgtattaaatgattaaatttttaaattactatttttttatattataatattaattgtgtataatttttttaatctataaatatatatggattgaattatatcagttatatgtcaaataacatccaatctacacgagtgaaaattttctattttctaaattgattcaaacttcactattgcatatatccacaccggattgaattgaatattttatgaacactcttaaaatcgcggtatagaatatcttttcccaaaaccaattaattttttacttcttttgtcacataccattaccagtactatatctatagcttgtataaaaattgaaacactaataattggcgttggaattagattaatattaatggaattatatagttaaagtcccaaattaacaagacccttaagttgaggccttgactcttagcaccatgtttgagaaaagttttcccttaatcagggttagtaaacacatttatattaaataattagtataatatgattgtttattattttgcttaattaatgtcaatcagcttttatatatatttcaatacgtgatcaaattcaatcttgtagggtgaaacagggtcccattattactaatgaagacaataattttactactcttacaattattcttatataaaagaaataaaatgaaacctagtttggaagtggtagcaggcagagaaaatggggagatttgtagtgtgatttgccagcatattgaggtttaccgtcaaacaaagtaactgagataatgatatttgtatatattaatataatggggtcgttttcagggacctatcattccatacttattatatcataaatctcatctgttttactcaactatacatagcaatattattattattattattaggtactagggaactaagccgcgcttcgcgcggtgttgttcaacttttacaattttttattatataaatatattatacttgttaagtgatatgatttaaaatatagtatttttatatgtgtaagtaatagtattgaaattagaaacatatcatttttaaaatatataaagatgatactttgtgattaatattaaaaatagtagaaataacaaagaaattgcatgtgttattataaaagaataaataaaaaagaaaactatttaacaatttaataaattgggtttgtgactaatgatgtagttcttttttaaaaaactatttagacttatttttttctttaatagaaagaaacaatataactatactatttatgaaagtttttacattttgttttataagaagacaactttaaaaagatgcgtcacaatattatttgtttttaaaaacttaaaaaaatagtaatttatataaaaatgttaatgataaaactaatccatatgaaatgtttaataagagaattaattttaataaattatgtagaggtgaaatatataccataaattgtaatgatgaaaaggaaggtcacgattcatatgactaattgcttctatatggaaatatttatttgtcttactattttgtaataattaaaatgataaatatcgtatgaagttggttgtgcaatcgtgtgattgttataattatatcgtgtctcatacaatcattataatcaaatgataaatcagccatgtatatttagacaaaccaaaataaatgtaagaatactttatttataatttagaagtataataattatgtatttttaatccgag

SEQ ID NO: 69761 - DNA, 1943 bp, Cannabis sativa
tccgccgatgtgggaagagctgccgcctccgctggactaactatctccgcccagacttgaagcgtggcctccttaatgaagctgaggaacaacttgttattgatcttcatgctcgtcttggcaacaggtaattaatgaattaactaacaattttcttaattaataaatttatagttataagctaataattagtgctgtttttgtatattgtgtataggtggtcaaaaattgcagctaaattacctggaagaacggacaatgagattaagaatcattggaacactcacatcaagaaaaagcttgttaagatgggaattgatccagttacacatgaacctctcaacaacaacagcaacaatagtattatcccaaatgaagaaataataaagccttgcacagctacaacaactaataatagtattgatcagaaaacagaagaagaagaagaagaagaacaagaaaagggtattattgaccagcccaagagtaacataagcatcaaaactgaaaattcttcttcgacggacaatgaatcatcccaaccgtctgatttaattaacatgtacgatcatgaccctttaatgagttacttattgtcagagaactttctcattgaagattcttcatcatgggattttcctgaggctactactactaccactactactagtactactactgctgataactatagtgatcataataatcattttggggtgtattcttcttcctcatcagaagaaacctcaacttggttattggagagtaacaaggatttattaggggatgatggagaactttgggcttggtttcttcaatgactgcatatatacatatgtatattttataccaatctcagtttaattttaccaatgtgaagaataagtttacatacatatatagccaaattaaacaaaaaaagaaaaggcttattaatttgtgtagacttcatatttgggttaatactactcttcaacaaatcttattgggtttttgtttcaatttgctttgattagtctctttttggttttaataagtactattaaaatacagattatgtgtaaaagcatcaacatttataattgcccatgttgggaacaaaattggggatgctagtaatagtatcatatatgctattactttgaataaagtgaaaagtaaaattattattattaattatttttatccttttcctacatggacgcagcggaggctcaccactatgaacaatttgcagcataaatatctaagtttaattcacagttgtaaaaaaatatctaatttgacaattcctgattagtcaactcattaaatttttatttttttaaaaaaattaatttaaatatactaataaaaatgacgtgtggataatgacttaacattaatgacatgtggataataacttgagtatttatttataactaggagttaaacttaagtatttatgccacaaattagtctagatgtattatatttgatatatggttttgtatatatttgcatcgattttgtatgattttgatgcaaaatttaatatttaattattatttttattaaaatataaaaagataataaccttatcattattaagtaaaacaataataacataaaatatatttatataaaatagtacattaattttattgttaagtatattaataaaataataaaaataatttaaaagtgaataaaaaaaaagtgtatttattttgcatcataataaatgtgtcaaatttaacacaatatttgatatgtgttaaatttatatcactttttgacacactattaaaatatattttttgtcgagcgagttatattttaattttacatcacttatttgtaaaaataaaatttttaaaatactaaatacaaatgctcatatacaaaatatacttttagatattgtatataattatcaatatttcaaaatttaaaaaaaaaaa

SEQ ID NO: 69762 - DNA, 2189 bp, Cannabis sativa
aatatattaaataactctagtctctatgcttattatttaattaaattattctagggagcaggtcattatatgtgtcctgccttagcctaaaagagcagaacagaacagaacactggtccaacaaggcaacaatggtaaatttggccactgaaagagggtcaagtacagtactccttataataagaactagctatataaatatggggaacccttattttaagatgtaatgccctctatataattgggacatagctgtcctcgtcaccaagtaatctggtggcactattttaaaaaaacaaaggaaaaaaaaaagaatgaaaagagagagagagagagcataaagaatatttgttactatcacgattgaagcaaatatatcatgtaaacttgaagcctgtttttttatatttctaaatttacgacatagtttttttctttttataactttacataaatatgatcctaaaactactaaagagctagtacttgtatgccttaaagtcgtcggagctcacattaatctagctaaaataactcatttttaaattttagctaaaacaatattaaaatagtgctaagtgagctaatcattcattataagtaaaaatgtgagttaaaataaataaagtggagttttgatttgagtgctataaatttactttacttagagcactcacattagatattttaaaataaatatttaaagaacttaacaaaatacatgctctaaattctttctctgttttaattcttttaaaaaattgttattcatacataatttacatttataagatattattcattgttataaattcaatagtttttctattttcttcattagttttgtttgtatttgattgaaaaagaattatcagtaattaatttgactttgaaatagtgactgcctaatcttaattcctaaattggaaaaaacgttgaggcaatgaagtttgatagggtaggggagggcctactccttactgtggactgtagagagtgtagagcaatcagagcaaattaatgctaataatcggacgatgagtttgattgattgtctcatgtaattgtgtttgcaccagtaaactggttcgagatgaagtgatttttctttcagaatgtatggttgatcatattattactgtacgttttttgatactgtggaagtaacataagaaagtaaattaataacaaaactagatacagataagcataattacgtgcttaatttcatgtaagctgcaatctctgctaccaaaatatatttggaaaaatatttagtacaaccttcacaatggtatactatgtatctgtttagataaaatttgggaccacgatttagtaaatattaaaatttgggaagtgtgatttagtatatgaacaatcacagaattaataaaattaaacgaaactttgtaaaatgtctttaaattcaaaaatcttaatagttcatgatgttagaatttagtgataagatgaatgaggttctatctcaaaactaattggctatggaaggagtagttcattcatcttatatatcacaatttatttctacacattagcaatgtgagactaactcttaatacatcctcctcacgtttgggcttgaaaagtgtgggtttaacgaacgacctttaacagaccacatgaccgaacatgacatttgaaagaatcccacaaggccaaatattgagaaatttgtgggtgtacacgtcgagaaatttgtgaattttaaaacaggtcaaagaccccaacactgaaaattagcacacaatggaggttaaaggcgagacatcggaagtatctgtttggaccggcaacactttggctcacaacggatcacaaactgctatttagaccggtgacaatttgagctcacaacggatcacaagtggctctgttactatatattagtgcggaaagagaaaaacaaagagagaaacaagaaagaagaagataagggaaaaaaaatgaatctattattcattcagaaataaaatataatgacaaagctatatatagcttgaaaatacaacacaataagttaacaaaattgtaacaaccagccaaccatctctaacggtttctaactaactaagacttaagagtacaaagctgatcctaataagtctaatatatgaagaatttttaagagctaaaaaagttcaaaagatataatttgatatatatat

SEQ ID NO: 69763 - DNA, 3079 bp, Cannabis sativa
aattttatttagagataaatttaacttataaaaaaaaaaaaaaaaatattcttcaacttctcaaaaataaaaaatcaagttcttagtctcagtggttgggccaatgaggactggcggcccaggatgaatgtacgcacccatagcattagcactgatcacataactaccacgtgtcaaatcaacagccactctactaagggtgagtgaggatgaccggatgagcctttgtccaaattttctccttacaaaaaagtgattaaaataaatttataaattaaaactaaaaaccacaaaaataaaaataaaaataaaaataaatagagaatgaagataagacacttgtggagagctcgtggtttaaacacttccactgaatctaagcagccatggcgaaactcatcggacggctgagattgaattgtacagacccaaaccccatataatataattatatttatcccaaacctcacactcctaccttcctcttgtttaacttccactactattcccttaacaaaatccacacattatcctaatcatggcttccctaactatgattttcgctccggcagccggcggaagagtgtttgcagcgacggcagcaaagagcgccggaggaagcaaagaggaggaaggactgctagactggatcttgggagggctagccaagaaggatcagctgctggagactgatcccattttgaagaaggtagaggacgagaagaccggtaacggcaccgggagcaccaccattcgtggccggaagaactctgtggcgatgcctccgaagaaaaagggagtttttggtggcctttttgccaaaaatgatgaatgatatatatgctttgaataagaatttgatcatgattgattggaattgtttcttgttccatttctcgccttgaatccgttgaaaattattgttgttattattaattacggaactctgaactcaagttgtgtaattcttgttatatattattattttttttctaaaatttatatatatttatatccaaagaatgttaatttaggtcatatatgtgatgagctggcttagctgctataataaaccaaaggaacatttttatttatataattatattggttgtgtgtctttttttcaattatcatgattttcgtttgttggatgaaacctttatttatagatgtcatatataaatgaaaattgagatatattctttttgatacgtgtaattgtcttaaactgatacctttcgcctgggaaaataattcatgaatactagtactgctttcatggtctttattaagaattaagataggaattgtttttaataattatttgttacagattggttgatcctagtaatctacattatgatttatgacagtatatatagttcctaaaaatgtactgtcaatatatattatttgtatcaagctctaatctggtgtttagcctttgtagtttgtactcagttgttcatctcttaaaggtacaagttttcaaaaaaaaaaaaaaaaaaagaagcttccttttttgtattgggcctcaaacatttttgtatgatattctatgtgaaagcaataaactaaataagaaatttttttagaaagtttgcatacttctctctgagtcagcttagcatatatatacatcactcagtgatcccatctctcagtgttgtacaacactttctttcaattaattgcttaatacttttctcatttaacaaaaattataaaatgtgagaaattaattgcatagtccatgctttacaataatgttaaatacaactactgaattattattattatttcttttattagagcaactactgaattattacttcctgtatcttcaagcaatgaatgataaataatacataaaataagaggtacagttgttgaattaatgagtgttgtcgttgatcaataattgtagtaaaatcaatatttatgtttttttgatcaatatttacatgtactgaatcaaaaagcagtacaatgtttatgttgataagactaggaacaagtaatgacgcctaggcgctagctaacacatgaaggagcagttcaagaactgtctggtactagatagttttaaaaagcttagaactacttaataaataaattaaaacttttattaaattaaaaacaaaaccccttccgctctagcaacatcttgtgaagatctctactattcaatattcattcatcacacacacactatatatatacatttatatgtgtgtgcatgaaagtacattacaacattgttccctatggattaaatgtaaaagtattgagctatatataaaaacatgggttactctactcatatagccaattagttttgagatggaagctcatgattcttaacaatatggtatcaaagccacattcttagcgggctttcaatccacacctaaattcttaacaccaagtgattgattgataagaatacaagcacagtttatacaaattttctggaaacatattggacactgcacttacacaagaagcaatcatagtaaacaacagggagatcttatatgcatataaacatatagcacatttggtttaaaagcacatgatatggaagtttcatatctctataagaaacagggagatcttatgcatataaacatagcacatttggtttaaaagtatataatggaaatttcatatctctataagaaacagatctggattgagctatgactgatctgaaaaaagaaaatgaaaaaaaaaaaaaatccatgtactctgatctttcatataataacaaaattctaaaaagacattagattaagtagcggtggagtttgatcttgacaaagtacaagaagaattgataaactgaatacaatcctcaatagcttccattctatgagaatcaagaggagccacaaaaggttttgatcttgcagaagaagagttttttcttgaggttgatgatgatgatgattttcttctggtcccagacaccatgcataaaactctagcaacctctccagcaaaatgcttcagtaatcgaaacggagccaagaaggaagattggccttttggaagctggaatcgattattattatta

SEQ ID NO: 69764 - DNA, 4676 bp, Cannabis sativa
aaaagtactgggtggtaacttcttcttggattattttcttcaaatcattattcaggtaggtgtaacgcagtaacgacataaaagcaataatgttcataataataataataataataataatatggaaacaaaaaacatttgcaaagacatgtgttttaatttatacgtacatatataagcaatatagcctgtatgtcgttcttaatgaaagtacaattaagaaacaacaaaatgaataaatttgatgagatgctaagagtgatgatttcatttgaagatttatatcaagcaaacaaaatatgatacgtactgtactttagtctatcagtctatggtattctctcaaattcagcctcgcccaaattgtgtccggacaatgaaataaacatcttttttttttttttgaaaagggaataataatgaaggttctatgtacagtgtatatataataatgaacgctcgatcattaatagttttcatttatatatttaatgtattatttgactctttacattgcatatttgagttcttatactttgaatcaagtgatgacctgagactgtgatatactatacaaaagttccccagtatagttcaaagtttttcctttgcttttgcttgtatatttgtccaaagagtaaaaaaagaaagaaagaaagaaaaagaaaagattgctgccggaaatgatatttattttatcagaaaattccttattagatatgtttacaacattttttgacacatcctaaaccaagcggctaataacatactaaatcaaaacataaatagcatgaaaacaaagggatcgacttggaatttattcttggacatccaaaacagtaaaaaagattaattaaaaagaaaaaaagtgcactatatatatatagtacgtacttagtatatattaataaggactcatatataataatatattattaatgtgggggtctcatgcaacttcggtgcttggtttcttcttggaaaagatccctcctattaatggaatcaaaggcttcttcttcttcttcttattcttaagagaaggatgtctctccaaaatctcaacacctggtgggatcagaacttgttccaatgatggtggatttgcaaaagtgacataccttttcttttggaactcaaccgatgatgatgatgatgattcatgaccagcctctaattgatcattattattaccatacaataatgtgtgttttctaatctcatgatcaaaccttcttgagccctcaacaaacttaacatcttcatgatcaatctcagcagattcatgatcatctacatattttgcttttaattctgattcccggtatttcaattgtctaagctcttgctttgttcgttccagctcttgtttaagagaagataagctatttgccattacctcactttcttctttagctttttggaggctttgttttgtttcctcaagctcagctgtaacgtttcctagctttgatattgatgatgtgccataatccccacctttttcatattctcctccattattattcatctatatgttaattaacccatgcatcacaaattttattatatatcaccatcagtaaattagacattattttaccttaatataagtttattaattagcaaatgtataattttatttatttattttattcttctataggctggaaaattcttacttgtgagctttccagcctttgggaaaaaaaataagaatataaatgataagttattaagggaatatttatgcgagagacatatatccgacatttcttcatttgaaagccaagaagatttgattcccttattaaagattatactatatactaaacttaattattatgttattactcaatatatatctctctcacataccacaccacataaaaatatataattattttcattattattacatatatgtaggactttattccattagcacatgattataataattaaaccaatgaagaaggtaactacattcttctcttctattcagagagagagcatatatgtaatcattggaaaacaacattaacaagcaaaccgtacatatgtctataaagcctttagaataaagaccaatgatgcgtgtattatagattatataatgggatatttttaaaacaaaaaacacacaaaaacaacaaaataaaaaattacaaaaatatagtattttcagaatttttaatatttttacgattttttaaattttatttacataaaatacaattttttagtatatttttatattgtattcttgttaattattttgttgttaattttttttatattattttttatgttgttttgatgttattttcttgttacttctatgtatttttataaaataccgaaaaaatattaaaaaaaattctgaacataaaaatataaattttttacaaaaattaaaattagtgtttgataatttatacttcatcatttcattattgtaaatgcaaaaaggcttcttatctgttactaatattatatatttgggagaaggcctaaaatgttttagttacaataatttgggaaatttgaaggtaaaaaatttactttttttttcacatttaagtatcgattaattttttttgttttttgtaaaaataccaaaacgttactttttcttatatttcagtatcaacttaagtaatataaagtatagtacttgagcagcaaatttaattaattaccactaaaataataaagttatggccatgtatcatcatattattgttctatgttttggtactttcactgctaaaacaataaacttttggtatttaattgtaagtaaatataaagtatagtagccgcaatttatcttatatattttagaaagtcaaaactaaattttaggattttaatataaaaaaaatatttttaaaagtaatttatttttatttataaatatattttttatttttaaaacaatttaaaaaaattaattgattttatattttaaatatataaataactttttctataaaaacaatatatttttttaaaatgaagaaaactaataatattattagaaaatattgaaacaacaattctaaggtaataattttttactaaaattaaaatatattaaaatttattttgattaaaataataaaacggtataatttatttttatcttctaaaagataaatataaaaaaaaatctatgactgaactacttaagtgaataaatttctaatatttaaaaataattttttttacataacaacatttaatatttgaaaagaaattatttgtgcatagaaagttttattgttatgtaaatactaatttattttattttttatattaataaaatatatattaaatgctgctataaatgtattaattaaaattattaagaggcgggcatgacaaaatgtcctgagtatatgattcatggcatgctaaattgttacaacttaattctatattttattcattaccatgcaaattctgtattgttatatatttaatcacacataattctgtatatgtagacatataaattaataaaatcaaaaggtaagaaaaaaaaatctgtagagtgtcttcaaaccaagacaagtggaaaaaaagaaaaatgaatcagaacaaatagaatttatgtaatcctttaaaacaaaattgtagttgtaatcatgtgaagacaatgtcatcaattataataaaacataaattataagaataactattatattacctctttgagcttggtggtactatagagctcccctgctaaaaccttttctccgaacaacgaaacggcctctttgacagaccgaaacggtgccgttgtatcaatctctgctctattcctcataactcgtcttctctcactctccatcgatcgatttttcctgatgagaaaatgtacagtaagatatatatatatatatgtgggatttgaaatatgagaagttaggattaagaattaggaagcaaacaattaaagacgtatatagtagtagtagtgtttggtattatttgtagttacttggtgattgaaaactagtggtactgacagtgaagagagagaacattattatatatatatatttatataataaggttataatatatttgggagcttcgtttcttcgcgtccacttcactagaattctgttcttatttgtgaaaacgaagctggtggtggtggctgccttagtggttgatattttggatctctggtgtggtgtggcccaaattctgagtctggcgagagagagggactgtttgcctaacccaactgaatccactacctaataatacctaattgggctttttcctatgtaaaagcccatacatatattatgctactatttgtagtaagatttgtcattttgaaaaactttactttacaacaccaactcaaaataactgaacaaatcataatcttaacgaacacaattattattaactcttttcctttctcttttttcaaaactactttgcatcgtctatcagttactttaactttatttaattagacattgcttgcaatacttctaaatatcatatcctgtgtatatttaattatccaatcatataatttaattttaataattattataaaatgttgctaactatatataaagtgtcattttataatagtggtaaacacttttggaatcttggatcacatttaatacttttaggcctat

SEQ ID NO: 69765 - DNA, 4118 bp, Cannabis sativa
ttacacatttatttaccatacacacttaatatatattattcacataatattatatattaccacattttaatctacatattattatattaaaaataatataacatacataggtataaatggtataaaagtagataaaaatggaataatatatgatcatggggaaattttgtcatttctctatatattatgcttgtaattatttatttttcaaatatatatttatatataagaataccattattgaagagtatataaataaaagtgagtgtaggtccagactcgactggaggcttttgttgatttcaaaaaaaaaaaaagtttgtttataaaagctgatctacgttggcgtcttgtacgtaaaataacagcaaaaaaagattcttttttaaatataaaaataaataattaatgattaataattaataaaaaagagttgaaaacaaattattattaaatatatgagaaggtaaaaaccgaacttgattgaagaacgtcacactattaatatgatgatatgtatatataaacgcaataggcaatgtgtaatatttattaaattttaaataattcataatatcaaaaataaagtacaaaacaatttatttattttaagaacatataaaatattttgaaaattgtttatacacgcttaataataaattatttttattagtctgataggaaatagaatatggtttaatagatgtataaaatgaatttatatatgatcataataggaaaaattaatgttgtaatttataatatataatattaatatatataaatgtggtaataatataataatgatatagatatatatatacgtaggtagggaaatttgatgatataatacgcaacttgcagctaccgtttctttatttcagtgtttttttctactttatttttgctttagttttcgtaacctctttttggttgtccaaaactaaaaaatacattaactcatatatatatataatataatatcatatttattatgtactgtatatgtatgtgtgaccactacataaatagaaaattattataagtacttaattatttttgttgtttaccatgcatataggttaatttctacatattgtattgtccattcatatatagaaatgtcatatatatatatataactaattttgaaataagttgatatacttttgtaccaatttcaaaaccctagatatatataatcatatgtgatgatcgatcactcttgaaattattatacagaaatttcatcaaggacattcatgtcccaccactataaatatatatatagctatactgtttgtgtatatatgtatatatggttcaaaaatatattttgtgtatgcaagtaggaaaaagtgatatgggttgtattgtattatgtataaaggtagccaatttgcatgggctctagctatctcatttctctcatgtccttctccactttaatatattatatatatttttaataataaaaataaataaatatattcatcaattagtaaccatgatgtatatgtacaaacattaaccatataatacatttcagtttttccagcaaattattatttttctaattttgcattaatatatatatatatatgttaataatatttgtgtagacaatagtaataaagtatgaattgttgtattaattattgttaaaaaaatgaagtatgaattgttattaaaataatttttgatcatgacttaaatgataatatactaattaatatttgtctaacaaattaaaacaattatatatcatatatatttaacgagcttaacaatttattactaaagatgattaattaattaattaattaaagagtactgggtacctaacatccatctcgtgttatattgttttttagtgtaattaagtatcagatttcatataatttaagataataactcttaaaaaatatcgctaactaattgtagaacgtacgctacctgtgaatgttggatggtactgtccaacaacaatactcttagagaaatgctaaaaggtgtctagtactgtgaaatgtaatatcgttattggtgtaatttaatattagatctcatttattttacttaataaaaattaaaaaaaaaaaatactaactataattataggacgtcaaccctacccattaataattaacaatgcatgctcttataaactccacgtatgccctaaagtaaaaacaacattttgtttgatcacttaattactatatataattaactatgcatactagtttactaacccatgcatatttatatatatatatatatagatacatagggtatacatatgttagagatgttggttaattaatgggtggttaatgataatatataattaattaagttagtagtggtctctctcagtctcatttaattggtgaggttccaccaccccatttctacgtacacgccaaggacaatttattagagataagaatattcctaattccttccttctctaattaattaccataattaactcaaactcatatctatgtgtatattaatactccatcataatccattaattgtatttgtttaattattattataatatatgagtgtcatccactacttacttaatttatcttattaattatcaccaccacatattatatatgcatggattatattatcattaattaattatgatatggaaaattgttgaagaataatattgctgacgaaattgagagatcaaatccaaaccaaaccaaatcccactcttctataggattaataatatatatgaatatataattgtatgtaatgggccacaaagttgaaaactcttatataattaattagtatttgatatgaatctatcattaattaacttcaaatttgtgtacgtctcatacacttattagtttatttcatcatcatcatacactaaccctagatatatatatataataggttaagtaaatttccatgaagttaactcatagctcaagcttggccacaattttagttttttatattatttttctagaatatatatgttataattatcaaaggtaattctttcccaaagttgacgacataggtcatttgaaagtcaaagtagtttgtacttaaggtctctaatcaccttcaatttaattatatatttatataagagaaatatttttactataaaaaatcttactttcagttacaaaaatttatgataataaaaataaaaaagttgtaaccattcctatgttgtgactaaaaggtctgtgactaaatgtattagtcacaaaaatcacaatttgttgtgattaaatatatagtcataattgtaaaacttgtatctaaatgctatgttttagtcacaagtaactttttatcatgactataagtcacatttagtcacaaaaagcttatattgtaactaaaaaattgtcactaaatgtagttttttttttagaagtttctatcccactagaatatgttagctttcccaattagtcttagtctcgtgctaccacatcgctcggaataaagtagtgctactctatttataaatgtatgtatttgccactaagatatcaatgtgatgcattgtaaatattaatagataatttatattatttatttaattaaaatatttgaaactggatagtaaattacactattattaataatagtatgttatctattttgatgtttagtgccttaaagtggacccttcacatttttcgacacatcacttgatgatttggtaatttgagcacattttctttgcaaatgaggtgttattgtgttcgaggaaagcgatttgtatgtttgttctttataagtggggatattagttccctcaaagtgatggtactatgacaagattaacaaacacaagcagtaatcagagaaaaatagagatgtacaaagtatgagcaaccagaaataattaaagcagcaaaacaataaaattgacaccaagatatatactggttcaagttcgatagatcgatatgatatatggctctactccaggtctagaataacatcaaatcctctttattgattgagcaagaacatgtacaaatacagtcgagatcgattctctgatgagttctctcaaagtgtttcaactcacactcttacctaagaatctt

SEQ ID NO: 69766 - DNA, 1764 bp, Cannabis sativa
acttttaattttcttttccttttcacgtctttttctttttctttttaatatttcactctcttatcttatcgtagtagtatattaaagagggctgagatcacaaagttaagttgccaactcagaaagcaattcaatgacacaggcacagcctcatacagttagaattagaaaaagggaaattgcatggaccttgtttgggattgtatgatggaaaagttgtcccaactacgtactcaggatattcttttttattatcctatatgaaataaatatactcaatttggtgaacttttcttgcaaattcttgaaatatacatggctcaagaaaaagaaattgtttcatctcttatcctcagaggaattgatattaacaaattggtccctcataatcacataaattctagcttatctgccaatagaagttttggtggctcataccaccattttgtaatattctgcgtgcattgtgtattctaacatgtataataaatataaattatacctgttttatagattgtatttagctaatatatatatttatcaaggtctttcaaagtcaaaagtttcaataactcaaagaataacaaaatatataagttatcctaaatatcattccaaaatgtgggtcccttgtaacagtcatacccaagttttcaaattccatgaaccaatgcaaaacggagtcttatgtaacaagaaactgacttaattcagacaccccaaatctatacctttcttccagtactttggagaatccaccaaagaagaaaagagagcctttccacattgtcttttcctaaagctacccaaacatgccatcttctcaccatcttttatttttaggagaaaattacctttattgaggagtcttagatatatgtactatgcctttattgtcattgatgagccactgatgagtcagagaaaccaaaaagtttagaatcaccaactacttctttagccctttaaatacacctcttcatcaacctcaataggcatcaactaccactactactacaactcatctactgccttcatttcctgagattgaaaaactctcaatacctatcatccacccacaaactccaaaatcatgaagactttaattcagggacaagttattggaattccaattgcctcagtttcatgtaactttgatcagaggagtacttctaaggcactactccttactgatgcagctactcaatttcacactgataaatttcctgaagatgtatcttcaactttgaaaaaaagtaaaattctccttcttaatgcgtataaacatgtatccatatatattatgaatgaatcaattaaaatacatttttccttttactaataaatgacctgaatatattacaggtaaaatacactcagtactaaacagaatgaacaagcttgggaagaaagctgacatttttgcacatggaattaaagaacatggtaagtgatcaattattcttgcttcttcaaaagggtttcaccaagactttgttttggttacatagttgagagtattatatgttgttgtatctaatatataaacttttctttgaaactgcagtgagaatgggacctaagattacagaaactgtgaaaggaaaactgagcctaggagctaggattcttcaagttggtggggttgagaagattttcaagcaattattcagtgtaggagaaggagaaaaacttttgaaagcttctcaatgctatttgtcaactacagcaggccccatagctggccttctcttcatctcctca

SEQ ID NO: 69767 - DNA, 1602 bp, Cannabis sativa
aacgtcttaaagagagcgacattgttcgcgactcagccagattattctatcggtaattcgttccaattttactgtatttaatttcggtataacagaaactgatacttaattaattgcacgtataacaatatagggatatgattttgtcctgtgatatacttttacagaatgtattccgtggtacattagatgggtctcagggtacattaaatgaatgttagggtacgtttctactttttaaccctaactatccctagatcaatctcatctgacggctgtcgtacatcacggattacaatccgtaaaagtacaataacaggacaaaatcatattcctaacaatataatatgataaaaaggtgttaagcatttctctatctctatatattagctatacatgcagtgataataattaatggtgaaatgatcttaggtagatagtcccaatacatcacagtaaatatttcttggttaagtaaaagctagagtgcctttcagcatttctcatattattaattattgattatcatcactacagaaactgaaaagacccatccatacatttgtatatatatctatatatatatatatatatagaataccatccaagtataatttttatctgtatattattattacccttaatttatatatatatatatatatatatatatataatgactactcgtaataataataaagtaattttaactacacaaagatcatcattgggcgaagattatgaaaaggatgaggacttatctccaaattttcatcgtaagatgatgattaattttccttaattattttgtgtacatatttttgagaaatgattataactgcgtatttgttttcaggaagaattgttgtgcccagtcactttttgctcaaaatcgagtcatttcactctctttcaaaagcctcagcagtagttagctacaaatccgaatttgaaaccggagactacaaatggtacaatatcatttctttattagtttttaaattacattttgtttttagttttttactttggttatggcaggcaactaagtatcttcccaaatggggacactgaaaatggtggagaaggtcatatgtctgtttcattggaactcctaaactcaaaatctctccctattggttgggaggtacatgctctcttcactttttttctatatgatcagattcgggaccagtatgtaacctctcaaggtataattatatatatatgtactctttctatttctatcatcaatgttttatattttactctctcaataatattctatgattggttaagtataggtaatgcaaagctaatgaggttccactcaatgaggacaaaatggggtattcccaaatatattgagcttgagacattcaacgatggctccaatggataccttgtgaatgagagttgtacttttggtgcagaggtttttgtggtcaaaaacacattcaaaggagagtgcttatcaatgattgtcgaccccattgagaccattcatacttggaagtttgatgctatttcaacaaagaatcaagaacggtatgagtctgatccatttgttggtggagcctacaaatggtatgtaaaaaaaat

SEQ ID NO: 69768 - DNA, 2103 bp, Cannabis sativa
ttttttttttttttaattttaggattagtagacctttttttttcttagaataaaaacctaaaattctacccaaaagtgcaatatagttctaaaaaaagaaagaaggagatatcattaaaaatttatgacatcgacgatgattgaattataaatacaatctagataattattttgctacttaccacagataaaaaacttaataatattttgagcaacgacattaattatcttaaaacaatgcaaaagatttacattatttaaaaagagtcaaactacaataaatgtctcgaagaattaagtctagcgacgagtctaaaaaatattattgttaattttattgaccacattaaggtagtcaatttcaaaatatttttcagaccaaaccgatagattcccgcatggcgagcaaacaataactttagcccgaaaatatgatattggaatcctgcatgcatgacgacttagtagatctatcttttgattatttgggttgctataataggataaaaattttagcgttttgaaatatgttagtgttactccgtttaatattataaacttctcatagtaataataaatcaacattatcaacacaaaaaaaatttacactacaaatatttttttccctcatatttttagggcggtcgacaaaacatacaactagcttcattcccaattaatcataacattaacatttatcttgtgaaactttttcttgttctgaaaaattgtcatgacttgatcgaaaaacataaaatataatcatctaatcttttctccaaaattctaataattcacatgtactaaaatcacatatttgtttaacacatcacatgttgcttacatatgtacttttatagtttattttgtgtttgaatacataagtacaagtccaacctatggactcttcaactaacttttacacaatacattcctatggctcacatgtttttctatgagaactctaccacaaaaataatatatataaattttgtagcaataataatcttaacaaaatatagatatataatgtgatacaacttaaaaaaaaaaatccaaatattcaaaacagaaaaagaaaaaatgattcttttttgtctattctaaaaaaatatgcaattaattaattaggattactcttaaaaaattgaataaatatttacagtcattgtaaaggtgacacttttaacaaaaataaaaataaacattgtgagagaatctaattaaacaccacacattgtgcttgtacaatcgagaaataatatattttgactgaaaataaataaaatatacattaacaacaagtaaaaatttactcttttgaattggctatgcaaatattaattattaactaacaaaatattattattgataataaattcaaattcaagtgtatagttgaagttacttatacaaaaattagatcaaaaaaaccataacataaataatattaatttaagaacacttatgattactaatattatagaaaaaatataaatccatgtgaaaaaatttatagatattatattagatgtaatttataaaggggtcctacaaattccttccctacccacatcacatgattgaaataacaacatttttcattgtcatacataagtttaaaagctgagcaaaccaattaaagcactttcaagctgccattccaacccaacaaccccttaattattattttttttattttattttattttattttttattttattattaaattacaaaattagaaaaaaattaaaaaaaaaaaaaaagaacaggctggaaacaaaagtttccttgaagctaaattgttgaaagctgtttaagggtgcagtcaatgccttaagccgtgattggcgcctaggaatgacattcccatcttattcttaaaaaaataatcaaaataaaatataagaaaattctactcttgcactatattgtttcgatattcaagaaaaaattttagtttaattttttttttttttatgacagtgtatgttgtagttttttaaaatattttgtaaaaattttagaattttagaaaaatttaattaagattcgaacaatcttttgtacgcatgcttcttttattttgtgcgtttatga

SEQ ID NO: 69769 - DNA, 4266 bp, Cannabis sativa
atattacgtaattgattttgtccaaattcaatgaatataaaatattcatttatcacaaaatcaattatttatttatttccttaaataaaaatattcttataatctctatatttagctaagtattatttattgagctaaaaatatgtaaaatagctaaggtttacgtcactttggtaaaagctcaattttgtaatttttttctctataatttaaaatttgagctattttatcggagtgctctcttgtcaaaagtaagataagatatttaaattttatttttaactgaaattttttaaaaaatttagaactgcttctaaaacttacaccgatcataaaaaaaaaaaacaaattcaaaaagtgtactgataaaactaaatttgttaaattaaattaatataagttttaacgtaggtagtaataattgaagatgtagatgatgcaagagtgccagcaatagagtagtagtagtagtaggggtcagggcagggcagggcagacatgagtgggcacagaaggaaggtgcaagaaattcaacggaaaataaggcaatcgcagtgggaaaccacgttccaaactgaccaactgaaatgtccttttgtactgtgcccttaattacttcaactaacacacattcacacttatgtgtgtatgcattcttttagataaaaataaatattacacaaattttacccaaatttaatacttcttcatcattatcaaatatggaatgttacttttcaaaaataaataaataaataatgttagaaaagcacacgtacgtaaaaccatatttctctacatataatcccaaaaacataactggagtactccttttatttctctacttttaattttaaccataaccatatatcagtgtaacatggttaactttaaaagtatttcttctactcctctatatcttatttattattcttatgaaaccggtggtactaataatgataacatcataatgccacacgtatgcaatcaatatttaaattcaaaagacatggataaaatttgttgatatcaaatttgaattaagtcttttaccaagaattagtagatcgagaatttatgacatgagaaagtaggaggggttaacttgtgaaatatatattattattatatatttatgtgataagattttattatcattccatcttaataccctcatgcacttgtcattcactgctgatcattatataatggcatttctcatcatcaccatcgtgttgatcaaccatcatcatcatcattgtcaagtttcttttttatttatcttcatttcactcatcccataccctttttcttcttcttcttcttcttcttcttctgccttcctcatctcctcaaataagaatccctaaataaataaacaaaattctaaccccacttctccccttcttcagaaaaaccaaacttgttgcattattacatggtccaaaccatggacttatcctctaatccaacaaaaaccacccaagacaaagatacagaaaccccacctctacctcagcccaccaggcctttatccttcacaaacggctctcttaaacaacaacaccgccaccaaaatcaccacgcgctcactcacgcgcctctacccacggttgtttcttaccgggaatgcctcaagaaccacgcagcaaacataggcggccacgccctcgacggctgcggagagttcatgccctgccccaccgccgagccttccgaccccacttcgctaagatgcgcagcctgtggatgccaccgcaacttccaccgccgtgaccagccagaggagcccacctctaagcacttccttcgtagcttccacaatggtcatccgttccaactccaaccgcttcggctgtcttctcagccacgccagggccggagctcaagcccaagtcttagcccaagcccaagttcgagcacaggcccaaccccgagcccacaatcgccgccgccggtttcccatttaccacccaactcttacttcgcttcaccacctcagatgcttttagctctcagtaccggcttctccactggaccaccgtccgataacctcccacatgcccacaagagttttaatccaacggttggggttaaatcttcggaggctactaactattccaacgggaagaagagattccggacgaaattcaatcaagagcagaaagaaaagatgtgtttgtttgctgagaaattgggatggaaaatgcagaggagtgaggagagactaatagaagagttttgcaaagagattggtgttcgtagaggggttcttaaagtttggatgcacaataataagcacacagtggggaaaaaggacagaggattaagccatagtaacaacctcggtgatgaagctagtaatggagataatactaataatgaaggtagaacacttagctatgattcaaaccaggataatgaaatcgttgatgaccagaaccaaaatggtgaggatagaagagctaattttaattttttcgctaatgggtcttctgcttcatcatgaatgtgagaaaatggagggagggaaaaattaaagtccaatgaatcttcttcttttactattgagtcatccatatattgttccaacttccattacattgtattacattgtactctgttttagtgaggttgaagaagagaacagtaagattgcagcttacatggaaccgttattttttttctttctttttgatagaattaaatggaaattctttgattttattcaattctatcaaaacatttcaaatttctagcgtacacattttctagaccaatgataatttttatcactttcggataaacacataactatgtttgtttttacatgatattgcccattatttccttaaaagtaatctgctttccatactaattagttggtccaaaattgaagctatatggcaattttaggtgcaactggtcatgatatcatgataaggcatctgctattctatcctcatgcatttaaaacatcgttttctacttctgcaaatgcacatttatatatgatatatatccccattatatattatctagaataatataaatataatatgtaattctgtatatatatgttctgtacaaaaattacatatggaccaatgaaattgctgtagaaaatggatatatattgtttttagaaaaaaatggatatgtatatatttatctatggtgctgttgtgttgttgtgagcagtaattaattatataaattctctaatgtttggtgcaccttccatcaagcatagccattattgattgacattcttcttgattgcccatttgataaaatactgatttccgttagaatgaggattataggatacgtatttccaaaacaagacataatgtatcaacctctttctcactccaattagtattgctaaaagtaatattaattagaattggctgtctaatttagtatattatcttctgagtatgagcttttaaggcaagcaggctttttctcaaataaagaaaggttgataaaaaccgagcccaaagtactgccacctttccatatttggttggcttaatcaagcggcaagtattgttcttctcatacttgccaatcataatactaataaaataactctaaaactattatattcttatttagtttaatcactaaagattcagtaatcacattttttaaaatattgtagtttgaagatacattacttaattatcttaagaatatagatacatgttggtggtgattgatttgatatacataatgccacgtgtattcttcttgcattgtacttcggtatgtggcagcctgctagccaaagaacaatattttcagtatatatttagccgtttctagcttccaattagaaaattttatcattccaacaaatttatataatttaaaattgaaggtaggaaagaaggggggccctcctaccatattcaactcagctcattcaattctatctcattggagtatttaatttaaatgacttcacttaattagtaaattatgtactagctatgctttttgtaaaattcttttttggcaagttagttgacaaaataactttttttttttatggtaagattgttttgcatgcatactcgatttcttaccttgtgttttcagtttttagttgctcttttccttgttaggaaagttgcacttttcaactatactttcctttatttggaaaattcttgtaagagaagcaattctcttatggaaagttagtttttttaaggaaactttgattattgtattttccttattgatttcgattgt

SEQ ID NO: 69770 - DNA, 2864 bp, Cannabis sativa
aaatacattcaaaatcttaaaaagactaaaatcttaaataaaactagcaatacgtggctcagcacgtacattcacctagtatattttaaaagtatatttatattggtgttgttgtaaattatgcatgcgtaatttttctttatgatcatattattatatattaggttaaaatcgtaataaataatggagatggatctagagggatgagatgaggcaattctttttgtaattaattactttattttattttataattcataatattatcatagctctttcctttttcttttcggatttttcccttagccacacacaatatcatttttattttttattattattaatctttggcaaaataacctttatatatatatatatatttatatatatatatatacacaaatcccgtaatctcagcacacatatcatataaattataaaaatggttgaattattaaaattgggaaaaagagttaataaataggatctccctagttcccactctaagctattgggttttcggttaataaatatatatttctagtttattaaaaaaaaaattatttgtacctcaaataagtacatttattatttaaaaaaataaatttaaatcatttttaaaaattactttgaatattttttttattttttttcttatattgttttatgttaattttaatatttattttaattttatttacatatattttgcctaaattatgtatttattttttttttattttttttttcttagaaatttttatataatttttattttattttttgttataatatttaaaatataatttatttttatttggtaggtatattctttaaaaatataaatagaatataaattagaagaaaaaagttaaaaaagtttaatacaattaaagatataaatttgggaaattaccccatatatattatttttttaattttttttttaaatttacggttagtgtttttaaagtggttgcagcgctagttacaaaatgggtttctatacgatttgttgttataaattaggttgcaacactgattgcaatatgtatttctatgtagaattctgtaaaaatacaaaaaaaaaaactgttttgaagtataaaaataaaaaaaaaaaatcttataaatttataaaaataaaaattattaaaataagtatttttataaatttttaaggtgtgaataaaatttgtggcatgttataatttcagtctacataaattgccacaatagctacatggtaataaaaaaattaggaaagcaagggataactaatatatattatataatgtatatggcatatatataatggtttttaatttagctgcatcccaaaatcgtatactgccatcccactatgtcctaattagctgtatatgttggacttcatttttcttattatatatatgcaaatattataaggcataataataaatatacaaaatcagcatggtaccattttgattttcttttcaaaactttataattatatataacctttaatttccgttttactatttatcagtattatctttaaatggccaacatgacctataaatttcctaaagctacatgtgtatggagcgaatagcttctctcatctctctgctgtccttttgtccatcttttttttttttttggatcctccaaatatcaattaataatattctaaaaaatgtacattatttattttacacttcattttgacctttaataatattatttgtttgatcgtggccagatcaaatattataatattattcctttttctttttaacaatatacaatgatcaccaataatactaattactattaattaaaatatatccacatatattcattaaaaatggtgaatattaatattattatttttttcaataacatgatttcataaaaattaaccaatacatatgtataaaatgtatattatatataaggtaaagaaaaaaatttgatctaaacattcaatatttttactcaaccaacataacatttgtaataaattacaattttgtcgtgcctaatcctttatttggaagttaaattttagtggagaaaaaaaaaataagtaagaaaaatataagaaaaaaaaggagcggaaataataataataaaaaaaatcaatttcgcatatatagtataaaaattatatggaaaaacaattgatttaacaaaattttttatattaaacatgaaaatttctctacctttgatcatgttgttaacaaagagacaccgtggatgaatccaccatcaagtagattgaaattgaacacgacactgcagttaacaagaagaacaatttttttggttttggtacgattcttcgtaacagcagtggtaatattatcgctactatgtcggtacctttcccaggcacctttaaaccagaaatcatggaagctatgactcttatgtatggtttgcaatggcttaaagatcttcgtttaccaactcattttatagagactgattctcttttagtggtcaaaggattacaatcctcccatgcttccacctctgaatttcattgtctgttagctaatatttctcttttagtgtccaactttcctagagtgcagatttttcatgtatttaaatctgctaatactactgctcacttgcttgcaaagtatgctctttcggtgaacactatttatttttggttggaagttgttcctccacctcttaatgcttgttgtattatcaactcttgatttaatataatttgcatttttttcaaaaaataaaataaaaaaaaaacatgaaaattgattttattttattttttatttctatttttattttattttattgtttttttttttttttttttcttttttctcactttttttttt

SEQ ID NO: 69771 - DNA, 2847 bp, Cannabis sativa
aagcatcaaatcatgatactcataagtaccaaagttcaaaccataatataatttgatataagcatcaaatccatttcttgtcaagaaaatcaaatattaaaaatgggatcaagaacagcaaaataaagtgaaccactaactctccaattttaactgataactaaaacaagcgcccagaaagaaatgaagaaacaacacaaaatcctcgaatgccacatgtcacaactaaaggccagggaataaatggagaagcaagaaaacgaatttgaagccaactaaaattctattatagtgaatcgcaatttctaccgcattcaaaaacatgaacagcatacacaacaacgctgcaccttaggctattccctcggatcaataacccaaattttgctttcacatcaaaaacaaaacatctaagattaatgtgctgaaaaaagctttcacatcaaaatattactgttattttcttgtagatcagattaataattattcaagtcccctgattactatagtcgacccaatccatttggattaaatagtattgattactgcctggatatactaaccgtttcttacccaaagaaactttatttgctattaaatttagaataggagaataaaaacaagcattacagggatatacatgagtaagataaagatgcagcatttagaagataatggtgtggatttcaactctttccaattcccgatttgggtaatcattttgaatcccattttctagttaattggtcatacagagtagtaattgcaagttaacttttacctaaacacctagtttaaaatcctactcacaactcaagaactaataccaagaagatgtaaacatgtttaacttcttactaaaaggaaaatagagggctcacttacaaaatcctatctggatgaaagcctttggtgcaagtcctcagccaatgcctgcctcaagctctcaccaaagtaataaaacgacttctcgctgtctagcaccctgggcgggcctccattctcatcaggctccttccaaagctctggttccggctctttggcaatctgacacaaattatgcaaaacacaacaagccacaattgtctgcggggcatgattaagatcaacgttcaagtcctgaagaatcttccatctccctttgagcaacccaattgcatcaactaccacagaccggcctttcataagcatcccatcaaacaagttctgcgctggggtgcccatcccattgggtgaaaatggcgtcagtaagaaaggcatcatgggatagcaccagtccccaacgatgtatggtcgaacaggatgacctaggacattaatagccttgtcccaaacaatgtcgcctgaagtcagtcgattatatagaagactgtcccgaaaatgggcagcgtcgtcagtcccaccaggagccttaacgcaaacgtcccagaagattctcttatggtcagccaccacctgaagttgaacagagtgatatccatatcggcatttgtaattaccagacaaattctggtcatggggaagcttatgaagcttaattgggctcccatcaatggcaccacacatgttgggaagcgaagtcagctcttcaaaagcttgagtagtctcaataagccggcggcggctcactgggatcttgataaattctgggtagagcttggtagcaagtaggcgagtaaccatgttagtgatcttggaaacaagataggggtcaagagaatacctagcagcaacggtttttgcggaccagccatgggagaggcgagaaagcaccatggcgacggcgtaatcagaaggaagtgagagattggagagagcgatatggggcttgagcttctcaacaacggtgatgaagacagggtaggagaggccgtacattgaacgccactgggcatctcggagaggggcctcaagggaccagatgtgctcggtggagagggctcgaaaggcggagacagagtagtctgaggcagaagattttccggcagaggaagagggagggcgattagcggaggacctggcgggggaggggcgagaggaggcgatgtaggagaggacagaggcgatggtgaaaaagaggagtggagctgcggaggaagaggtgaggagggaagttggggaggaagaagaagaagaagaagcggcggaggcggaggtgggtgaggagagagaatcggagagcaaagaagttgttgggtcgagggagttctggagatgtaggagattcgagagcatgagtaggaagggctgatccatcttcttcgagatttttgaatcccaagacagatgagagattgatttgaaagggcccctgggtggaggcggagatcagacagactcaggtcgccaccggaaaacgaaaacagacttttcttttcttctctttgtgcgctggttaaggctcaccagggtttgtaaattgggtcaacccaatcacagctccggcggccggatccgctcacattaatttaaatatatatgtggagaaaaaaaaaaaaacacccttataagattttttttttttttttttcacctatagagtcgtttatttttaattaattggcaataataaattgattgatttaattattaatatagtaaaatttctatttaagaatactttatttaaaaataatctctaaatttttgtaaaagaataaattcataattgaacctctaaattgtaattagttatagatattttaagtccaatattaataaaatatacctttatataaaaataacttaataaaatatatatatattataaatttatttacgtagaattaataattttagtccaaattataatacatatataaatattatattttctcaaaaataatt

SEQ ID NO: 69772 - DNA, 5209 bp, Cannabis sativa
  modified_base (231)..(231): a, c, t, g, unknown or other
cttgagtaagctagatgaatcccttcaccaggaagatttgaaatcctttcgaactagatctaaaccttcgacgactctaatagcaagcttcaccttctttttgtttggcaatccagggatacattcacatggctaattttgagatttggctctgataccacttgttaggaccgtcagacaccatctatttcttcattggtatgatattgtccgctttgggcctaagccctnacgaatttgtttttgggcaccttcccaaaaggcttcattccaatggatatagtgttcatccttatatacccaagatccttcccatttctagccaatgtgggactttggatgtacacccaacatgagtaataatattttctctctcaaatttgccgtcccttttcccatgaaatctgtccctatttataggaatataggttggcagttactctttttgacattgattcaaatataacggttcatgaaacgtggataatccccacgtttcatttaatcacatgtgggataatatctaataactaccaaaccgctctttacttttattttttagacggttattgctgacttggaaggttacatctcgcttgatataagttatcctccttgtccatcttatcagtaaaaaatactaagtgttgaagagtaaatcgtctcgtcacattcctttattggcattaatagtgcgaggtgatcttctcgctctgtttaatgtgaggcagttatgtgttattacatttgtttggctcgagtggatgaatatttccttcttgtctgtatactccgaggcaggcacatgtctcgtcaatcttagtatagttatccttgtctcgcttaagactaaaatagttaacgagttttgaatattatctatcaaacttttatttaataataacgagttatttaatatgcatttaatgatataatattattatatcattagagttgattcatattccttttgtaggacatgtgtcagcttatggagtgtagccaaattttgagtataacaattgccccctaaaagtactttttaattaaaaagaacttttcaaaatgattataagggtataatcgtattaacccatttttgaaaatttgcatgctttgggtttttggcagttcaaaacttcaaggcacatcattagcattaaatgctctgactgttctcatttgtaatgttcccatccgttagatcagatttcttttgatctaatggtggtctataacagggtataaaaatcaaaagtaacagtttatttcgccattttcgcatttcagaccttcaaatatttttttgtaaatcatgattactccccttccaatttgcatgcccttattatcactcacatatttcttgcgcatctcaatcgatctcaagtactgtcccaaagaccctcgaaactcaaatccataatttttgaatctcaatcgctaggctcttctttgcccagaaattccaacctcgagtcacagttgctttttcactaggtgacttagattttgaaatcatgacttcattggttcaaaaatgcaagaccctacagtcacctttgaggctgaattgatcgagtccaaggtcagatccataggatcttatgttggcgagatattaaggtcctatggcatcaaatatgagaaaggttgccaagttaggtccgttgcttcaggggagtttagttctttttcccctgaatgtgtaatttgagaagaagggtgcagtaccagcgagctatctaacataggtgcttggagcctagagcacataagagtcggagcagtactccctctcaaggattactacaaggacttttgcaattatcttgaaattgccctttcagctgattctgagttcttataggattttggcctgcttaaaggtcttcaaccaaattttggggtgggagtgcccaaccccacttgaaattttatatttctattcagtaaaggcctgccttacaaggcggcgacaagcagatggtttttattacctcgggacccacacgaatgatcataggatcatcatgaggttactcaacaaaactaagttcaaagatgatttcttttggatgtctaacctcgccctaatcaacatttttaatttattaattgtagacacttacttatttatcttattttattgaaagcaatttcaaaaaggcctatcccaactcccgagatggaagaatgacacaaaactcttttaggtcttccatttggattgagatcagctgattttttactgaacgaggccaacttgaagacctacaatcttcttggcagcaagcaagctacttgcgactttaaaaatccaaaatattctaagtgggagcaggttccagtctctaatgacaaggaagatagggactatgtggctcgtatccattacttgaaaaacacaacccctcgggaagctgaagaaggtgtctcttgaggtaataattttggtatttttggttggtctcctaccatgcttagggtcaagcaaataactttagttaaatttagggatggccagtataatttttatctctagaactacatacatcaaattgctcataggtttgatagctggtatcccaaatttcatgtccagttaagttgcgatagctcctatttttgaattgccgagcaatatggtataaactctgatagagcgagccatccagactgagatttgtctcctttaattacctttgatctcttcatgatcactagttctagggagtttagtaaatattatagttcttcttcgtcatcaaatgatgattatggtaattttttgagtgggagattacctctccacgttttccttatttactttatgcaagtgctgactctgtcttttgcctcgcagatatatatggattttgagagcctttttaccagctcgggagaaaaaggaaagaagaggattgcagcttcaaagacttcaccgggagcaaacctagagccattaaagatatcaaggaaaatgacggctaataaaaaacgtgcctcgagtcaaattattatcaagccaagtgataatcaagtaatctccccaatcccagctactgagatcctgatgaacaggtcttaggatcaattcaccaggttaagttcttaggttcacaaccagagatggtcttattggagccttcctgcccctttcctagtcatgcaggtatcatcggcttgcaggcctgctcacagtaggctacctcctgctggcgtcattataaatccttctaatagggtgattgggacttgatcaacaatggcaacttcgaggagttatctaaaaggattttggatctctttctctctctcggttagtctctttattcatatcatattttcattatatattctttcttggttatccttcttctgactttatctttactgtaggcatctctggtgtcttacttggcccaccaaagaggccttcagcgaatcaaacagttagaatccaaactttgcaaatcaattgaacaacatgaggttaaggggaagaaatggactgatgctcaattggagaacatccaattgaagaaggaagtcgaggagcagaagagaaatcttaaggctgagcttgaaggtgctcaaaaagaagccaagaatctccacaaagcccaccaaaaagttaaggaagaacttaacgaggccaataaaaaacttaagggtgccgaggccaatgctaaagataggcgcaatatagttgtgaaacgctctatctatagagcttggctggtaatcccaatatggatttaagcttcttggagagtggtgctgcggagatgttggcttattgcgagtgacaaagaaagatgaagccgtggatgtcgaggaggaagaagaagaagagccatccaagtctccaaccatgtggacttggttatcatttcattttttttttatttttagaaaaatggacattaagcggagacaatggttgccccttgtggcattttgtaaaaacttttgcattgttggatgaccaactttgcttatttatatatttttacttttatgcctcacatcttgcttttgagttatatatgtttatttattgcattttatttcacaatctaaatatttctctcgatttagcttaagatactttgagttgcttgcatctccaatgtcattttctttgagatatatgagtagttaataatctaccatgtcttttgcgagcaatttttaatctgccttgttttacgcgagcagtttataatctgctacaccttttagagcaaacttaaaatattttgaataatttactttaggaactattttgaatatcctttgattgcctatatgaatagttaattgtctattcatatatttagctcagtgtataatctgctacactttttagagcaaacttaaaatattttgaataattcactttaggaactattttgaatatcctttgattgcccatatgaataattaattctctatttatatttttagcttaagtattatttttcaaggcatatttgtgtctcgtttataatacatgcctaaaataatgcgaaccgttacatattcagctcgcaaatagctttccgttattttatgagaagatctcacttacaactgctattttaatttttctttttaaagaaaaagtttttcaatttcttggctttatattgttaaaagacaattttaatcaattatcctttcttttgtggaaaagttttaatttttaggtttgcaatatagtatatattactaggtggactctagttattatacgcatatatatgtctgctagtaattttaaaggaaagaaattttgtaattacttgaacaaattttaattttattcataacaatcattaatcattacactgataaatacaacatttacacattaaatttactggtagtaaggtcgtaaatgttcactgttccagtaattctttattaacgagtcgttaagccaagctaatttgtaaatcctagttcctacgacagcttcaatgacatatggaccttcccagtttgggttaaacacttccgcagctggatctcgcgtatttgcaaatacacgccttaacataaaatctcctactttaaataacttttttcaaactctcttgttaaagtatcttgttattcggtgttaataagatgcattggttatttgcgaatcattgtgtctttcctcaagtagatcaaaggagatgtttaaaatagggct

SEQ ID NO: 69773 - DNA, 2561 bp, Cannabis sativa
catcaaaatattattttaaagtataaaaataataaaaccctaaaataattttgtcattatgcttattaatgtaaaatcgtaaattatcatgtatggtaagttggttggtactatgaatatgactgaaagtaggacccaaaatgtataataataaatggccaattatgtaaaacgtcctccttaaaattcctcatcaagagtttttttcgaaaagaggcgcgtaattatcctcatcaagagcttttaaaccattggagttatggaaaatgtgtatttttggtatcctatggtagtaaaagagtaggaaatttggttgaaattagaaatgggcccaatatttatttatggaataattaaataaaatatcatttttttttgttaaaaaaaattacattttcacaaaatttttcttacatttttacagttttcataaaaacaacacaaaaacaacaagaaaattatataaaagtaacataaaaataacatttaaataatctcaaaacaaaaacaaaaaatcaacaataaattaataacagtacaacataaaaagaccatattttctgtaaataaaataaaaaaaaattgtaaaaatatttaaaatttcgtaaaaccgcttttttgtaattttttttttatttttgtgtatatgtgaaataatccctttatttatttctttaccatcatttattaaaataatattttaaattctttttttaaaaaaataatcatcatttttttaacatgttattttcattaaacacaagaacaaaattataaaatgacaaagttattcataaacaagataaagaactattccaaattaacttgttatctaatccaaggctagcctagcacatttgtgagctattttattttgacaccgaggaacatatcaaattacaagtcctagactgaaagatgataagtttttaatacgacttaaaatattacctaaaacaaaactaacattattagaaccacacaacttgtctactactactttcctatcagtttcaataacagcaataggcactctagtgtgctgaatccattaaagagcaagtagaatagcttttgctttagctaagttcggaaaaatattaccactcataggcttgatgatacctgccttaatgttattctccccaccccgagccacaacactcaaactgtattttttttttattttacaatcaattgagtattagtattgatcctcatacttcattgtggtagacttttggatgcaaacctgagtagcttccatcaaaatcttcttgctatattcatcgtgttaagcattaatataactttgcaaataggaattacaccaatcaaacaaagcataatgagaaactgaaggtttcttgagaaataagttgttctttttattccataaaggctagataaaacataagaaagttcattcttatcaaatgtatcaatatctttatttgtaaaatcagtaacattatattatttgttatagcaacatagtaattattaaagttagagtattttcaaacttttttcactctagagcatttcaaaagagcatgtgttgtaaattcagtgaaaatgtcacaaataggatatatgggagaagaaatgatgtgtctatgatataaagaattagcaggcacaacattagaaagaactctccaaataaaatatttaactttaggaagaattgaagaagtccagagcatagtccaaaacagcttagtacttttaattgaggaagaagaggggatatctatagaggagagggcaagatataggtagttttgacacaaaaactccatgaattatccttaccacaaattaaactattgttataatttcccccaatgagaactgttatccgtatttctggcaagggacacgtagatactaaatattagcttaaggcccatcagtaggcccaaatgacataaactgggccaaacccaagatccattctaccttataggagaataataacacaactctcacagtggatttttcgtcaagcctagtcaatatatggaacgtccgtctccgtgtatttggaagagatcctcaacgtgtatccagaagcctatcatagtttcccatttactataacacacaagatcaagaattactttcctaaaatcttggacagagagtaatatcttactaaaaaggaaaaatagataattagaaatcaggtaattgatatgtcattaattacctacgaaggtaggacacggtatgaacaactgtcacagtgataagacttccacgtcagcatacataaggggcctcatgggttgggcttcaccaaataagcccaaagtcaatgtactacttgtaaactccctattagaggggaaatggtaactagtatgacctatatagcactataaatactcactgaatcctattgcaaagggttagaaattcttagcttacttgctcagccaaagaatagagtgctcatactattataaattattttaccaggatctagatttactaccatgtatgttgtttaacatcctaaatatgaattactaaaacaatggaatttaaacaca

SEQ ID NO: 69774 - DNA, 2121 bp, Cannabis sativa
cgcaaattactctaaaaaaatatacacatatatactagtaattataacaggctatatatggcacacgtatatggtaataataataaaaaaaaattatatagtaagcactagctgtcttaactaaatatgctcatatatcatcattaatatatattagcatgtatttaggaaagtatttagccaaataatttaatgattttttttcatacatatcaaaatatcaataagattcattgtaactgataatatattatgtaataaaaatggccaaaaagatgatattttcatcctattattagatatagggttggattttcttctatttgtggacaattccattatctttaatttttaattttatttggttttttatatttttgaatttttttttggctctccatgttgtttgtcatatttattatgaacgttacacaaatgaactgttaatgatttattatgctaaattttgaaatatgtgtttcaatatgtccatgtatacaatgtgtaattcacaattacaaaaataaataaatagttaccatatttgattgttaacatttattcccacattgaaaccctaataccaccttcactatgatttttgtgagtaaatagtaccacaaatagaactaggaagaacacaaaagtattatatttaggatatgttgtctccattttagcacactagctagcttctctccttaggatcttattttttctttttcaactcaacaagccaagccatgacaagaaagaaggtgaagttggcttacatcaacaatgactcgtctcgaaaagccacttataagaagagaaagaaaggcctgataaagaaggtgagcgagctgagtacactgtgtggcgtagatgcatgtgcaatcatttacaacccgtacgacactcagcctgaggtgtacccatctccagcaggagtacatcgtatagtgaaaaagctcaaaaagatgcctgaggtcgagcagagcaagaagatgatgaaccaagaagttttcttaaagcagaagattggcaaggtgagcgagcaggtgaaaaagttgaagaaagagaatcgtgacaaagagatgaatcgactcttgtatggcaatctctctggtaagatgaaccttcaaggcttgactgtcactgatttgaatgatctcacttggcttattgaccagaatttgaaggatattaaaaagagaatggaaaaaatcgctaaggataccaagtctgctcgaatggccgcagctgctgcagctgcaatgcatccacttatgaatggaaaagtgaatgttaatgtgactgcttctgctactgcgtttgtggcggataacaatggccgcagtaataataataataatccagtgaattttggaggaaaagatgtgatttttccattgggaaacaacaacaacatgaactttaactaaatattgtttactcatggcgattatttgtgtttcattttcttagttcttattctcaatcataatgagttatttgtgtttggtgttatactttattctcttgattttgttgttggtcataatcattcttaatattgtctttatgtttttttattatttagtaatgtgagtgttattggtgtggttattatgtagtttcaatgatgtttctattggagtttttcttttgttgtttcgattaatttcatggttttattatatcattataaatttatatatatttaatatatttcatttattctcaaggccattgtaaaaatcaataaataaataaataaaaatcttatattttatattgatacaagacatttcgaagaagcacacctcaaaaataattttacccattttgaaataattaacgtacttaattattactagacaactattgcacatatgcaattaaaggataataagatatgataataaagcttttaactaacagcaataatgccaccagaatcacaaaatatggtaatattaatataattaattagaagttatacaggcctatttggttttgttaaatgtatttactatatagtgaaaattacatgaaatatgggatttcataacaaagttagaaaaatatggcatttttaggtttgccacttttctatggcattttttcacatttaag

SEQ ID NO: 69775 - DNA, 1688 bp, Cannabis sativa
taatacctcttaacaattttccaatcttatcttaaagcccatttttgcaagagatagacagttagcctctaaccaaatgataaatacaaactccaagaatgaagaaaataacatctgaaattacatcactaagaggagattaatccttattatgatgatcattaattagaccagcaacaactttataatttatttcaatgataaaaacattaaaaataggttataaaaaatgcaccacaccaaatgaagagccaataacaaagctctagccactaaaactatcccttttatatatttatataattaaataccaatttaagtcatcttcttgaactccccactaaaatttacccatctttacaaaattataagattaaataattggatattttttatttgaataagcaagggagaaaaacatggtcacacaccacaaattattttccctcttatactaagtgaacaccacacaaaatttctgaaaaataaataaataatagagaatatttacaccacacaatcacactacctaaaaacctaatttatgttcatggagacacatgttaagtctgaaataactcaattatgttttgatatcccaaaaacaatgaagtatatactgtcattggaatagtgttgaaagtaccatttataattgcatttgttatgagttgtgacaaacaagggtccctaaactttctcttaattaattgtatgccccctccaattctagaagtgacagctaagttagataccaaaatgaactcatggctgagtatcctcatcaaattcaccctttcactcttcttcaagaaaccccaaaatgtaaaaaaataaaacaataaaaaattgtaaatatacccatgtggagaaagttaagaagctctgcaaaaaattaatctttcattaacttctatcaccagatccaatgcctctgaccctagctatctatactatctaaccaatgtttcacactttgtatataacagtaccactttgacacatgtaatgtataatctataatgtatgatatcaaaaagatgcctatttcatattcctcaataaataaattattagggcttcaatagctattgacctttgtaggactaatttttttttctttttttctttttctataattaccctttgaaaagttacctaattgggcaaataggtctgccccaatgactgcttggagttgagaaaagtagctttgtgtaatcattttgatttgagaaaaaaaaaaaaaaaaagagttgagaattaatctcttgccattttattgtatgtttaaaactctagagtaaatggtggctaaaatattaaatatttttaaaatgttgtacttatatgtctaattatttattttttaatttttttggagcttaaatattgtatttttataaccaatttctttttatttgttagtaaatatacttaatttttaagttgtataatcttttaatataaatatcgtttcaaatttaaatattaataaagacactatttataatcaaaaaaacaattaaaaaaagaataattacataagacactactttttataaaagaaattatatttttacatttaaatatttttactgttttctgtagaaacaatacgaaaacaacaaaaaaattacataaaattaacaggaaaataacatcaaaaaaataacatacagataaca

SEQ ID NO: 69776 - DNA, 2379 bp, Cannabis sativa
aatctattttactagcgcaataccaacctttgccagtacaaaaatatgctggcaaaagtgacatttcttgtattgtgtattggaaacccactaaaatgtatattttaatgaaatataatttgaagatattttaaataaatggaaaaatatttctcaacttatccccaaatcgtgtataagtacaccaatcgagaatataatatatatatatatatataaaaatatatatcatccatttacttacagcttcaaaattaattaatatatgaaatatatataaatgaaaagaatatacatcaccttgataatttatatgtccattaatttcaatatataatgaatattattgtatgcatgtgtaattatagagtttagattgaagtttctattgactgttggcctaacattctgcaagttggagaaattgctttgaactaaattataggagaagagaatacgaaagctctctctctctctctgatcgatgacctcttcttcacccaccacttgtctagtttctctgccttttatttccaactctactactaaactattattctatatataaccgttttaatttcttcgatcagacattaaactctcccgtcatttcataaacaatttcttcgaaagactttatgtatacaaaatacattatttttacataaaaaaacaatttaaaactaaatttcatttggtaattttttgtcacgtgtcaaatatatacgtacattaagagatcagatgtggcagtaataaattaacatataatagttatcaatattattaataataaattattgatgataaaattattcaaagcggttaatttgacaaaggcgcgcggtttctatttataaatttgactgtttacctgttttcacctacttgttgttaattttggtcatcaagtgcaattatctaaagagttatttggtacttcaattttttctttgttcttgatatcatgaacagatatgtggaacttattaattcattatcactaaggttaatgttaataaagacaataatttaatgtttagaattaatttcttggatttcttgttgtaatagatcttaccaattcgttttccaaacctaacttaatttattggatggtacgtacaataattccttaagacataatatatacaactgaaaccaactatatatctttacagttttaaaccgtttgtctaaaaaggtgaaaaatatgtttccacatataatataataaatggaatagttacaccgtatattaaatttatacttttcctaccttttttatttattaaagctatctataaattttttcttatatatctgtttgtatttttgatatttttttctttctctcttctctctatttattcttttctcttttcgaattctctctctccctctctctccctacactattttttttagagacatactaaaaggcacgcatagtgcctagcaccctcttgtgtaagatcaatattggtgcaatttaatattgagttccacttgtcttactttaataaatattataaaaaattgctaaccaattataaagcaacacttcatcatagtgctaggcaccataagtgtctcatagcaatattctttttttttttttttatctttttatatataaatatatataataagtgtatagttttatatctttttttctaacattttttcactctctcacaaattttattttattatttatttataaaaaaaaatataagtacttattatatttctttttctttcttttacattttcttactatttacactcaatctcttactatttgtctttaattaatcacattttaaaaaaaataataaaaaccttaattaatttattttaaccttcactaaaatatgattctttattttcatactttttctcttattttttttaacactctttctttctctatcttagaataaaattaggagcactcctcctatatctttctctcttttatatcattaataaaagtagtaatttttttggatattttgtagtttattctgaattaatttatgaatattgatttacatattttgataaggttaatgtcttattatttttctattgatttatagatgtctttttgttattttatagttatttttatgttgttgtttgagtattttatagttatgtttttgtacagttgttgtgtagtttatatatgtgcctttttatagtgtatatttttagtttattccacacaatttttttgttgtatatatgtgcatttggtttgttgtatattttgtatagaatattttttaattcagcagttgttttttattcatgtgtattttttatggtgtatatttttagtttagataattatatttagtttattttttt

SEQ ID NO: 69777 - DNA, 2488 bp, Cannabis sativa
ttttttttttatttcgcacacatttaagttgtgttttctttagtatttgaacataaatttttagtttatttttggattatcttagtttatcttagaagtataaagtttaagaaaaaaaaccctataaaaagccagttatgaaattctcaccacaattttgaggtgcctgactcctcaatttattttagcttttagattgaatgataaaagtataattttttaatcctacgggtaaatgttactctaaaagcaaggttactattttttcctgtgaaaactggaagcctagtaaatttaaagttattgttgtactattttacattaaattaattgttaaaatggtcgaactatttcattgtattaacattggtatttttctattgtcgtgtttaatttataaaagaacatacatatattaatgttttgtttattgttttaaacaaaagttttttttcctaattaataagtgtcatttactttttgtcttattgaatattttttctcaaagaaagaaaataatttaataatttttacttatactaagtgtgactattttctctcaaaaaataaaaaaagtgactatttaacaaaaattattggcttaacgatttatttttatttttccgttaaagttaataattaaaactaacaccgttaaatcaatcaattaattattattattattttgaaaaaaaaagaataattttaaatatcaccatttaatttatttattcaaatataactaagacacttatttaaaattatctacaaaattaaataattattttttatataaatcttaatttaaatttaaattatatgctaatttaattaattaatcataatttataacaaatttattagttatattgtttaaaatatttactatgctaatttttgcctacatgacgtggtaaaacatcaattggccttataaagaatgttacagagagcaattggcttgagatctcccatactgactggattttttttctttggaatgaggacaaggttagtatcattaagcccctgaggaatggagttagagttgaaaaaaagttgaaccacatcaactacatctgatccaacaactgaccaaaatttttggtagaaagcagacgtcataccatcgggtccaggagctttatcgggatgcatatcgaaaagagttgccttcacctcatccataataaccgattccattaagacagtgttttgagattgagtaatagagggtgtgatacaatcaactatcacatgcaagtccaccaaagaagcttggaaaatattagaataacagtcaaaaatatcctgatgcaagtcgttgtcccaatcagtcagttcccttgatcatctttaagcttttgaattgtgttgttgttccttctttttgctatagaagcgtggaaatacttgttgttacggtcaccatctttaagccaaagctgcttcaatctctgtctccaatacacctccttttgatggaaaatattagccagtttcgttttttcctcagagaataaagagcacaaatgagcatctcttaactttttgagtcttttcaaggtagattttgattacgctattctacctttaaaatcccctgtaattgtatcccctcacttagccaatatttcactacaataagccactttttcctgaacagagcttccatttttggcttcccaactgtctttaacaagttgaaaacacaccggttctaacaaccaggctgtaaagaccgcatatgattaataccttgaattattaaataaattagggtttatgaatgagattaaattaataattatgaaatgcatattttggaaatatatttattatcatatatgttattatgctattttatgtaaattactcaatttctgtgattgtgttcggaagcggtggaaagcgacgttgggcctttagagagtcgcgtttatatgtttaaattattattggggtatcattgttagataatagaggcgttagaattttcgggatttttttaattgaccattttacccttggtttgttttaccctttgttttttttaaagtggggcatttaagtcttttatcattttggcttgtagtggatactagaagcagccatagtttatctatgtgatagtgaattaattggggagaaaggaaataagagattttccttgtgaactaacctagaaattgattatcattcttcatctctccctctctttctttcgaatcaccaaacccagcaagaaggtgggtgttctttgttgtaatttgtagattctagcaaggttcctaacactttgaatcaaggtaaatctccctagcttttctatttgaattttacttaaactttgaattgagctttatggctttaggctgaaattaggagctgtgtgtgtgtgtttagtttgggttcttagtctgaggttagataatggtagtccttgttgttttaagctgaattagttggctattttggtgtttggttg

SEQ ID NO: 69778 - DNA, 2567 bp, Cannabis sativa
  modified_base (2199)..(2208): a, c, t, g, unknown or other
gaatcttcagaactccttgttaagtaaaccagtagcttctgttgtggagaaactgaagccctatttactgtgagaaggaagaaagttggctcaagagattgttttagtgtacagcagcaaacatggcatacaagtccatggttaggattctatgcttgctacttggttcaaatgattcacttgatagtttagttctcaaattctcaatggttaaaggagtttctaacaatgctgtcataatagaggatgtggtcttgattctcttgagcaaaagtaatctacataattacaactgcagtacgcataaaaagagataaatatatacataatattttctgttagaacgatgcaaataccatcgaatgagtagtgaatgaagttacctctattggagccagattctgcttttgaaatttactcttcttgtaggctatcaccatgcaaccccaccgatacggagcagcccatattttaccatcaggatcaatacacccatcatggttcctgcgtagatatacctgagattcttttagcaaaaagcttattgtggataacaataatgacaataataatgataataatctcatgtgaagttataccaataatattgaagagcaagcttgcttttaaacttggacaactaaaaaaagacatacgtgtcaaagttgaataacattccaactctgtcttatttgcatatcttaatgttgactgtcttttatcccacttttttttaaaatctataacaagacaaaaggataagcatgacatagactagatcaactagaaataagacttacacataatatacaaatattatatatacatatatatatatatgtatgtatggatgcatacttatctggagcatgcatgatgtaactcaaaatttcaataataatttagatgaatatgctactcagaaaagaagaggagacgagattcttttcttactttccattgggtgcttagccctttaaaccagtcttgatcttctaccccttctaggggctcaagtagagacttcttaatagcataactgagccatgagtcaccaacactaaccatatcagctgccacaacagatgacgacccaacattaccattgtcaaagactgttgctagattagaaaagatgccctcaagatttccgtgatacttcaattgaaattttaatctctttccttgggcttgcataaactccttcatgtcaaaaagaaattaaaatgacaaactatattaactattaatgtactcagaaacatggctagcagcagagtagatgtaagcacaaaatagtaaactgaaaagataaacaaaaaccaactgttttgaggtactcaagttaggaactacttgcaacagagatttattcaaactgaagagaaagaggcattttacatatgttcaaattgaagaaaaggagagttgctactgaccttaatccatgaaggaggtacagagccacgtagagcagaaattttcaaaggtacagtcaaagcatacgttttggatttccaagttttgaatgcttcttccaactttttatcatctaaattttccacactatcaactattttcagctcttgattatctgctttgcgtcacaagatatacagttacagttatatcaaccaagccctaaaaaagaagacggcacccagtatctatagagagagagagagagagagagagagagatgtgtatatatatcttacattttgtgcacaaaagcatacaattacaacccaaactcttatacatataagataataccttgagctgattcttcttctcgcagtgtcgaagactccgaaggaggaagtgagggaaattgaactggagaagtagagcaggcacgggccccaaaagcaaagccaaggccaataaagagaactgcagaggcagcgagtcgagacaaaacctgaggagacgaagcctcggtgtcggagtgacaggaaatgaccaccgccagagaatgcaatttgacatggcggcgattggagatcctgatgttgctgaagtgaagaggcgtcaaaggagcgtaagaagaaagagagttgggcaatgagaaacagttttgggtcggcaaagcaaccatgtttgttgctattggttttgacgggtgcttctgtaataagcctgatttctgatataataatgcttcaattttttttcattattattttttattttttnnnnnnnnnnatttaagcgtttatatattacagtcatgtataacctggactcgaaccaacacttccaacacacaccctcttatgatcacttgaggctagagctagcctcaagtagtttttttttattttttatttcttatttttaaataataatgcttcaattttgatagtttgatttgtttgggatttgaaaataattttatgtttttgaaaacttaaaattagtgtggtgttttcaaaaattaaatttaaatatgattttgagttttaagctaaaaaatgaaaacaacaattttatgttttctatgttttcaaatcattgaatttaaaagctcttcaaatactcttttacttttttattttgagatt

SEQ ID NO: 69779 - DNA, 2466 bp, Cannabis sativa
  modified_base (42)..(64): a, c, t, g, unknown or other
atcgttttagaaagttcataattagggtgttaaacaacatannnnnnnnnnnnnnnnnnnnnnnggtaaaataatttccaacagtggtatgatcagaatagaaaacatacacaatagatgagattaacgaagtgcgtgaaaaatgggtctcatatacttatataagtatatgatatgatctagattaaagtttattaattataagactaattatacttattgtcaaatttttaaactaattataatatggattgtgttataaaatttggttatagagtgatacattagatatctatttaatgtataaaaaaatatttttcaaattatatttgaattgaaaaatatatataatcaatataattgcagagggaatctaaaaaaatatttttttccccactagtagacaatctctggaggctactaaaaggccatcaagatcgaccaatctcggagagttgggcccgccaagaaaagtgtcaaaaagtgctaatttaggaaacaaatattcctatcatgacgggccaagctcaccaagattgcataaccaataatagtgggcctagaccgccgagattgccaacaataccagagggtatggaccaccgagataaagtcacattcaatctcagcattgaaattcacagcggtctgaccctgccgagatagggtttttttgtagtgaacatttggtttctttttagatataatttatatatattaaattttagaatatattcatatttaaattttgtaatccaactgatacaaatgcacatattgtattgcattggatattttatgaactcctttcaattttaaactgcaaaaacttgttatttgtatttggttgagtagagaggcacagccgccataggtaaggacaacgacactcccattcttgtactcccttccaaaaggcccgcatcacgtggaaaccatttggagtttgttctggcaccaagctttgtcatccaacgctcacaacaaacaaacaactaacatcaaacttaacacaactattctcttctcacacaaaacgacattttctccgatttctttcatggattggataccctcccaaacaaacaacccacctcctctatatacctacgtctacaatacttgttcttttgtcaaaataattaacaatatttccatctttgccccttcacttccgtacgaatcctggactctctcctcataaatatgcttttaatatttacaccaagaaagaaaaatatgcttttaatattaatatacacgtattattgataatagtatcgtagtgatcctaattatattatacttaatatattttgtacattaccattaaaggtggcgtttggttaattagttgggttaattaacatgatgtggtatatggagggtgagcttaaatgtggagcttaatttggatttttgcggtggcctggctaatgacgtagcttagtacaaaggtttgagtttaacgacaatagtacatcattgtcatatatagctttccataatttcctaattttagcccgtatgacatataagcatcatgaaagatgtcgaaccatttctatggtttaagcgtactatatatgatacacggaagtttggagtactaatatggaccaccgagctagtaatatattagatctcaattataaattttatgttaaatttagatcaaaaaataaattaatattatggttcaaattttataattgtgtttaaatatacaattagaaacaaaataaactttattttaatagaattgtgtataaaatatcaataatttttttttattaaaagtatgtaaaaattttagagagaaaagagtctcattatttacattagtatcagccgaaaatatgtggctgttagaaataatagtcgtagggtttattcacaaagtaaagtgcatgtatatatacacagtaaaagcaaggcccagtgggtcggtattgggccaagagaaaagactttttatttctaatacccatcttcaagatgaactgtataaatttcttaagtttatcttggttaaaagttcatgaaaataagtgggaaaaagagctttggtaaaaacgtcggctatgttgtttttggtggtgacatgtattagcttcaatgtgccttcgtggcccttctctcgaacaacatggcagtcaatctctatgtgtttcgttctttcatggaatacgggattctcaaagatgtgaatggcgactgtgctgtcacaataaagaatggtgggatctttgtggtgaatgccgaagtcccgaagaagagcaacagctaggtgatctcacaagtggcattagccattgcctggtattctacttcagcggaagaacgagatatggtagactacttttttgatttccaatagatgagggtgtaaagacctcttagtttaatttggaaattagtagttaatcatgtttaattatggaaaactatttatagctatttaaa

SEQ ID NO: 69780 - DNA, 1682 bp, Cannabis sativa
ttattctaaaattaatactaaaaataacctttaaaaatgttgccttctgtggaagcattttctatgcctttgactgatgaaatatgctccatgttgttggtctcgctgtcacaggattcgagcaactagctgcttgctgtagtatgcctccatcatcaattctgggaagctagtcaaaacctggaaagcattgcttgtttcggtttcctccacaatttgttttcctttttcttttctctccttgctcacttgttgaaaaccatcagcatcaattattgggtcttttgttgtgttcgctgcaacttttcttccatctattttaactactgattgttgctttgtttccctcttttgacagtcatcagtgatatgtccaatgcctttgcaatggccacatatcataagtttccactcatatgtgacttaaacagaggtatcatacccaacctcatcttcaaaccagataagttatggaagatcttgattaatggtaactactataaagactctaggatagttcaacttgtggctttgctttgttattgagtctacttgtaatggtttgcccaattgccctacaatcttgaataatgacttttctcccaaatatttcatgtccaaatcaggtagttgttatccaaatcgggactgttttaatgtcttcctatttgaagtgattattagggtcccatactttcattataactggtctcttattgaaaaagatgtaccctccattaataatctcaaatctgtcttctattgcacgaaatcccaccagataaactccatatgacagcatccttactctatcttctttggttttccaaactcttctaataaatccctctagaattgaaaatggtggattagcaccaagtacatagcaaacaattgaagatttccaaaattctacttcgccctctatatcttccattgtattcttgacttttcgatccacttcagaattcttgaaagaattggatagatttctcacaacaataccctatcataaaacaggaggagtagtagatttaccttgagatatgttgctagaacattgttgattggctttaagaaaataagtgaaatttgcttgaatgtcctcctgcctctgaagatattggggaaagtggttcttggaacatgtcttgtagatgattaatgtcctacttcagctctagtgactcctcctcatcattttcatcatccaagaaagcaataggttcgatccccatcacctcatcaatggacttagttttcttaatatcaactgtggatgatgggcctctcttctttgattttttagcatccaatatttagatctctcattgacttgcccaaccgctgtgatgccactttacgtggtcacctcaacctgtcatggcaccgattcactaaccagaatcgtgaaatacttataaattccaataaccaattttaactatacatgatcacatacaagattattttgttaataaattctttaataaaattattttgttaataaaagaatatatagagactattttcaaaaaatacttaatggtgggacaacgggataaaggctcaatcacaaagatttatggcatgtttactaaaggggaataggaatcaattgtatgagattcatacccattcatttgtttactaaattttggaatgggagaaattagtgggcc

SEQ ID NO: 69781 - DNA, 4424 bp, Cannabis sativa
tcaacttactaacaacacaaatatataagataattatcctcacacaattaatatcccaaggagagagaaaaaaaattaaatactattttaatctggatattacaagtgatcactatgataaacagtaatttgttgaagaaattgatcagacacaagatagttctcttgaaaactatcaattggccagagatatggttagaagagaaataagagcaccagctagatttggctttgcagattacactacctatgctttaactatagccagtgagattgagaatgttgaacctgccacttatgaagaagttgttagctgcaagaatagagataagtggttacatgcaaatgatgaggaaaaatagtcactaataaggaataagacctggattgttgttagaaaactagagggatgtaaactagtcaattggaagtggatctttagagagaaaaaggggctatcaagtgatgattgcaagagatacaaggccagacttgtatccaaagaatttactaattgaaatcttctcacctgttgtaaaacagacatcaattagagcaatcacggctaaagctgcttctaaggacctagaaattgagcaaatggacgccaaaactaccctctttcatgaaaaactagatgagaccatctacatggagatgccaaaaggctttgatgaagataaagacaaggtttgtctatttatgatctgaaacaagcaccatgatagtgaaatctcaaatttgatgaatttatgatgagaagtggcttcaccaaaaaagtatgacccctgtgtgtacttcaacaacacactcttcctccttctctttgtagatgacatactgctaatatggaaaagtactaagaaaattttaggcattaagattaaaagaagcgtacctgaatcactgactttgacacaaggaaacaacctaaaaaggtactacagaagttcaaaatggacaactcaaaacctatgtcaaatcctttagcagctaacttcaaactgtccaaagagcaagctcccaagatagaataggagagagaattcatggatttagtgccctacgccagtggggttcgaagtttgatgtatgctatggtatgtacaaggtcagacatagcatatgcaatgagcattgttattagattcattgcagatcctgatgagaaacattcggatgctattaagtggataataagatacattagaggctcttaatctaggcctaacttacaacacaaattacaagacacaaactgatgtcttaagctatgaagactcaaattatgcaggttgtatagacacaagaagatccctcacaggatatgtgtttacaatgcaaggaggatgtgtaagttagaaggcaaatctacaaaaggttgaagctctatcctcaatagaagctgagtatatggttgctattgaagtaattaaaaaagttatctggctaaaaggttttgcaaaagaggtgggattcaagacagcctatatcactgttttctgtcataatcagagtgctctacatctaatgaagaatcctatgttccatgagaggcttaagcatatagatattaagatgcatttcattagggatgtaatctcaagccaagaagttcaagtccagaaaattcacaccaaccacaatcctacagatatgtttaccaagacagtgactcaagtcaaattccaacccatcttctacatctaaggggttatggttaactccttctactagactacttggcaaatcaacttctttgttgattctcaaattggcatgaaacaaatcaaggagaattttttgagatatgatctatctcatgccacactctgtttttgttggttagtaattagttgttcgttattagtttttattttttaacttttgtttaaaatgtatatatatagctagctactcattcttccttttgattatatagagccttgcgcagattgttatctctccctctccctctataattctctccattcaaaatcaataaaagtcataattattcaatctcttaagctgaggtttttgttgctgtaattgttcttgttcatagctatcgtaagcttctgatcttgattgttaaggagtgaggttcgatcgcaacaagatagtaaaaaatgatataaaatttttttagtgaaacttaataaaactttcaaattgaaaaaaatatgagatgacacctcattactcttaaactttcttttatataaatatatagattcattacaatttctcaatattattttcatacataaaataaaaatatatatattttttagctactaaattattcatctaaaataataataaatataatcttaagtataagttatcaactctcaataaactcgatatatataatataaatacaagtaaataaatctaaatataagaataatatattagttgaactacaaaatatttataacttgataagtcattaatcaatcacatgtataagtaaaaataaattacaaataatattgtatcacatcaaaataaaaaaaataagagttttatttatagacttcatgagcaacacctaaagtatttttaagcaatgtgacattttctactaataagttagtgaataatgatatgacatttttctttagtgtaaacttaaacctctccaaaaattgtaaaattacattaaaaaatttgagataccatctcattactcttaaactttactttacataaatatattgatatagatattatttttatacataaaaaatcttaccaataaattatcaactttatatatatgaactcaataaatataatatatataaataaatctaaatatataaagaataatatcttagttcaattataaattttttttataagtaattgggtaagatattaattaatcagccttaataaaaataattaattaaaattaatattaacattaaagtaaaaaaaaaaattaagaattttatttataaatttcatgaccaacacttaaagcattttcaagcaatgtaaggtttttactaagtaagaaatgatatgaccttattctttagtgaaaacttaaaactcctaaaaaaattgtaaaagtactattagaggatggaagtgtacgatttagaaagtatgattaggtaattgtatggtaaggggtatgaggttccatcttaaaaccaattgataatgagatcggagtagtccatgcatcttatgtatagtatttactttccacacattattaatgtggcactctctaacatcccctttaagatggtgtctgtttttttttttgcttataaatcttgcacggcttgatcaaaagtggtacttttggctcacaatggctctttttggctcactatctccgaatcacaagcgactctttttagctcgttattggaccgatttttggatttggatcagatacttgttagagttttagtttgactctgataccatgttagagtatgaacgtgtgtagtttagaaagtatgatttggtgagtgtatggtaagggatatgaggttccatctcaaaattaattggcaataagagaagtaacacatacattttatgtatggtatttaatttccacacattattaatgtgggactctctaacaaataatgtaaaatattacttcatcatttttaaatttttcattatataaatatgtcaaaaactaaacataaattatttattacaaaatttcacaaaactgtcctactaatttagtcataaaaattctatttgtgtgaaataataatttccaaaactctataaatatctaaactctctgtgtaacaaaaaaaactttattgtggtttttaattacaataattaagctatatatatctaaaggatctcttctagtatttggattttttacagctatatatttcatcattacaacctcctcaggagatagccttatcttcttctgcttgcataataatactggcaaaggagattattttatatatgatattattatttaaaatgagaaataatatacatgaataataataatatatgcatttaaaaaatagatatattattcccaatatttatttttactaattatgcctaataggtaattaattagcacatatattaatttataaaatctttgtaatttgaacttaagtattgttattaaatattagtagtatattattacaaaatattttgtgaataaatatataattattaaattaaattaaaatatatatcaaatttaataattattcattttttacaataactattaaattataatatatatcaaatttaataatttattatatcaataaaatataacatcttgtagtattggatagtgtcacattaacatttttctatttgttgatatgattattagtaaattaaatgtgccttttgtaatattttttaattttttttta

SEQ ID NO: 69782 - DNA, 1541 bp, Cannabis sativa
aaagatttgtctgaaggttttgccaccactaatggagcccttgttggcaagatgaccaaaacaaagagagcagctcatattattaatttcaaggaagatcaaaaaaatggacattcagatgaaacttcatccaatttgcagaggtctctgaagccaaatgataagcaagagaatgaaaaacccggtgaatcaacagttcagcctgtgaagaagcagccaaaagcttctaggactaaaactcctgtgtctaatgttttggataaggtaaatttgattcctaatgaaatcagaagccacaatgttgggggtgctgttcatttgcagaaaaatactgattctgttttggtttcaaagtcgaccttccaaagatcaaggaccgagactaagcaagaaatacagggtgcagctgagggaaaagtttctaggaagtacaatggagaaatcttgaacagctcaaaacaaaacaaaagattaacaccagggtcaattttcaaggatgatgatgagagttctgaagatgaagaagaggtgggttcagatagcagcacaagaagtccatcagatcacttgatatcagactactcagatggggagagcaattcgaatttgcacacaccgcataatggtaatggagaattttatatctccaatttccctttctgtggattctgaccattgcaatacatgattattctaattactaattgcatcgaacaggatctaataactcgccgaaaaccgaagggagaaacatgagaaaatcattgtaagtaaaatttgaaattatgcaagtcaattttttcgtttatgctatatttgtagaatctaaaatctgttctctatttattattggtatagtctttcaagtacaaagaacatggctcttgatgagatctttagaagctcaagcagattcaagctagccaaacgaacagcagcccagttggtcgtagaagaagagagtcagaagcaagttgattttgtcccagacagtcaaccaatgtagtaaattttttgatctttcttggctgaagtgagtgagatgagatttgctcctttcaaggatatttctatgtcattccatttggcaattccaacgttgtccatttcgtccaattttgatttgttaatgttgttgtggaagtaatgtccttaagattattaatcttttatcctatactagtttttggacgtgctttgcagtttgcacgtgtgatatgtataattatatagatttcacattattatttttattttaaactagtggtggatgcacgtgctttgcacacgtgtttaagataattttttaaggaaattttatttacactctaaattttttaaagacagtaaatacttaattttaagcatttttatttcatataaaatttatatttttttgggtttgtttaaaacgtagtattagattgtattgtattatattgaattgaattataattttttttatttaatacaatattaaattttatttttgttgagtaaactgctagcaaaataaaagaggaacgatattaccgaatgaa

SEQ ID NO: 69783 - DNA, 2161 bp, Cannabis sativa
tggtaatgatgacagctttaaagaattggctggtaaccggcctctgtcagaactgaggacttctgaagaggctgctgctgctgcagcagctgcaccttcagaagctgctcctgtagcagatgtgcctttggaggaaactgttgctgaccaagtagacggagaagaggtccatactgatggtgcagatccatctgttaaagctggctcaacagatgctgaggagttggagaagtacattgccgttagagaggagatgtataagaaagctaaagagtttgattcaaagatcattggttttgaaacagctatcaggaggccctactttcacgtgcgcccccttaatgtcgcagaacttgaaaattggcacaactacctggattttatagaaagagaaggagatttgaacaaggtatttgagctgtgtattttttatacctgattacatctttattatgtagtttttagtagttgtactgttattgtattgacttacagttaagtaatattgctgcttcatatgctttattggctaaatcgttggacgaagcaacctttttttaacgggaaattgaactgagactaaagcatgggccttccataagatttctttaaggctaagtatttcaaaccttcatttgtctgagtggacgttctaggttcatgatgtgtttgtatggtaatttattacttttaaagttccaatgttatgtatgcaggtatcttatgttcctaacctatctgtcaggcaaggagggtccctctttcatatttgaggggcttctctgttccactaacggagtacttcttgtgcatatctcctatggtttttttaatatctttttttattattttattgtctgttggtgcaagaacgaatagaacaatttgttttatctttgttattgttgaatcaggttgtcaagctgtatgaaagatgcctaattgcatgtgcaaattactccgagtactggattcgatatgttttgtgcatggaagccagtaaaagtttggatcatgccaataatgcacttgttcgtgcaacccaagtttttgttaaggtgagattctgtctttttatacctgatccccgccccagctagttgaaatgctatgtgatttttaggtattggacaaactttatttaaaatttaggatgacaacttcaatgttttttttggttgtcatgttatcttatgttacacggctctttgaaaagtaatgaaggctctttaagacttaatttgttgtttgcaaattatcgatttcagtgcttttgaaataatcttcaagttattcttgggactgtatcttccatagagaagagggtataatataagaccagggactggagactctattgtttattgtcttgtaaatttactcttactaatgtccatacatacttccaatgcaattgttttttacagaggcatccagaaattcatcttttcgctgctaggctcaaagaacaaagtggggacactgcaggtgctcgtgctgcttatcagcttgtacattctgaaatttcaccagggcttctagaagcaataataaaacatgcaaacatggaacgtcggctggtaaatttttttaattcagttggttaatgttttagcaatttcttcatgtatattttatgtttgacatgtttgattgttttatttctcagggtaatttggaagatgcttattcattattcgaacaagctattgccgttgaaaaaggaaaagaacattcactggcgttacctatgttatttgctcaatattcacggtttgcatacttggtatggtggacaacatgggttaatttatatatcttttttttcttcatttttctctctgcatgcttggctagtcggttggatactagagttattcaattgtgttgatatgtatctatatttatttattttttcgagaaagaaatctttacatgtgtttcagctcccggtgttggtccgtcaaaaaaagttaatgttggcaaattcgtgagtattagaactttttgacagatgttttagtagtttactctaagaaaccaatttgtgtacttgatcgtgttggcacatgcatgctttctaagtttaatcccattgatggtttatcgccaaggtgatgttgacatttgtttttcattttgttctaggtatctgggaatg

SEQ ID NO: 69784 - DNA, 2365 bp, Cannabis sativa
cagctggacgccttaacacatcccttcttcgatgagcttcgcgaccaaaatgcacgcttaccaaatggacgtttccttccaccattgttcaactttaaagcacacggtatgttttgttattttcctcagacagtttgttttactatagaattcttgtaattgtatttcattggatccactttggttggtttcgagccaagtttttgtccctctaatgttgcgtccggtatttaataatctcagaattgaagggagtttcaatggagattttggtgaagttgatcccggagcacgcgagaaagaacacctcctttcttgggttgtgattgattacttaatatggagtgtaacaaaatgaatgctatgccttgtccttgtgtactatttgttctctgtttatttaatgtaccatcaacttgttctatattaaaaagaagaagaagaagaagaagaagcagatctagatgtattctactacttatcttgtccaaacctctatatgggtattatgtaagaatacatagaagatgaacatgagcatttatctaagccaaaaatatcacctgtagtcctcaatttttgtttgtgataacccttaggtcccactatatatgtattatttatatctataccctctcttttttgtttgtagcatattagtttccaatatttttcatgtttgtttgctaacctttatataatatattaaatgaatgttgatattgaaatttgaaaggtgatttgggcaaagataatggttctattagactacacttatttttttatgagaataaagattgtcctcttaatactcctaatccttgaagagattctcttaataatgctcttagtacactattttaaatctttcattaatgtttgttaccttgtatgctactcaaagctttaattttaacctagggcggcttgtggattgtggtatctttccacaactttaggtttactcaatgtaagactaagttctcttggtgattgctatgattaatttaaggaattgttaatttgcataattgaccctttaacatggaaatttcatattaataatgctcctaaatttgtaatctcttttctcttccaatgttgatcatgcttaccaaggctctatattccaataaacataacctttttataccaaaacaaaaaccttaggtatggatagttttgcttgttattcatggatattatttggattggggaaagaagcaaacttttttatttattattattggtactcattcatactcttgggttggatgaatgagaactagatatcaccaccagaaggggacactaccaccaccacaaaaataggcacatatataaatataaatatatatgataattctacgatgcaacttcttaaaaggaggtattttttttttacctattttagaaattagaagaattttttagtgtaattatttttcatattcgtgtacgttatagatatttaagatattttataaaattttgagattttcgaaataattcacaatataaaaagcattattcaaatagtttattttatattaaaatagtcacgcctgcaataaattatatgaattttattttcggcgtgttaaatttttccgaattcattgaaattttacagaatgtcttaaataactataatgtaaatgttcataaaaaaaaaattaactaaaaaattattttagataacaaaataaataagaatacattagtacattccttttaaagcatggtagaattttccaactatatatatttatatataaacttgctaatccaaagtcccaactactcaaatcacgggtgattgatgaaaaatgcaattttttagtaagagttatttaaggatgaagtttggcaagaaacaattattccacaatggtagttggaggtagtaaaggacttttgaccctttttcatacaacctctaataagtatctctacttgatcttctttgttgtttatttaagaagagtgcttaaaaattctttattacactttttcttacatctttatttgtgaggactattttttttaacttggtagacattatttgtcaaaatttatgtgtgagcatattattaatccacctagatattatacaattattttatattataaataattaacaaactagacatgtttttatttattaatatagtataaaaggaaaaatttctattacaacccttaaaaaatgttttggtagacccctatttatttcgtgactcaaaaaattcttttagtttaattttttttttcatgataatgtgcgttttaattatttaggatcacttataaatttttaaaatattatgaataatttattagaatatttctaattaaggaaata

SEQ ID NO: 69785 - DNA, 2195 bp, Cannabis sativa
tgctccaacaaccgatctgtagagagagggatctaatacttgatcactgccgaattgtgataacttgaggccacttgtcataggggtggagctagtcttggcaccttgcattttggttctgcaaagaagatcttggagatacttcttttgcgatagatgaataccatttgcagtgtgtgtcacctgaatgccaaggaaatagcttagttctccgaggtcctttaaggcaaaagtggagttgagatctgttataagctgagagacttgagtatcattgttgccaacaatgataatgtcatcaacatagaccaagatgtagatgacaagactttgattagctttgatgaagagagaagtatcggtttttgatgactgaaagccaaactgaagtaaagcttttgaaagcttggcaaaccaagcccgaggggcttgctttagaccatagagagctttcttgagcttgcaaactttgtctggaaactgagggtcaacaaaacctgggggttgagtcatgtagacttcctcttcaagatctccatttaaaaaggcattatttatgtcaatttgccttattttccaacctttggtaacagcaagagtgagaaccactcgaatagtttctggttttatcaccggactaaaggtttcattaaaatcaaatccacattgttgatggaaaccttttgcaactaacctggctttgtatatgactgagctaccatctgcactttctttaattcgaaatatccacttacaccctataggatatctgccagggggaagaagaacaagctcccatgttttatttttctttaaggcagtgttttctgagttcatagctgcattccacttaggatcttcaagggctttcttaacagtagtgggaagaagagatgcaatgaacactcttggtttaagaatgccacttttagctctagtttgcattggatgttggttggttacagtggggacattggtagtagtagatggaggtaatatgagttgtgaagaagagtgagatggaatagtaacagagggtgaggattgggatatggactctgtagtgtgtctcgatggtgataaagtggtatgggatgatgttgataaagtagggaaagttatgtcctgagattgagaaaaagtgggaagtatgggaggtgtggcagtgggtagaaggggtgtacttttactggtatggacaggtgacttaccatgcttttggtaaggaaaagcattttcattgaaaaggacatcacgtgacatgtataccctaccatgaggagagagacacttatagcctttttgagtaaggctatatccaagaaaggtgcaaggagtggaccgatagctcattttatttttgttatagggtcttagattaggaaaacatagacatccaaaggtttttaaagatgaataatctggtttggagtggaataacttttcatgtggtgtcatattgtgtaaaactctagttggtagtctattgatgagatatgtggcagctctgtaagcctcatcccagaattttaagggaaggctagagtgagccaagagagttagaccggtttcaactaggtgcctatgtttcctttccacaaccccattttgttcatgagagtgaggacatattacacgatggataatgccactggtttctaataagttggtaaaagacctgaattcccctccccagtcagattggatctctttaattttgagatttaattgaagttcaatttgtgttttgaactttgtgaatgtgggaagagcttcatccttagttcttagtaaatagagccaagtgtacctagtataagcatccacaaaacttatatagtatctatacccattaaaagaatctataggagcaggcccccatagatctgtataaaggacttgaagaggagcagtatagatagtttgagaagtaggatagggaagtttgtggtgtttaccaagacaacaagcattgcaaaggtcaaaaacatttttattgctatgggaaatgttacaattttccattacagacattacagtggctttggctgggtggccaagccgattatgccacaaagaaaaattggaaataggtacacttgagctagaattataacattgaaaatcagcactagttgtagaggaactaggaggcttgtttgacatagcagaggagagttgactggatggaggag

SEQ ID NO: 69786 - DNA, 3915 bp, Cannabis sativa
taagtttactacgtgcgtgtgcaaaatatcacaacaaacttgagaaggtacttattaaagagaatcctgcagatgcaggaactaaagctctctcactcaacattgcttagaactgctgaacatttactccattttaagatagctagatcactccccccgaggttttgtcttgttgggttccatgaattaaggtggtattttttgtttggtaattcataaagcaaacaaattggattataacagttttaacaaacaactgttagtgagttcgaatgctacaacattggtctagtaagttttgtttgaaatgctatagcattcttttatgttagttagtgcacttggtatttagttgagtctttcttttacctatttaaaagcctttagtcatatgggtattgtaacacaattcatactaaattgagagagagtgagattgagttggagagagacatagaaagagaaaaaatgggtgaagaaagttgagaaactggaccaagaccaatgttcttagagttgaaacacaagctaagtttcaaggttattaatctattactgttcactcaacaactcaaacttgtaattcatcaatttaatagagaagatagctcagggaagtaacaagaagtaggccctttaatttggccgaacttgtataaaaatcttgctttctttacattcgttttctgttttttttcttgctattttgatttttctgatatgaaatatttgttgctaatcttgttttgattagtttgattgttcttgattcaagttctttctgtgttgttattatttataacagtatttttattatttattgttaaaatcaattgaagcacaataaactctacatttgtcatactaaaaatattggtcttaccctttggttggtctttacacattaattatggtttagacataattaaaagaaagagagatacacgtgttgcattgattgtttagacactaattttagacatagtattagataggtaatttgaatcctctattaaattaaaatgaacaatactcgatattgaaatatacatagcgagatgacatctcttatagtggttggtagcatttctgatgaacaacactttttttttcaaagaataatgttaattgattagaaaatgtgagtggggtcaccaaactacaaaaaatcaaatgacaacaaaaaacaaatgattttattatattttccctcttgcatttggtacataatgaagagttagtaatgggacctttaaagccttcttccaactacttagtaccttcttctgttgaaaataactacttagtaccttcgagcaacaagatcaaaagaaagttttggtaaaagcttaaaatcatttacctaaaaaaaaaggtaaaagtaaaaaccatatacatttggtgttcattgaatgcattttatccatagctacaatgttattattaactttcactttcagttatttcgtgtttttactcttctccacaagaattatctttgtctctctgtatgaaaaattctactacttatagggacattacaaaagcttgcagcaatcacaacagcatttgcagcagaagccacagaattcttgaaatggaccattcggctgaacttcttcatcttgtattggaggttctacattctgctgaggggccactggagccaatatgtcaagcgtaggagagaatatgagaaaagcatcatcaatatcatcatcatcatccgcaactacgaatctctcttctatttcccacctaattggaaagttaaactgcatctcatagctttcaactaccgtctgtggaaacaccaccaactctgcctcttccaccttctctttccctggtctctgtgagcttttctcaccataattcgatgccactccaatggatgtttctgcagcttctttagatgttccagcaccatcatgtttagacttctcagaagtttcagcatgctgtagctcagacatctcagatgtttgaacaacctctgtctcagacttatcaaaagtttttgcagctacttgttcaggcaattcaacagtcccttcagatttcccggcaccagcttcctcagatggtttgttagccacatcttcaggtaattcagaagtcacttctttagatttcccgggactatcttcttgtgatggttcagctgccacttgtccaggtaatataaaagtaacttttttagattttctggcatcaccttcttgagaccgttcatcagacactcgttcgggtaataattcagaagccacgttttcagattttccgggatcagcttcttgagacagttcatcagccacttctttagacttttcggcagcagcttcttcagatggttccgcagccacttgttcagctaatgatttcgaagtcgcttcttcagattttccagagctaacttcatgagatggttcttcagccacttgttcaggcaatagtttcgaagtcccttctttagatgttccagagctaacttcatgagatggttcagcagccacttgtttcaatcttccagaagtatcaatattttcagatatttcaatgaattcttgagatgcaactccagctcgtatcttccttcttggacggaactggcccttttggattgcactttcaatccatagcttcaactctttgcaaacatcaatcatagcattggtgcacgcttcaatgtcctcctgaaactgaagagccaaagtaaaaaagcaaacatggttacaactctcataaattctgaaaatatgagaagaccaatgaattacagttctcattgtttcaacttgttttaccaatccatagaatgtatctgaactcatttgattcacaaagccagaaaattgtgagggatagagaaatgatgaagctgcaagaaaggctgatgctgcaacaactgaaggcctacatagccttactcggacgcctgtgttaataaaagctcagtacaatgatttataaaatctaccagttcaatgatcaaaaacagaaacaaaattggcaatgtgatgaggagattttactgcgttctgattgtataatgatctgattaatagtgctacgtcgaaagccatagattgtgtttaactttccttccaagtgaggaacatagcataagggtgttacaggacgaagatgccaatcaattcccttgacaatgtaaagctccatagtgaggatttgtccatgtgtaacaacattaatttctggatgctcatcctgtttatataacaagaacaaagaaaggcttgactaataacttcatcatgtaatgtaaggatagtagaaatgtgatataccgatatttattcatacttacaagatactcggtaagaaagaaactggggtctctcatcttccaagcaagtgtaaggcaacagagtgcaaggagttcgagatctcgttgaccagtattcgttacagcctatgaaaacaagagtatctctcagtcaataacatcactagtcactcaatcaagaccaaatacattaaaatcaaagctagtttgaataccttgataacaggagtcgctgacaggtaacgatcaaagtaattcatagcaagatagggaatgactggatcaaagttttcacatctggagtactgcaagaaatcaagaaattttcaaacttgaactctcagtctttccactctaagactgaaatttgtaacaagattgactaaaattctagtttctttctctcaaattcttcgttctttatacatgtgttgtatatgggtcaatttgtaatgaatgaaaaccattataaacaaaactttcgttgtacgatccttataacaatcaataacagagttcagaacattccaaataaagaatagaaacacaagtaactgataaacaattataaagaaagaaaatgattaattgggggtatttcgaga

SEQ ID NO: 69787 - DNA, 1465 bp, Cannabis sativa
  modified_base (30)..(36): a, c, t, g, unknown or other
tatttcctttccattccattccatttcatnnnnnnnaaccaaacgccaccttaaagttttgaaaagttttatcactacacgtactagaactattattataataagaattaaactatttatatagagtcccaaactttaattttattttaggttctatatgccttaagatcaactttaattgtatgtatttcttttgtatcaattaggggagggaactcctccataaaaattattatttatctctctattaaacatacatggtttacgtcaaaaaaaaaaaaaaaacacacatggttagataaaaagtattagatactgctagttgagttagttgattaataggtaaatggttgttgtttattactattatgttatatcgtaagtacgtaacaatttttcgcttaatttttgtttttatatatttttcaacaaacaaaattatatataagtattaataattaggtttgctagattatttttttcacaatttgctctttcttatcacagtttttcttgtcactaactattaatactaggaatagaaacgagacgaacagtaattgagtggggaaggctctctcgtcctcgtccccatccccattagttattttattcctcgcccctgccctcgtcatccctgcatatttcccatttgtgggatgagaaatttccattgtgacagataatcttatgggcatcatttattttaaaaataataaacattataaataaaaaggatggattacatgaaataataatgataatatattatggtaataatataaagtatgagagattgtccaaaataaagtaaaaatttataaaaaaaaaatattaatatattaagaaaattaaaaaatactattagaaaataaaaatcagacggggcctcaatcgagctgagagtgttacccccatcccgccttgtttgatatttgggaatgagaaattatcattgtccccatcctcttctccatttaggcggaaccccccaataggattaggttactgtgaagcccatcccactggtaaaatttctatccctaacttgttcacataactttgtaacaatttctattcattttcaagcacttatcttcttcttttatcttccttaagctctcacatccaaaactctattattaatcattactaagttgttgagccaacaccagtttcgatcacaccagcaggtgtgagttccttctcaccagaacactcacaggttcaagaactgaacctaggattaaggaactcgaatgcactaagactagaactgagaaaatagcatgtcttattgatacttaatgttttacaatgtgttatttaaactagaaagccaattggctatttatagacataggaaacaagtatgacactaactaacataactgtcaaaaacagttatgacagttagtgtcctagaacatagggaatagtattagtaggcacactagagttaaca

SEQ ID NO: 69788 - DNA, 2491 bp, Cannabis sativa
tctccttcttcttgttccctcctccaatgtacaccttttgctgcatgtcattgtaaataatacacttgtcaatttgtatctaaacagaggatttgccaagaaaaattgtgaaaaattatgtaagaaaattagataaaaaggaactgatcagaaagtgttaatataatacacaatgtttgtatcacatagtatgatgtaaattgattattgtaattgttttcaatttgtatctaaacaggggatttggagttccacaaattatcagatcaggatccattacgtatctaaactttattagtactgttcaagaaaattagataaaagaactgattaatcaaagagattgataactttggatacaaataggttttccttcattgtagatactattatgatgtaaattgaccattgtttctattaaaagaaactgaccaatgtaaataggagattagccaagatatagggaaatttaaaggaaaatttaaattcaaagatgtgaaaatttatgtaatacatgatcagatcaggatccactgattaagaagtgattaatcaaaaggttgataaaattggttttccttttgtattatacacaaacatatatgatacatatatatacacagtacaatattttttttttgacgcgacagtataatatttatttatagggaaatttgaaagatagattgattttaaagatgtgaaaaattaagtaagtcgattaattatcaaacaataaatgatcattcagcagaaataataataataattgtaataataaatgatcagatcaagatccattacgtacctaaaatttatatattaatgttcagaaagtgattaatcagaaagattaataaatttgggtagaaaattggttttacttagattgtatattatatataacgttatatacacaatatattatatattaattaattttcttaacatatatagcacacgtgtgagattattatctttgctttactaataagaaacaaacaggtaatcgaaaattaaaaactaattaacaatcaaaatcatcattaataaaattattgaaaattaaaatcattattacgtacagagattaattaaaaacaacaatgaagaactatttcgatttcgatattaccttaactaaattctgcagagtcgcagtagaacagtttctggaccttgaagaagaatctcgactactccttccgccatttttgataacagccggagctgaaactttcaagtaatcttcagatttcactgaaatactcttaggcaatcgcgagtatatatccctatcgtctccttcttcctcatctctgttccaaacaccattaccaaaaccaagacgattctgtaaagccgattgtaacagaagacgaaactgctttctcaactccacattaatcgatctgagatagctattctcgttacgaagagaagaaacctcgactgaaacttctcggagccgattaagacagagactacgtcggttcaccatttcttgacgttcttgaacaagaagagagttgtagtaatagagtctgcgacgacgatgatgatcgtcaatagcggcggcggtggcggtggttgatgagtttgatgaatctgagtcgaactcatcgtctccaccgaggaagaatgatgagtttgatgaaacgacgccattgttgatcgagtattggctttgcatcttcaattcaaacaaatcaataaagctgagagaatcggtcgaagaattttccggggaaaatcagagagaaagtttttctgagagaaaatggttaagagagaaaatgggtttttatagatttctttttatttatttgttttattttttattttttattttttatttatttttggagggaaagagagagagagagagagagtcagttaggcttggaaggagtgtcaattgtgtaggaacaacgaatttcgaaccgttattaagagagaccggaacccattatttttttctaatttcctattttacccttactcttatctatcttttacattaattgaggaagggtattttggtcatttcgatggttttctggtaaaatgtaaataattaggttgaggtgcttggtttggacctgttttattatcatatgataatgatagtgtagtgactatagtgagtgaatataattaataagatttattagtgattttataaatctatgtaacataaaataatggtacttacgtgatatataaaactaaaaaatgcaataaatatttttgttgtatttgatttaactttttccaataaaaaaaattatttatttacttttgatataaacgcacatgctataatgtgccacttttacatagtaaaatttgtaattttactaaataaatataaggtacttttataatacacgtcattaaaataagtgtactgatagaacttctaattatttcagtatttataagaattttttagtttaattttttccatagccgtgtaggttatagttat

SEQ ID NO: 69789 - DNA, 3345 bp, Cannabis sativa
gtctgtctgttgtaaaataataatcacgtacatgctaaataatagaatttgggtacaattttttttctctatcttctcattggtcgaataatattctttatagtatgaggaaaaatcaagccccggtatattagaattcccctatatttatatatatactattgaataactatattaaaaatgtaactatgataattaattatatacttaaaataaattaattttttaattaaaatatttaataaaacatttttcacaactaatatttataatatttttttatttataaaaaataaataaaattaagttagtattaaagttataggtaatttattaattacttttattttatttttaatttaatcataaccagttaacaataatttaacaatttaaataaatacaaactatcttgattacatatttaatataacaattcaaactttctctatatattgttgtttgtaatcttatttgccttctatttgttggcacacgccacactatggtcaaaacacaaaatcatttttaaagaaaggttcaacattggaacataaccgagttgagaaaaaaaaatcaaagaaatagaagaacatattttgaagaacctcatcaagttatttttggatgtgcctaaggttacatttacggcacataagagcacacacacttggagaaagtcggatatggaacatgggcaagatcacagacaccaatatataaggtaactaggtaacaatatgtaaggtaattatctaaggtaaccagacacctaatatataagatatccatgtacccaatatatagggtaataagatacccaatatataaggggatatagggtaaccggtacccagtataaggtaactaggtacccacataaaggtagcccaatgtgtagtgtaactaggtacccaaaatatagagtaactaggtaactatagaggtaaacatgtacccaatatataaaatacctaagtacttaatacataaggtaactatcaataaccatgtaacccatatgtagtgtaactaggtgcccaatatatagggtaactaggcatccaatatataactcactaggtaccaaatatttaaggtagctatataggacaagcatatacccaatgagtaactaggtactcaagataattataaggtacttactccctttgaacacatttttcttttaaaaaaatgcaaatgtatagggtaacgaggtactgtaatcaaagtaagcaatagttaaatccaagatttgagttagagctaactgaaatcaacaatacatccaacttttgaataaatcaattaactagttaattttattgcacactagtgactagttactactttaaaacttgaaccaaaaggcttattgttaagattttggtagactagtagtaccatgattatcattactaaaactagagaacatattgtttttagattttgttaaactagtaacaatgacagttttgaaaattgaaaaattagttctatttattgtactctgttctttcagtatcaagaaaatagattttgactgtgttctatttattattagcaactgtaataaatagcttatatatagatatgattattcattaaacttattttatatatatatatatatattttgttgtatacgtgtgaaatattattaatttaataaatttatttgtctgtataaaacaataaactttaaaagtatactatatcaagaaaaaaaaaactaatatataatgcaatgtaaatattgaagtaaaatagaaaaaattagatttttattgtatatattttgaataataaaaataactaatgtgagtgtattacaattagagagaaaagaacaagaagaaggcaaataatgaactctgttttatgatttgcaagagttgattacagagtctatacaaaggaagaactatatatagctcgaatacacaatttctagttagttgcataggatataacagaacaactaacttctaacaacttgcctaactaactctaactaacaatttacttatgtatagcttaatactccccctcaagatggatggtatatgtctaccaatcccatcttgtcctttaaagtcttgaattgattaggtagaactgccttggttaacatgtctgcaagttgatttttggtggaaacatgtgaggttttaatcagaccttcctatatcttttgtctgattaaatgacagtcaatctctatgtgtttcgttctttcgtgaaacacaggattggcaccaatgtgcaaagttgccttgttgtcacaaaacatcaaagctggacctttgtgttcaaccctgagttctttgagtaatgacaacaaacaagtaatctcactcactgtgtttgccatggccctgtactctgctttagcagatgactttgaaactatttgttgccttttgctttttcaagagataattgaatcaccaagaaaacacaaaagtctgtagttgatctcctagtatccacacatgctgccgagtcagagtttgtgtaagctttgagcaatacttcagatgtagcagggaaaagaatcccatgtcctggacttgatttcacatattgcaagaccctttatgcagcttgaagatgtccagacttaggagcagtcagaaattgacttagcttgtttactggataagctatgtcgggtctagtgatgattaggtactgaagttttccaatgatttttctgtacaatgtaggatcagccaaatcatccttttcatcttgtgcttcttgtgatagtttcaagttcacttccataggtgtgctaacaggcttagatccaaggtatccaagctcttcaagaagctgaagagcataaggcctttgtgagatgaaaattcctttcttgaacctagcaacttcaaatcctggaaagtactttaagttgcttagatccttcagcttaaacctgttgtttaacctaattttgagtgtttctagctcaccaatgttgttgcttgcaagtatgacatcatctacatagactagtagaatgatgaaacttgcagaagtgaatttcataaacatggaatgatctgttgtagagtgacagaagccttcttcaacaagagtagtggaaaaattttcaaaccactgtctagaggcttgccttagaccatagagattttttgagtttgcacataacatttggtggtagtttggtctcccccttaggactataccaggactatacccagaaggaagagtcataaagacatcttcatgaagatccccatgaagaaaggcattgtttacatcaagttgatgtaaatgccagccatacacaacagcaagagcaagcacaagctt

SEQ ID NO: 69790 - DNA, 3166 bp, Cannabis sativa
taatgagccataaaaaaaatgataaaaataaataaaaataataaatattaaataataataaaaaataaaattagtttcgagagggtttaaggggtttaactttaagcagatccatggagccacaatttccttcccttcccttcccatgctacaggcggcctacgctcattgaattcaccctttcttactaatcccaccgactttaactcctctaaaacctccgccaaaccgaccatgtccgattcagactctaaatcctccgaatctaaaaccctagggaattcaacgcagtcttcggatcgcccaatcgactcgggcccccaagaaggagagaaacctcgagaggatccggccagctccgatagtggagaaggagatgacaaaggaggagagaagggggaagaggcggaggaggaagaagaaggcgagtgtggattctgtctgttcatgaaagggggtggttgcagagagagctttatcgcttgggagaattgcatcgaagaggccgagaagaaaaaggaggacatcgtggagaagtgctttcaggtgactggcgacttgaagaagtgtatggaggctcacgccgattactacgagccaattttgaaggcggagaaggcggccgaggaggaggtcgccaaggaattggaaaaagaagaagctacaaaggattctgaacagaatgcggcgaaggaggatgaattgggaatagaagaagctacaaaagattcagaacagaatgcggctgtggctcaggcttcagcttccgattcggacaattcccaaggcgtttctgctgagaagcatgacgggtagtatgtttttccttttttccattttgaattacacaatacagattattcttttagattttaagaggtagtaaaattaagaaagaggaggcccttttgctgatttcacgaccttctgcttttgcggatgcaaaggaaaaaaaaaacaaagacaaaacgaagagtttagaggccttacaggccatgagaaaggaataaaaatttaagctttaactggattcacttgtcaaataatttgatactggaagatttggtttgtgttattacgttacttaattttatatcgatcttcaaatttatactactattgcaatgttgttgttttcataatattttctgaattttgtgttactttgagatagattctgtattgtacactagagttctgcttgaatactaacccttaaagttttgtaatttcgtgatctttggaaagaactaatctttctgggtttcgtagtttgtttaatgtattgcatttaatttgtgtttttcctgttctttatgtgtggaccaaattgagttatagcgttgtagactttggattgtcttgaacctattgtagatggtctttcatggtggaatgttagaccaactctttttcttactctttacactataaaaatcttattacagattaaaaaaacaaacttatattaggaaattatgaataacctctagggcattggtgtagtggcaagattgacttgaatatgtctgactttggcacacatctctagctccattccttgtagctacacaaaactctgtcgtccctcgcgacctgctgtggcgacgagtgggattctgtgggattagatggggcgtcgtgacaaccacagctataaaaagaaaaaacaaaataaagaagagagaataaaaatattgctatcactcctgttttttcttcttttagtagtttacttacttcgatacaaaatttgaaattttcacaatgttgctgtgttctctggaactagtgaattttgtagtatagaagatcgaatcaatcttattcccaaaagagtgccatttttattattattattattattacaatgcattagattcatctgtttttaggttctaatctctgttggcaaaataggttaaacatttccatgctttcttgtctcctgtatgtgtcacgtgtgtacatgtcaagattgttttttttattttcccaatggaccatatcacatatttgtgtacatgtcgtgattgttagttcttaatatggctatgttctgccgctattttgtttaacatgtgttagtgttagtgctaggcgaatttgaggcctaacattaacctatggcagtcagtcaccttaaaattaaaacaaataatatgcataccatatgagataacacacttacagacatcagtgattttacgtaaaacatggaatatgaattgagtacattaatctcttacagctacaaaaattgaatatttgtactagccttaaatactttctttcgtaaaatcctaatgagtttttagggttaattttttgtgatgatcaataaatatggtttctaactattagggatgaacatggaaggggcggtgcaggtatgcattccttgctccatctcagcaccctattatttcccttgttttcgcttagtcgctgtctattcctagtcgaggaacagagcagggattctccatcagtaatagacgataatgtggattgtttctttaaaaaaaaaaaaaaagaagaattgctagaactaataatttgcatattttaaaaaataaagaacatttgcaatgatacggggagggggggagtggtgggaaagggagaggactgaggaggaagggaagggagagagagatatgtgctatatgaaaaaaatatgaaaataccctttttgtttttcaagaggtatatttttctaattagggagagagatgtgtgctacacgattaagaggatactttaattttgtttttcaggtgtatttttcttaaactcgtagattagatttaatgtttgtaaatgcattaagatcttggagcttatggttagattaataaaaactattttttttttttttaacaaaaaccgctttcacttctactttaatttggactaacaatgatgatttaatttaataattttatacatggatatgatgcaatgattccagtagaattagaatcatcctcccactcgaaggatgacttacaacaaagtaaccaccagttattggtcgaatcctttgatctactagatgaaagacgagacatgtctaccatccgcttggcttcctaccaacaaaaggtagacatatactttaattcaaaggtcaaggaaaggaagttcaatgtgggagatctag

SEQ ID NO: 69791 - DNA, 4030 bp, Cannabis sativa
cccatctgaaatccggtgaaaccttctttgacagtgtccactaaccccccagttgaggcaacaattggtacctgcaccagaagcagatagtgaaatcaacagcaaagggctttctaagaaaaaaaaaaaacaaagaaattttctacaacaaaacgagtctttacagttccatagcgcatagcatgcaactgaataagaccacaaggctcaaatctgctaggaactaagatgaaatcagctccgcctgttatcatatgggccaaagggacgttaaattttgcaacccctctagccttgttgggatacaatgtctccaactcttggagttgcttctccattggcttttttccagttccctaacacgattatcacattgcaggagattattagatctaaaggaaaaaaaattatattttttgtagcatcatacatgagaaaaattaagggattttcagccttgatttttaccagaactattatctgaacattctctttgatgaaataaggaatggctgctataagaatatctgaacctttctgctcttcaagcctaccaatgaaacctattacagggatatttctatctactggcaaacctacttctgcttggagcgcttcttttagtatggcctttgcttccctgacctgagcatgtttagtttacacaataagttattcgccaaaggaaataaagaaagcacaaagcaatgctgcttatagaagttttcttttgtgatgatcttacagttgaagcatcatatttgacagataaatatttgtcagttgaaggattccattcttggacatccatgccattcacaatccccatgatccctgtttttcgaagcacattgtctaattcaactcctttctcaacacctgaaacaagctccttggcatagtatgggctaacagtcaagaccttatctgattccaggattccagccttcatccaattgattttccttcccttcactggtttttcatagctgcagaacatggataaacataaatgcccaatgaagcttcacaaaaactttaaaaaggtgctttttaccgtgccacgaaaatcatacatacccgtcaatgaaatcaaaagagcttttaaaagtatctgggagattgaggagactgaaatctgtgaacgcaaatctgccttggtaagcaatattgtggatgcaaaaagctacctgacatcagcagcagcaagtaagcacaatccaaatgttgaagaagatggcactactaattaaactggtttacttactttggcactcttgtataagcctttggctttataaatggctttcaggtagcagggtataagtgcagtgtgccaatcattagctatgaagacaacatcttcacctgacatgtaataatttcgttgtgttttaatgaattaagatatgctactaagtttcaagaatgatagaattagtttgtggctgcctaccatatggcccagagtaatatttgctgctggtgaaattcagaatccttggaacttctaaagctgcctaaaccataaaaagttaattcataacataaattttgaaaaacaaaaagatcaaataaatctgatttttgacattaaaatccatgaggttggtaatgacacgtgatggagatttgttcacctggcatagaaggctaaaccgaagttgattgtcttggtaatcctctccagcaataggaccataaattttggaagcagttttcccccaaaccttatcacatttcatcatgtaaatggtcatagaagacaaagagttattactgtaaaatgtgttcacaaaagaccaaccttttcgagaaacactggatggtccacaaaaacacgatcaactcctcgtttgtagcagtggaagaagccaactttctctgttctttctcccactttaatctatttagaagactataattatgtaatcataatcccttaaaaaaaaaaaggcaatttggatttgtaaatatataattattacctcaactttaacttctgtgtcccaagcatctttgtactggtcataacgtggagaaattgtcataacgcgatgcccattagcctgaaacgaaataacttcactggttattgtttgtttgaccattaatgttgactaagggaaaagaggagaagaacttaccgccatagctggtggaagacccccaagaacatctccaagtccacctgttttgctccaagggcccacttcagttcccacaaacactaaattcataccactaccgcagaagattttgggtgcaagaagcctcccatctcttcttctagttgcagcacttagttttagtttggtgttgagactactcagttcatccactttggtcaatacccttaaaccgtagtgggttattttctgcttcattaaccaaactttctctgaacttgatttggaatctgacattgaagatacttcatagttgacatgtgagcttcttgatgcaaaagctgaggctgcaaaagttgccattgcaagaacatgtagctttttcaatgttcttttagaaaaataagaatgaaactatatatgaataaagtaattaaaatagtatatagtacactccagtaaatacatggggagaaatggttggctgaagtggtattcttttacctaacaagtaacaacaacctcatgtttcgtttgaggcttaggagttcttttgttattgtttttgtttggttttatttttctaataattgaaatttgaggctgaggagttgtttcaagtggaagatgggaccaacttcttatgaatatggtgatatagaggtacaacatttgaatatgcttagccccaccgattttctttggtttgtatgtattttttaaggataaatttatgtatctatctcattattaattatcatatctttctttttcttattgtgtattctcacatggattgataggttgaccttaacttaggtacttctgtagaggtgtacattaaatatatagtttcatgaaaaaaatgggaatgatgttagaattaggtgactcttttccttgatgaagatagataggtgactattatggatatatttactcatatttgaggagataaaaaactattacaagagttgataaatgacatgtatggagactattagaataatgcccattgtggggatttttttttttttttaaaaccaattgtggggaaattacatgatagttaaatacattaaattatcctttaaaaaaaattcataactaattgttatgaccgttaaaagagaagtctggcggtcacatttcctcctaacttgtgcaaggtgattgcctccaaaaagacagtgaattaacaccctcatagatgggataaacgatcgtcacacacctacatgtcaaattagcttagggtagatgtcactacccctacctcaaatataatgacatcctcaaagattgatgagtacatcctcatgacaccaaggctgcccacaacatcaaaggtcaagtgataccccgagatggcgactcacacccgtttcatgttaggtctcgggggtgtcacccctaagtattagcttctaccctcagaggaggttaacggtcataccacattctgggaaggaccctcatcgtcagtgactagttcaaaaattcaaatcttgcaagaagctcaaatatggctataaaactactaaaataacgggatattaccatgaaaattgggtttcaaccacattcgaaaactaaggagacggttggttgagagaactctgtattggtcgcgtctcctgaaacgagaagtatcaaccttttcccctatacaggaggtgaaccatgacctaagagattgttctaaaaatttgagtacttagagaaaaaaaaaaaaaatctatcattgttatcttttgtattcaagagtctgttctttattttgtaactctgattaataaaacacaaggagattaggctattaccgacatctaagaccgaacctctttaaattctggtgtcattatttacatttattgctagttctagtgtcattattaggg

SEQ ID NO: 69792 - DNA, 3844 bp, Cannabis sativa
  modified_base (38)..(60): a, c, t, g, unknown or other
aatacatataaaaagaggtatgtttcaattaaatatannnnnnnnnnnnnnnnnnnnnnnttgattaataaaagtggtattttccaacttacccctaaatttttttcttgtgacccactttgtttcagaaccggccctgcatattttgaaactagcgccccagaactattggaattacaattgtgggaaactttagcaattgtagaagtcctaaattcatgtttttgctacccttttttaaacttaggctccttgccttatatcctgcaatattatttgggaccagaaaattatatacaatgtagataactcagattatctaagagcacattgcatacaatttgaggagaggggtagcccctttcaatgttttgaatttaaggtagcgtttggttgggaagaatggaaacataggaataagaatgggaatggaaataagaataggaatagaatggaataaaattaaaatgcataaaaaaattgataaaaaaaattattaaatattttctcatcgtgtattggaatagtctttccttttatttcaaaatagaatagtcactctaccaaaatggtggaacgacaattccattggaatgatatttcaatactttaatatgcaaccaaacaaaagaatagaataaatattgtttcctttttattctatttcattacctccaaccaaacgcagtgtattatttatacttataatgtgattcaaaatgaatataagagcgtcatttttttcttatgtttatgttttctaacttgtatattagttctttttccttctctataacaatacttgacatcaattcaaacctcaattctgtgatgatttgattactaatagtttcagttacagcagtgcaagaattatcttccataatttttaattggtcaaatgcctttcctttcctgatttagtagattctagacttttgtatttattttctttatgtagttcaaccaccatcaaaaataattttgactgagttcttacagatcgaagcatctggtggccaagctattacttttggaggagatgtttcaaaagaagctgatgttgaattaatgatcaaaacagtgagaaaatgttcttcatattgtttttttcacattgtatgttaaaccgtggaatggtttgtaatattccatctcataaacctgcaggcagttgatgcttggggaactgttgatgtattagtaaataatgcaggttgtttgaaactttcattttcttatgttgttttcattccacattcgatctcctgatgctttttcggtgttttcaggaatcacaagggacaacttaattatgagaatgaagaaatcccagtggcaggatgtcattgatttgaatcttactggtgtatttctatgtacacaggtgtgcatctaaagctttcacttcttaaggtccttcaaacttgactttttctcgaaactaaaattaattctttatttgcaggctgcagccaaaattatgatgaagaagaaaaaggtatatacaccgttttatctctccatttacagtcaaaactatttttatattgaatatttcgacatataatttcaatatcaaaatgagcaccctctcggggaccatgtcatggaaaggatgacctgtggagaaacccaaagagggttgctgtcatggacatcctctctaaaaatggtttactgttaggatcctttatcgagtatgggattgactacttttataaccacttgggcattattttctcgcaggcttagtcttttgagaatgatttgccgaagtttactttgtgtctcgtttttttgtttattttctcagtccccaaataataattttgtagggaaggataatcaatgtagcatcagtcttcggtctagtcggcaatgccgggcaagccaattatagtgctgcaaaagcaggagtaattggcttcacaaaagctattgctaaggagtattccagcagaaacatcactgtgagttattccaaagttttttttttcaaataattagatatttcaatatgactaatattgaattgttgttgtcaggttaatgctattgctccaggctttattgcatctgacatgactgccaagctaggagatgatattgagaagaaaaacttggagggcatccccttaggtgagtgaggctgagacaatcctgttctttcttcatatcgacttggctctgactcctctgaattgttgagaaaaatatgtgaagattagtgtgatttctattgttcttcaggaagatatggtcaaccagaagaagttgctgggctagtggaatttttggcacttggtcctgctgcaagttacataactggacaggtttcactttcacctactatgaattgggttttgaagagttaattgattttaacttctcatactttcttttttttttttctttgaacaattttaacttctcatacttgaatgaactttctgtaacatgttttgtaggttctcaccattgatggagggatggtaatgtaggccaccctccctgcataattgaggagcctctaaactaccaccaataacaaagcaatgagaatggtgtaatatccatttttttaaggaaaaaaaaaataagaatttaattctatttttacttccatttattttttttttcattttagtattttgaatattgtgaattaaggattttaatgacaaataaattttattttatagtgacgaatattttttttatggagatgaattactctagcatgtgtataatgcttaggaagtaagtagtaattgtgacaaaggaattatttattttgtgagtgttgttgttatggtgagcataataataataatacttgtaaaattactttatagtatagtttgacatatttttatggtatagttaatatatatctattatttaaaagattataaataataatttgtgattgattatataatatatagaagtattattttaaattatgatttaaaatattatgtgatttaaagtttgaattaggtgataactgataatgaaaataaatatctatttattagttattattatgattattattatttatgaaaaataggtgtgtacttgagaaaccgatatttaggggagtgactcgttcaacctaatcggttattgttatattatttctttttgtttaaaccacgattacacaccagtttagggattagaaaaacatccagaggcgattaagggtgggtctcttctcgttagtttttttttcttaactatacaagagagatttgagtttttggagagctgggctgtttggagagttttcattgggtttcctaggttgtaattaggggtttaaacgcattgaaacaacccttgaacacccagaacgaaattcaccattttcatgaacattcatccacgttcttgaacaatcttggattcaaacgtgttagagtcatttctgggttaaaataagattgtgtttaagcttaaaggattcctagaagacgttttgacgtgaagaatcgaagctttaaggcctcatacaaaaattgtcatttttggctccattattgacggtacaccggagttggagaagatgaccccgatctgacatattgggactgttatgttgggtagttcttaatcgttttgaggtcctaagcactgtggagagcttccccaatcgaaaggacgcgtcaagagcaatcgggggataaagttacactttgttggcgacaaaactgacgtgaacgctgtcgaccacaatctgggtagttttgaggtgtttttcccatctgtttttgttgatttcgattctacatatattattttagggtgtttgtgttgggttttgtaccctaaa

SEQ ID NO: 69793 - DNA, 5138 bp, Cannabis sativa
tgcacacagtatcctgctcaatctacttcactggcggcaagtgcaactgcagctcccaaagctttacagagtaaggggtcatccaaaggaagctcctgaagtgataacaaaaaaccaaaaaggactgggtataattccagtatactcagtatactgaactggttgacacacaagagcgtgtgtatttggccacaaagaaaaatgttcactaccggagactacctcctttgtaccaagatagctcttggagggaccccaacaaaagatgtgagtaccacaagacatcgggcatacgactaatgaatacaagaacctaaaagacaagattgagagcctgatacggtttggccacttgtatgagtggataaggaaccatttacctcatatgagggaaggttaagctggagctcaaatacttcccttgctaacactgtttttctggtttgttagttagttcggttaaaaacagttatgtctataaatagtcataattgtagaatgcataggatttagtttttcagttcattaactccaagattcatggttcttgtttgagttggtagtctgtttagaagtgttgttcttgtttagatgagggttgcatgagtactggtgtgtctgatctagtagctcacagtgtgaggtttaaattgtatttctttatctacttgctccctataaggactaccaacaacattgtattcgaattcctgcattcatgattatagagaaatgcctccatggctgaacttttgattccatttcaactttaattttaagttttacttttactgttttaatttaattcttgctattgtttatttaacttgattatttgtcattgttcttgcatctttcttcttggtcctaacacatgtgattgtttgaatgacatcagtaacttatcaatttctttttgatgttttaggtggtgtaaatgacttgacaagtggatactaatgcttgtttatggagtctagatgaagcttttaattttatcaaagttttttttttctttttcttttttttttctaacctgccaagtgtatctctttcaggtctaggtctacctgcaaaaataattgtatatgtatcaaaataaataaattaaagtatgtacatagcaataacaatgcaaatataaatgattaattgaagataatctctaaataaagtgaaaatttatgataaagataacatccacaatctattttctgtttcgaacaaaattgtactactgctacacgtatccgaaacaatgagtagagtttagttgaaagattgaatttataaacgtgtggcataaactataaaatacatatatttacaacattatacagaaacaattcaaatataccaaagcttagcatgatgtaaactggctgtaatagaagttacaaaacgaggtgcttataaaaatgaagaagatctttatgagttcgtatgtatgtagaggcgtcaatgagagttacttgtgatgacttgattgggatcaagcacaatgcctctggctactccttgtcggcctaagatacttctgcgtggtggagcgggtactaaagatactactggatccacatttggaggtattggagtttcatctgagtggccagagatgcatagattaccagactcatcttggtcccagtatacttctaccatattccctctaagattctctgatgtttctgttcctggaatccccacgaacctagctccaactggtatctgcattaccaattgtaccatttttatgcattagtaataatgcttccaatatatctcttttgtaaaacaaaagacaagcagtggcttacctcaattgatgttcctgaagttgtcaaagtaagaggaacaagtctaccctcggctgttgcactttctagttcggcttgctgtgcgatatttaagaaaacttcttcaagagttgtgagacccagttgaatgtcagctatcccaaactcacttactctatcttggagctctttgaaaaaattctgttcaacaatatatacccaaagaagcataactcaagctaggtgaaccactaaggacaaaaaggatatttaaaaaagaaatacaggcaacaagtttgaacttttagaagcagaggaaccaaattataaaggcttaccggcaaaagcacctctctgtcatgaggaatgacaaaggtaagaaaggatttgttctcctcctttggttcaacatttaaatgctgacagaacattcctcaagttagaattgaaccatttattagtaaaataaaattatgagccattgatttagtcaacatacatgtttaaagaattgcttcacatcctcatgatgagttgtatcaactacgtccctgttgggagtagcttgtccattggtggtgacagaaaagctcacattagctataaagcccgtcccaaaacgtgacttcagtctgattgaggttccaatgcagcgtagcttacccttcgccataattccaatccgatcacttaaaatgtcagcttcttccattgaatgtgttgttaggacaattgcacgccctcttttagcattctctataatatcccatacatgtcttcttgtaattgggtccataccagttgtctacatatcgaaatgaacagatcagtaaactaatatgatcggtaatgaaattgcaacaggaatgaaataagcattgtagaataacagcctcggctacatacaggttcatccaaaatgactaattttggatcaccaataagtgctattgcaacgctaagtcggcgtttcattcctccactataactgccagctcgtatgttggctgcctcagtgagtttcacctcctcaagtgatttttggataacctgtatttcagaaaagcgctcaagtgaaaatgcagaatctatagagacaccgttgcttagcaatagtatcaagatagtcattatacaatctgagtaccaaaacatgtgggaaaaacaaccacacacactataacaagtgttacatactgattttattgaagatgggggtaggcctttaatactggcaaagagatcaagatgctccttcccagaaagtgaatcccagagaatatcaaactgtggagacaaaaagatggattattcacttttcccaatatttttaaatggtgatcttaagatatccatatattttttgcaagagggtaatgatgtacgctacttggatggtacaagtatcaaatccactatgagacagaggagaggagaatcacctggggacaaacacctatcaattttcgaattttagacatgccaatggagcttcgtacaggtatcccataaatcaatgctgtcaaaatgcaagttaaaggcacagtaagatgacattgaataatatcactaatagtttgataaataaaataaaatgcaacaataatcagaaaattaccatctccattagtcaccggagtgattcccgtcaaacaattaattgctgtggtctttcctgctccgtttggtccaagtaaacaaaacaactgatcttttgcaaagttcacccacaagccctgaagatcatagaaaaggtatactcagcctgttgccatgctaggtttggaaggaaaaacaataacaaaatatcaatattcacctttaaagcttggtaaggtggatttctcttgcatttgcagcaacccatgtttgtagacccaggataagtttttccaaggccacgaacctgcacagcaatgtttgggtcatcaacaccttccatgatttgttgtttcactaagttctcctcttcaaggacatcttcatcatctggggtaatatgctcctgtggtggaagagagcctatgcaactgcaaatgccaccctctgtgaagagcaagcagataaggcattaagctgcaggtatcagtgtacaaggaaagctcgagtaaaagcataatttaagcccaacttacctttcacattgttgccaccttttcctatccagtacccaggatttaaaaagtaaaatacagattttcttacaccagacacattagggataatgttatcaaagtagattgccaacactaaccaaatgaagaatgtagccaccagccaaatgtaaatatcattctgtggatttagtttttttcccccaaatggttaaaataaatcagtaaccgaaatatttggtaagtactaaacattcagcaaatgcaacaatgaattctaaactttaagcatcgatgtatttcacttacaattgttatcacacaatcgtcatcattcgctgcgcactttcctctattactccagctgaccccaacatcttggggagtggcagttgcactaacgagcaattgtaaggcttcagctagaagattaggtgggaagagtgaccaaatgtttctgagtggtttagagatgctagaagagtagggaaatccaaatgctgtaacagcctgcaatgagaaaatggtatttgttgttactaacattatgatgtcttctcttctttaatcttgaaatcattaacaagggaagtgcacctgagttacagtgccaacaataaatataaagaaaccagcagttgtagatgaagatgccttggtaatgaaggctgacagtaagaaggcaacacctagctggtgattcaaatacaaaatagataaacgggtattaaacaagaaagcttggcataagacagaaagtaaaaagaagaagctgtatattaagaagcatagaagttagtcttaccatattgagttggaacagaaagaacaccaaaaatacaacagcaaaactgttgttcaagaagaagtcaaactgaaacatcatgccaacaagaacaataacaagtgatgagataagggcgagaatcccctcccacgtaagccatgacaaccagtaagcagaatcgtaaagacccatcatagacatagcctgcagttacaaaaaataaataaataagaaaatgggtcgttttataaattatctaaaactcctagagtacaggacaaattcatcacctgccgcagttttagttctttttctgtgatcaaagaattcatctgcagtacgaatccaaacatggcagttgccaagaaaaaggacggtccaactgaagccagtgcagagaagatttccagtgcagggtgtgcaaattccttaagtgtgaca

SEQ ID NO: 69794 - DNA, 3492 bp, Cannabis sativa
  modified_base (2086)..(2086): a, c, t, g, unknown or other
  modified_base (2749)..(2751): a, c, t, g, unknown or other
ttagtacttatgctgctaaaaataaacattggatttataccgcttacaaacataaaattttgagtacttataccactatttaccctatatatattgactgtgcttttattcttcaattttgtatagctatttttgctattagagagaatcgtgaatgttctacatgatcgataatagaaatatcttagaaaaatatattatattattttgtgaaaaaaaaaaaaaaaaaactcaatttctttctaaccaactaataaagtcatgtcgtggaagctagcttattggaaaattctggttgacgaatctagcttatggagacatgtggtggaagctaaatatttgaaaaaccaaaattttttgacttggaaatcaaagcttcggattctatttggaaggcaatccttcacgccaggtcctatatccacaaaggactatgccgtaaaattggttggagatctctaggtaccatgggacattctccaatcgcatcctcgtctcgatgcctcggaagggatcagtttggttagcaactttattcacaataacaggtggagtgaggacttagtcaggcaatagtttcaacatgaagatgccaaaagaattctcaatattaccatgcctaatcatccttcggaggatttttggctttggttttcgaaacccaatggcaaattcagtataagattagcctatagaattattaaaaacttggaagttaataaaaacaacaacaaaaaatggagaattatttagagagccaaaattcatgataggttgaagatgttatggtggaaaattctatccaacagtcttctcacaagaggtaaacttttctcgttttgtagcttacaagacccaatgtgttcgttctgttctatggtagtggaaagctctttccatcatttttgggaatgccattttgctagaattatatggttcggatgtatttggtaaactaaaactagtgttcctagtatttcgaattgggaaaattggctatggtggttcaaacaggaggaacataggccgaaagatgctaattttcatacattcctaggggtgctgccataattttcgaaaagatttggtgggcaagaaaaaacattgtccacaatggaaattctacaccgattaaggttctaatgcatcaggtcaatggcagactcatgaaactacttgaggttcatccctcctcaactgttgtgatgactaattggctctcttcaccggctggttggattatgtgcaacacggatgtagccagggccggcacaagcattttaggggccttgtgtgaaattttaaaattggaccctttagaaaaaaaaaaaacatgtacattaaaactacaattctattagtagctttttttttgttaaagattgcttcataaatttttaaattaattttttttatttatgtatatataatagggaaaaaaataggcatttttttaaaaaataaaaataaaaattgagccttaaaaaaatgaaagccttgggcaatggcccaagctgcccaatacttgggccggccctggatgtagctataggagatcagcaatctgttggtgctgcaactttcaagaacgatgatggggtcgtcacaagcatacacactactcacttgtagtataatgaccccttggttggtgaaatttcaactctttgctagggagccgaaactgcaaccacccttgatctcaaaaatatcattttttaaaagcgattcagctggtgtgatgtctgcagttttaagtaaaagtcatgaaataccagccttgaatcacaatattcaggaattagttgtcaaattccatggtttagttagcaagcttaacatctgggaggctaattggataccaagaaagtacaattgtgtggcccatggtgtggctaaatgggcgatccgatcatgccaattcgggaatatcaatttttctaattttgacagctccttacttggttgcaaggcggatggttgatgcggcttttcccttttatattggtttttatgttttttcaatcacattgtctttgtttgctttcttttctttgactgtgtgtgttatagtgagatttctctnacctagaaactcgagaccagactcttatttagaggacacgtgtactcagatttccaatgaaagctgagacgtccgtgagagactcctcgaagtttaaacctcgcccaagatagagtcagcgagatactgcgagtacgaccaaagtctgatcgcataactataactcgtattatgcgggatgagagaatggatctaactcgcatgtatcaggatatgtgcgagtatcctctctatattcccgcataagcatagagtcgactctctataatgcgagttggtcccgatgacccaacaaccttgataaaccgatatagactcgcatgtctaggttctataaactcgccatacgatgtccaaagaggcgactatataagaacgcagacatcctaaacttaattaagtgttgggcccgcgagcttaacattaaaatatgaacagtcaactcgcatgttagaagacgcatacgttgctgcatttagtgaatagaaactgctattcatttattgatgtttacgttaattagtttagttattgtaattcaatgtgtaaacagattgacaataaatgtaatctttgtataactaattggacacttgctttgtatataaaggagtgatccaccgtgaaatgagacctacgaaactcttgctacagtggactaannngaccgtgatctgactgaactactataatcctctgtcttcttgttgtttccagttttctgttaagcattcacattaccagctcgagtactcgccattataggttgaatactcgcagttgttcttcaaacaatttcttcttgtcattaatattattacatatatttggtgttgcgaattttgctcgacaacagtgtgtagtcattgctgcttaggttagctttgtttctttttcctagtttaatctattgttagttctcctgattgctcagttgaggcatcattcatcaaaaaaaaaaaaaaaaaaaaactaataaagtactcctattaccttctttattttattttttaaaatatctcattaaaatttaattttttttttattttacttcaattatttatattacatcatatatcaacttcttcatatatattttattatttaaatattatctactcataatagtataacaataatatattacttacaaagtattgaaaaaaaacattaaaaacaataaaatattaattaaaaacatatgaagaaactactattgcatttttagatgtagagatgcaataaagaatactgttcattctttttttttttaacatagttattagaatcactcatgaatttatgatgtagatattcacaaattgtgcaggaacctcttcgaaccaagatagctcattgtctaaccgaagagcatgcttgtcaaaccatgaactgctaaagtaagc

SEQ ID NO: 69795 - DNA, 1172 bp, Cannabis sativa
aaaaaaaaaaaaaaaaatttgtctcgtaaattgtaattactatttgattttaattttaatttttttttacgttattttaaattttttctcaaattattacaacaactgatttgtgcccttttatttaaaatagtgatatgttaatttcttatagcaagttacatcagcttatttgggcagaaaatataataatttgacaataatatttgttttaaaaaaatttaaaacaacataaaagaaaatattttggaagggacgatcaagtagtggtaataattttgaacgaaagtcatatttattctaaagttaatttatgagtaattatatagaagagttgtaatagctagttactttacatacatctccttagttatataacagaaattgtattattactagtttcatacattgactttgtcataatttattaaatatatatatatatatatcacatagtaaattgaatgaaaatctaactgttaaaaaaaacatatcataaaatatattgatataattttgaatatatactaaacttataattatatatataataaatatatgattgattcttataaatatgattaactctttttccttttcgttttagtagttgaacacatatttagtggccaaacaataccaacttgaacttgatatataacatgaaaatagtgacccaaagcttcttatatggaaattgtataatattatagattttctttttattataaaataaacatctctactttactaaaagctactctctattgcttaataatttatacattatttttttccttttcctacttatattaattatttttttcaaggatgtgactccaataatttgtaaagtaactcaaagtgttataagtgtacaattatgcaatttcataaatgtgaagttatgtcggcaagctttttcaaatttaggaaattatttatatatatataattgcacataaattaatattaaggactaagacaaaaaaaaaaaaataataacaataataataattgaggattgctgttattttgtatgcttagattgacttctaagagtctaagagcctaaaaaaatatgccattgcaattaaatatgatgttgcaaaaatcaaaagtcatctcacaaatgtggtagataaaagtttggtgtgaatgtcataatcttt

SEQ ID NO: 69796 - DNA, 1996 bp, Cannabis sativa
tgttaaaccttcaacacacaagataaataaatagagagagagcgggtcatcttgtcaagttcgtattatcctatatattatatacatatattgacataataattcctatattttgttaagtataaattaaatatcatatcatttcaaattattcaatttattggattattaaattggttttctttaaagctaaataaacaatgttgcgacaaaaaaatagtacaaataagccaaaagtgaaccaaatatttattagaattaaatttattaaatgaggaggacaataatcaacatcttttatttctcttaaaagtggtggaatagagaggaattggtattattagataggaaggtactattattactatggttatggtaccacttataacttcctttatgcccatccttttaaacattcaattttatgtgaaattagttgtctttcttttattttaatattttagaagtgtttagctttagttaaaatgctaaagatcacttaggatgttatgatgtatacccgttactcaattgcaccaataacaacatacaatttcttttgagggccggtttggctagtagaattggaattaggattaggataaataatcacaatctcatgtttggtgataatgtttgatcagataaataattcatttgaccaaaattaatcttgttggtatgagataaatagtcttaacaaaaaaaaagtgagattaagaaagataacaacacatggaccactctttttagaaactcaactaatgtagtgtacataacttcttcttagtgctttttttattcattaccaaacacagtactagatttagcataattctatctaatccgttccaatccaatcttttttaatccatttttgggtaccaaaggagcccttaagatctagtattagtacctaataacaaaactccacaaatttattttaaactcagtaaacaaaaaaaaacatcaaagaacaaaaaataccttgaacaccaaatgacatttgttctttaattggttacaacaacttgaaacaaaatgacacaaactttagtcactcttgttgattaaaaaatagcaacttgggacatataacgaagaaacaaaaaaacaatactcactaccctcctggacgaataacacattcatctctaagagaaacaattccaagcaaaacactaaacaaactaattaagcttaaacaagtatataaataagtatttttttaaggcattgttcattctataatttttagtcaaagtccttatttttctttagtttcctatgcgttttcctctgtttcggcttaaccattgggctcttctagctgcttttgccctcttccacctctcaacatttctcatccttacaaagatttttctaacctgatcaagcttgtgagactgttgagtaattatatttgcagttgaggaactttggctcagaattatctcataaccgtcgcgaaaagagtccatcccgtcggttaaaagttgccaaaacattgccccagctgcaactcctcctcttttagctgatgagtataccttgttgtacactgtgttgaagagctggtctctctggtatgtgttgtagccagaatctttcgaagatttcccaaattcggttagaagtaatggctttcgaagaatgttttgtgaatcttggatgtgtgagtctagccattggttcaagaaagaaagctggttttgatcatttgctcctgttaacctgataatgtaaacaagaaaaaaatggacaactccagtcagatatcatcttagtactaattgataattgcttatcaagattagccattgatttgaattttgaacccaattcagattaacacaatcaagtataaactagatgttttccatatcaaattgtagtacttttcatgcagtttgaaagtatggtaaatagttgaaaattaccattggtcaggataagaatgaacagtagcaaaatcaatgtgagggattctgttgtt

SEQ ID NO: 69797 - DNA, 1325 bp, Cannabis sativa
ttttttttttttttttatgaatactacgtgtggatcctcaagttgaaccatctacttttaagaataagctaggccatgcttcaagagtttaaagctttatatatctcaaccaattactgcagctcattcgtaatccctctcttgccaaattaattgggggtacgtctaaatggatttatggactcaaaagcttataaaatatccatatcgaatctagaattgaactctagggggcaaaaagaataaattaaaattaggaaggcaaactacaaattttgaaaaagataagggaaaaatacaaaaaaagtttcggttaatttttctttgtaaatttgagattccagttaaattttattgttgaatacttacttgattgtcagtgtgtaaatttgtatataagtaacatgttttcattggctctaatttaagatttaataactataaaatttaactcaaatttaaaaagtaaaattaaagaagtatattgccacacaaacaaaaaaaaaaaaaatcaactgattaagtacataaaaattaaaatatatatagatttgtttaaaactgaaattgaaagtattattgacttcaatgaactcttccctaatcattaaaataaaattaactccaacctacaatttgatttttttcttaacataaccacaaccacaaggctatttgttgcccttaagtttgtttggtagaaagggatattagaataaattaaagatggattaaagattataaattggaatgatcaaatatatttttgagtttcatttgtttggtataaggataaaaggctgaaggagaggaaatcttccctctagtatttgtttggtataaggataaaaggctgaaggaaaggaaatcttccttactagagggcctgaagaagagacattaatttgtattttgttttgttgaaaataaataataaaaattaaaataggaatatatattaatatagtaaacatgctaataattatgagaaatgctaaaaggcacccgtggtgcctagcaccttcctatgtgtcaatatcgctatcggtacaactaagtatcaggtcccatataatttaatataatagtttttagggagtatcgttagccaatcgcaacgctacatgtcgcaaaagtgctagacaccactgatgcctaatagcaatgctaaataattatttattattttctttcctttaactttaccaaaataattttaagtagacagccaaccaatccatgcatatccagtcttgctcttttcaaggaaggcaccgatgctttcaaactagtattcttgaatgtaattgttattacaagtactg

SEQ ID NO: 69798 - DNA, 2813 bp, Cannabis sativa
tttacagaaagaaatctctggtgtattgttttaggaggtgataaaaatcgtttctttacatcttaaaaccctaattattatgtatatataaacccaattacatcactcgtacaattcaactcaatctctctttctagctctctctttctctctctattgcttgcgattaacgttctgtgatcaccaaccagcgctcgatttttgatactcattgcattgttttcttgattttcgtatactaatccctgtttttgcaggcttgaatcgaattttctttgttcttaaatagtttgatttcgatttttattgtttttattttttgcgatatatatttttttgtgaagttatggatgcaggatcttcttctgcttcattgatgaagacacgatctcgtttccctcttcaagaacagtttcttcatagaaaaagttctcgagaaaatgtaagcatatcaattcttgatcatcatctttactgggttttttttttagttttatttgaaatcgctgaaagggttctgcaatttggattttttcgtgataatcatcactgggtttttttagttttgttcgaaatcgctaaaagggtactgcaatttgggtttttagggttttgattgtggaataagaaatttgaatatttttagggttttttttaataatcttgattgattggggtctgaaataattttgaatgttttaatttgggaatttattgattttttgatattgtggtctttgaaatcatattctcgtaatttcaattttggggttcttgctttttagcttcattgatctttatagtattaaggtgttttgttttatgtttgaacttctattgattggtttctctttgtgattatcagctggacaggttcatcccaaacaggtcagcaatggatttcgattatgctcactacatgctgaccgagggaagaaaggttaaggaaagcccggtaagttcatctccagcaagagaagcctacaagaagcatttggcagaaaccttcaacatgaaccgaggtcggatcttagctttcaagaacaaacctcctgccccagttgagaaattcccttgtgagtttgcttctgcaccggtggagagagcagcgaaacccaggcgccacattcctcaggtggagttcttgttcttgttcttgtattcaatcttatactgatgttgttaagttatatgcttaatttaatttggttgtgtgtgatgcagtcttccgaaaggacattggatgctcctgatcttgtagacgattactacttgaatctcttggattggggaagcgcaaatgtgctggcaattgctttaggaagcacagtttatctgtgggacgctacagaaggctctacttcggaacttgttacatttgatgatgaaagtggccctgttacaagtgttagctgggctcctgatggaaggcatatcgctgttggacttaacaattccgaagtgcagctgtgggactcggcttcaaacaaacaggtacatcttttgaaacgcctttattttcttttttatttccctatttgtttcgattatctaattgtgctgtggtgtattattgttttttcagctgagaactctgaaaggtggacaccgagctagggttggttcactcgcatggaacaatcacatcctcaccactggaggaatggacggtcgaatcatcaacaacgacgtgagaatccgatcacacattgtggaaacttaccgaggccacgaccaagaggtttgtgggcttaaatggtcaggttcgggccagcagctagctagtggtgggaacgataacctaattcacatatgggataggtcaaccgcttcatcgaattcagccactcaatggcttcacaggctgtcggatcacacttctgctgttaaagctcttgcctggtgtccattccaaagcaacttattggcaaccggtggaggtgggagcgatcgtaccatcaaattctggaacacacacaccggtgcgtgcctcaactcggttgacaccgggtcacaagtatgcgctttgttatggaacaagaacgagcgagagcttcttagctctcacgggtttactcagaatcagctcactctatggaagtacccgtcgatggttaagatggctgagcttaatggccatacctctagagttctttacatggctcaggtaaattaatgatttttatacaaagtattcaactttttttttaccttggtaaacaagattctgaaccgagcatattttgtctatgtgttttcagagcccggatggttgcacagtagcttcagcagcaggagacgaaacacttcggttttggaatgtttttggggtccctgaagcagctaaacctgctccgaaagccacagagccttttgctggtcatttgacccgcattcgatgaggagttgtgaatagattttgacaattcaactttgtttacagcaatgcagcagcagcataaaacagaagagtgtatattcctctctatacttaaaccagaagaagtttgattgatgatgatccttttgaagaaatagaacagtttcagcagtgtggatatttttttgaacaatacaattcaaattcaatgtgtattttccaataatcttatcaaattcaatatatgtatacagaacaacagtttgttgtgtttcatttttttctatacaaattttgtctctgattcaatttattgtctctgtttctcaatttaccaatgatctgagtttccaatagaaatcttcttggatagcttcttgttttggataactaaaaattatcattaagtctattttattgtagtcatgaaaag

SEQ ID NO: 69799 - DNA, 2579 bp, Cannabis sativa
  modified_base (27)..(28): a, c, t, g, unknown or other
actaatcagattgtaaagagttttatnnagggcataaaacccaacactctcatcatacttttcctcatccttaagtttagattgaataccatttagccactaagaaacctagctccaattctagttgtaactccaatacaaattctttatcccaagtctgcaatgataagacagccaacactgcctctactgcttgtactaattctgaaagtaataaaaatgtctcttttgattcctcactttctggttctcctgttaattttaatgtgacaaaaaacattggcattaagaaatggcattctaagcttggtcaccctgcattacacacactcacaagagtattatctgacttaaattacttaaggtcccataagaatcttgcattttgtgaagcctgccaacaatgcaaaagtcacaaacttccctatactctatccaactctagagcctctcaactcctagaactaatccatatagatgtttgaggactcacatcgtctctaaggatggttacaggtattatacccattttattgatgactttagtagattcatttggatcttctcattaaatgtcaaatctgcagcttactctactttcctccagtttaaaactttagttgaaaaacaatttcaacttcttgtcaagactgtccaatccgattggggaggtgagtataagtcttttgcatcattccttacacaacatggaattcaatttcaacatccatgtcctcatgaccatgaacaaaatggaagagcggagaggaaacatcgacatattactgaaacagggcttacactacttgcacaatcaggttcgcccttggaatactagtggcatgcttttgacacttctatttttaccattaacaggcttcccacacctgtgattggcaatgtatctccctataagtgtttatttcacaagacacgagattacaactttctcaaatgctttggatgtgcatgttatccacatctcaaaccatacttgcctaacaaactaaatttgagatccaccaagtgcatctttttaggttacagcttgcaccacaaaggctatctatgtgagaacaaggagggcaaaatttacattgctcacaatgtctttttaatgaagatgattaccctgcacttgccactgctacaccaaaccaagtaacatctcaacctcctcctttattttctactctcagttttgctacacctaccttagtgtctcacacaaatgatgtttatgctgaggtaaaccccctggagagcctactagtcatcagtcacaaaatacaacagtcactgcatctacctctcaacatactgctgcaactcctgaacctctcactataccagatactactcatcctacaccaacaccacaaacacaacctccaccaacaatttctgtcacacaatccttaccattatcccctcagtcaccaaacagctctccatctcatcccgaacacataaattcatcctcagctacccatacagctcccctaccctccccactccccattacgaacactcacccaatgcaaacaaggtcaaaaaatcgtgttcacaaacccaaagcctacctctcaaccaaccatcctttaccagatcctttattacccaaagctcccacctctcttaaatagacacttgctgacccaaagtggcataaatcaatggatcatgaaatgcatgccctcactcaaaacaaaacatggacactagttccatatcagccacacatgaccattgttggaaacaaatgggttcacaggatcaaaataaatgcagatggctcccttgacagatttaaatcgagacttgttgcaaagggatactctcaaacacctggtatagactacactgagacattcaatccagttgtcaaaccaacaacagttcgacttcttctcacacttgcagtatccctctaatggccagttcaacaacttgatgtttctaatgcatttcttaatgggacactcaatgaaactgtttacatgcaacaacctcctggctttgtggatcctacaaaacctactcatgatgttttctcctacacaaggccctctatggcctcaaacaagccccacgtgcatggaacgacaagctcaaacaaacactctgtcaaaaaggattttctccttcaaagtctgacaattctctctttgttcatggatctggttctgaactgatctatctattagtttatatcgctgacatactaattacagtacctaatcatgtgctcataaacaagttaataactgatctcaacactgaattttctgtcaaaaatcttggtgctttgcactattttttaggggtcaaagttcacaggacaacatctggtatgcatctctcttagactaaatatatctttgaactattaacagagcttcacatggatggtgcaaaggttagtccatctccaacaagctttgttcatcaattatctcttatcaatggtgagccattttcagattaaagtctgtatcaaagtacacttggggcacttcaatacttaactttaaaaggcctgacattgtcttcattgtcaacaacttaagtcaattcat

SEQ ID NO: 69800 - DNA, 2410 bp, Cannabis sativa
atgatgaaaatgttgctcttgtatctctttttttttttttttcaaaaacaaaataattacacaaaggctccctaataagatttgtctataaaaattacttattccataaagtaacatctaattaaaccctagtaccatgtccaaaataatcataattatttcttagaatcaataaaaattcaaaaaatgttttctcaaatctcgatactcacaaaaatatgaacacttaaatttggtaacttttctaagtaaatataactaacaagcatcttacaacaaagagtttggtatgtgtgttttatactctagaaaaattctaagcaataaagatagcaaaaattgacttgaaaataacattttacaagaataataagtaatttttgaatttttttgaccatcaaactattaatacgataacaattaagaaacatgcttgatttgcccaccaccctcaatcgaaattaaacaatgttttcattatttaaaaaaatatatacataaaatgcatgaaatgagaacgctaaaagagagtgagctatggtgtgtatgtgcttaagtatttgttagtattaaatcaaaattaattcccccaaaattaaaaaataatcataattaaatgagaacttttaagaagcaaagaattgaaaaaagaacagttgtcacataatcttgtttatgcctgatattattttctctgggtcaatttcttaaaagtgattctgcccacaatctggtgagaaatctttgaagtaatctctaagctattgccatcatcactttctagtaataacattatttttcaagaaagaattcaacttttttgttcttttttcttttgggtaactgttactaagtccattaatggtaatggaatatataatctgattcttttcattccgggaaattggaaagtggtctgaattgaaacatttggcatcatcatctttttctttcgcaccaagaaagttcattacacaaattttgagattaaaaccacaatcaagaaaacattccagtgtatctaagctttaaacagacaccctgaatttttttattttattttatttatttatttaaatctgtattcttttaatcatagaagggtacgtgtgtgttggagattctgagttcgagtcccaaattatatattgttgtaatatataaacgcttaaataaaaaaaaatataaaaagaaatttttttacttaacttaagtcatttccaatatatttgtaaaaatatattaaaaactaaaaatcacagaagcattttctttttaattagcaatatctctaaacttaattatacagtggacaattatattttatagcaattttaatggagctaattttgtttatatatagaaaaaaaaattagaagttttttcatgtttacattttgaagcagttttttttacgaaaatttatataacaacccacatagtaattaacggagtaacttaaatcgcaatttaaattcacataacaatccacatagcaaccaccggagcaatccaaaccgtaaaaataaaaaaaaaagttaaaaattagtatataggtgatttctcaaaaattagatagaagcgttatttttgtttctactgtacgagattttttttttaatatatggtgaaattataacttttatataataatgtatattatagttatatatagtagacatcttgttagttttttatgacatttaaaagaattttgagttttgaaaaaatataatattcaaataattatttgcatgtgtattttatatatatttaaagaatagaatgtatttattagttgattttaaataaacctgttgagcgctgcaatccttccagtaagactatttgatcttccaaacactttgtattgtcatcctagaaatcacaccaacgaattctatcattgatgtgatatatgaggtcgtttccatgaggtagaggtggcaattcgtgttcgcgggtcgtattcgtgtcgtgtcgagacccatgtataacaatgtaataaccaaaatattcaggtattattttttttttctatctagtcttaatatctcgatgtggaaatagtgatttcataaaatatgttattgactatggtatctttcaagctataggaattatgttgatattatagttggactatagattaagtcggatataattttaatttttggttactactttgactattagagataactatggtggatgctacaaatttagtgataaaatattttgcataaatatatgcatgtgtggcatgaggaattgaagaaataaatagtttgtatatgaagcattgagaaatagttaagttataattttataagtcttaaataatgggtcttgatgagtagttttgaactattcatggaatgaggtgtcaaaatatagttaccctaatgtt

SEQ ID NO: 69801 - DNA, 2157 bp, Cannabis sativa
  modified_base (2122)..(2122): a, c, t, g, unknown or other
ctcttaaatcagcttattgaacttagtcatttgttgttaatgatggcttctttaaacatttctagaagtgctccctcctccctcgtcttaaattattcctttggaaattgtactatgatgcgctgccaatggggtctacactcattgttatttttggcaatgaaccaggacattgtgttttgagtaatcatccgacaggtaataccacttcgcatctttttagaggttgtaaaattgtgaaaatttttggttcatgtcgaaatggaatatccgaattgactccttccatctccacacaggtcgtgatatagtgaagtggattatggaagcctcgttcttgtcccatcttgttgcccaacatgtaaatgattacaaatattttgctgcttgtttgtattacatgatatggtttttcaagaatcaagcttttcatcaaaaaaatttgctcccatttgatatcatggcgaagtatgtcttaggcgaattctcctttctcactaaagggaactccaacaggagtttggccaaaaataaaaccattgttaatgacctctctagaagtgatgtggctggtagtttcaaggtgctggtggatgttgccttctcgaacaatactgcagaagctggtgtcattgttagggactccactaatcaactgtaggctttttatgcctgtaaagtagcagcttcttcagtgatccaaggggaactgttggctgttatgaagggcatagaggtgctgaagtttctagggttggacagaggaagaattctctcggatcgccaagtgctaacgaaagctgtggaaagtagtaaagctctgaattggtcgactgcctcatcttttgcaaagctgctgcaggcaattgaaggaaccaaatttttcttacaatggaccccgagaacagcgaatgtaggagcacacgctctagccaagtggggattatgtaatgattgttcgggttttgttaacttttgggaggtgaatcttcatgtgttcaatgttatctttgcaatccaatgtggtttagggagatgcttccctttgtaagcatcaccttgtttttgttttaatgaagtttggttttttaagcaaaaaaaatatatatatatatattgcagtgactcagttatacatgttgttccttggctgttttgtgagaactgaagtgtactttggatcccaaactcaaaccttagttgtggtgccgcctagggagcaggatgctcacctaggcactaggtgtcacctgggtgccaccaggtgttctacccactcgttgagtgtttcgttgctcgagattggagtgtggcttaccttttgtatactatgttgcatctatgtagtcatgccttgttgaagactgaactcaaatcgaaggaattagggttccagaatccacctaagcgcccaactaacatatgtgggtcttgtcttgcgttctaatgttgtgacgagtcatccacttaaactgtttgaaaaaaacacagaaatgaacatatccaaatccatcagctcacttggggcccctatgctccacctgagccctgagtttcctagtacgcaagtggtgctacactgcttgaggttttgggggccacaattattttctttgtaccacatgttaaaaatgttgttcatgttatcaagacgtttaggtgtactaaaaatattaaaaataaaataaaacatataaaagtaaaaacattaaagtatttaatccctcttattctataataaataaatgaattttaaattaaaccaaaaataatatgtgcaactaaatttaaacagtattaagtaataatatgtgtatacataaattacacacaaatttatttttttttttttaaaaaaaaagcccactatagataaatatgattatttgatattacttagtacttaccacataagcatgtcaagtttgtgtgtacacatcattactcgcttctatgaaaaaaaaaattattttatttgtaaaaaaataagttaaattagcttcttctttttcttagaaaaattagcttattttaagctttgccaaacgaaacctttgcttaaaaaatctatacttagaccttttgtattatcaaatagtaaatatatatatctttatatatnaaaagtgcctatttaacggcatttcttggtttaac

SEQ ID NO: 69802 - DNA, 3781 bp, Cannabis sativa
  modified_base (3739)..(3748): a, c, t, g, unknown or other
cgcacttttgtggattggatttgagctattgtgcggattggattggatccaaaaaatgaaatccgcacttagcggattggatgttatttgaccaaaaaagtgcggattggatcgtatgaacagtcctaccatttgctcacttatttttgttcggatctcaagcgtctttgcaccatctggatctcgtgcagctggctaaccatatggacatgtgtagatccaaagcccgctaggaatatgactctgatatcatgttagaatcatgggttccatctcaaaaccaattggtaatgagtggatgactcaatacttttacatttattattattaatagttgagaaactattttttaagtgataaaaaattaagggccacaatatcatagttcgagaacaaaaaccataaacaacctccgaacaatttttaataatttattacaatgtcaaaaatgaaatttaaatagttcaacattcgaattatattttattaaaggaaaatactaattacaatttttcctttaatttttgacctaatgtcttcaaagtttccagttccaccgcttgcgatattgatcatcctaaacaactatgggatcttcgaattggatcttcagaactctgcaattaatggttcgtacttgacaaaacttcattagatttcatttgaattttgatggtgatatttgaatcattaattatgttccatgtcatatacaatacaggttgtgattgttgggtaacaacatgttcgacaaaatgcctcacaaacatgatatagtaatatcttccaatgtaactcattccattggtgtaaattaaaaaacaaaaaggaaatgataatgatataaacaacacattggtgtatatgtattatcttctatttgtttgcagatcattatgctaattcatttgcagacttgggtccaaaagtagatgtaaactatctactggaaaaccaatttatatcggatttggtagtcttgtgagtttcttatatatcttaattcttatcaatagtaataggacttttctgttttgttttatgtatctacaattttgtatttattcataattaagttgaccttttttggcttgtaattttgatgtctctgcaatttcattaaggggttgagaggctaaatcacagtctctaagcaaaagttgatatgtcatcaacatacacacttccatataacaaataattgttttactttgacagaaattgcatgtcttgtcaaccagaccttggagataaaaattctgaacataattccaaaccacctaggaaaaattctgtctttttctctatcttcatttggatttatgactttttaaaaaagtataaatataaatatgtgatggagaataaaactattttgtggaatgggttacataaggtccatgaagctaagataatccatctcaaatactttgtttccaaatctgcttcctcacaagtctgaacactttgcttgctttgatctgaccaggaatcatggctgaagctgttctcactgttgtcctagagaatctgagctcattcatccaaaagcaaattggatctgctttgggtggagaaagagatggaaaagatgtggagcatgctctcaaacatttctgctgtgattgaagatgttgaggagagacaatcgaaaaattgttctatcaagaatatattggctgcaaaagttggaagatgtttctcttgagttggaggatgttctggatgattgcgaagcagaagccttccgtttggaggagaataatctagaacatgatcatcaacatcagtggatccataaggtacgatcttctttatcttgtttcggtcctaaacatctttcctttagtcatgctattgctaaaaagatgaaagagattgggtatagattggatcatatcggaaatgagcgaatggattttcacttgcaagaggttgatgttggggagagacgaaattaaattagagatagttgttagactggttctgttattactcaaccacatgtgtatgggagagaagaggacgaggggagagttgttgggtttcttattaacgacaccatcaactgcaatgatacgtctgtttattgtattgctggtttagggagactgggaaggacaactcttgctcaatgtgtcttcgatgatgagagggttaaagaacattttaagttgaagatgtgggtttgtgtttctgaagactttgatgtgcgtagattgatcaaagcaatcatagaatctggaactggaaaagtttgtgaagcaatgaagattgatcctttgcagaaacgacttgaggatatgcttcaaagaaagagattcttgattgttttggatgatgtgtggaatgaagatcatgagtaatgggacaagttgaaatatgtattagaatgtggatcaaatggttcctcgattattgtcactactcgtttaaaaaggttgcatttattatgagaacaacaccgatgcaggaactactgagtagtttatcagatgatgactgtttctttccaaccatactgcccataacaatgccagggtggaagtcctccataagataactattctttgataaactactcagttcttgcatcttacttttaaacattcattgtcagtgtatatccgtgcactgtatcttttaatggtggtttgagctttttgggaaagctttaggtatatttgaaagggtagtgcagtgtcagtgtgttgtgtcatgccttttggctctcttgtattgcatataatattctttgtggttagaataaaagttttctttcgaaagaaaatcaccaattaaattagaacaaattaatatatatatgtgtgatgtatgaattgttgttggtttagattagggcgcatggcatgtgaaagactactctaacttaatagtactcataaaatatttagcttatatagtataaacaaaactacttctatataacaatgcacaaaaaatataatataatcataatgccataaatttataaataaaattatggagtatttaatataaatataatatagaaacaacacattggtgattggagtatttaatgatttatttacttttcattgtttgcagataattcccgcttcaagcttctattgggttcttacacctacggaataatagattttatatacgagtacgctactctggctatttcttggattggcgactgaccctacagaccaacgtgagtgtttccagcgtgttttgtcctcactcgcacgcttcttgggaaaacctcctaagaagtcaaccatcttgaaattaccccaagtcaagcacgcttaactgtggagttcttttgtgatgggctaccaatcaatccatttaagccctctttaactgtgcaatctcatacctacatagtctcagaatcatcacacttgaccttccccaagcgatgtgggattgtacagcttactcagtatgtccccttacagatcacgggactattgactgtcacaattaaaacattcgataaaattggaacgataaagagaagattagcatggcccctgcacaaggatgacacgcacaaattgagaaatggtccaaattttttgtgattctgacaatcagaagtctcgtaattcgtgctacacttaaattaatttaaatcatatactatatttaggtggaaggtaaaggtatataaagaaactctcaaaattgagtaaattttaataaaatataatataaaatttgttaattccatttttgnnnnnnnnnnttgacaaaaatattttattattcattgtatatt

SEQ ID NO: 69803 - DNA, 1269 bp, Cannabis sativa
tgtaatacgcagttttcttaattacttttatgatataccattagacttttaagaagccagttttaataatagctctcttgatatattgcttttggttttcacaattcaaggggctagacaacttatttcaaagtgtaaatatttttaatttttgcagtgagactggcaaaactggtcgctgacaatgttattactgcaccttgtgacacatcggtgttatatccaaagagtgggggaaatctacattgttttactgcagttaccccttgtgccgttcttgatgttcttgcacctccttacagagaaaacgctggtagaagatgtacctactatcatgactacccttatagtgcattctgtaagtagctggattatgtttcatttaatttctctatattttgaagaaagtactgatgtgttgagctttggttattaaaaattggtttgtttggtgacacttttttttctcaagtaaaatgaatggtagagagctttaatcttctttaaagatctccaccattaattttcactagggaaaaatcaagtgttgctaaggaagccaataacattttaccccagcaaaccaagtaaagttaggggatgagaaggagacctacgcatggcttgcccagatagaaactccagatgatttgtatatgcgccagggaaaatatgttggcccaactattcgggtctgaagcttaggcaaagcactgagacagatgattcagtggagtttcaatatccatacattccagtctcccgatgctagttcttattatggctcagagaagctttactagagaaatgcttctgtgaagtgcctatcaatgattcttcataagagccatttgtaacttggaaacttgtaaagctgtttatgtaagctaaatcgtgtttttgctctgtaatgtgccttggcaagatctctttatttaaatagtttgttcttgctcatgtaaataatgtttgcattatcaacagtagtaataaactctcagaaactagtcaaaattcgatacaaattaattgtgaagtgcttattgggaagatgctagtcaatcagaccaaatatcagaatctatatataaatataaaggaatgcacaaagcattctataagtggcatcttatatgaagtatctttctaattctttgctatttccattttttacttttatttagtttttaaattactttttcattcaattacatcataataatttataaattagtaataataacaataataacttaattaagtttgtaa

SEQ ID NO: 69804 - DNA, 3698 bp, Cannabis sativa
ttttgacatggccttgtagttggtatcgcccagccattggtgaccaagctggctgaaataaaaatagtcggttctactctgcatcggcctaaacttcaacttaaaatagtaccaaatctcgtaaggggtacgtaggcggaggccaaccaagctccctttacaagacaaacatcgccgacagatatttaatgctattcggcatgagttatgtcgggcacatcccaaagtaagttgcgatatccagaaagtattgatgaagcgacaacaccgccccatgtctaataaagcaaagtcaaactatctatttataatttttaaatttatgataattaattaataattaaaataattaaaaattttaaatatctattatctcctttattctcttatttttctgtttaattttaaattttctctttaattctctcatttttctaatttttttattcatctttatttaattagagatcactaattaattaaaaattaagaaaaaataactatacatttatatattacaaaattaatctaccttatcaaatgaaattattaattaatataccaaaaagattaaaattttaaacttattatgttaatcacccctcttccctcacataataaaactaaatacttatcgtttaatttattttatgtacaaagtaaacctattacaaataatattaatgatgattacaagtggaatacagtgatgaaattaactttaaatataatggtgactacaaatgatcaaatacagtgatgatagttgttttgaaattatatgatgagtattttatagatttattgtcctctttctgttttagatctctattttgtgtaaaaaaaaaatagtcagttcttaattttcttcactataatgtacatttttttaaaaaaaaatgcataattttttatttttattttttttttatgaatcagcagtatatttattactccaaagcatatacattacaacctaatagcatcttcacaagaagatctaaatatcactttctctatacataaacattcaccatttacaaaaaagaataccattttgtatcactatgcccaaccttcctaggccaaatgcaacaaattttagttttaacatccgactttattctatgattgattccttctatatataatgaaacatcaaaccaaattttctcatttctaactcgccaaatatgatataccaaagatgctaaggcagctgagaaaacccatttcttaaacttagaaaatttagctctgtcaatctatcgaataagattttgtaacgattgagagttggctttccagtcgagccaagacttcaattcctataggcaatgttggctaacgaacaagtaaagaacaaatgttccaaattttcaatttgcaccttacagaaaacataatgtgggtcatcaattacattaaaacgatgcaatctttttttttttagcttatcttggatagctaacccaaagatgaagctatatttagggacattaaatctacctcatccttgctttttctaataaactttttgaccaaaggtgattttttatttatataagaagttgtatgatatatattttttttaataaagtgttttatataaatttatcattttctcaataagtgtatattttttaaataaattaaaaaaaaatatacataaaaataaatttaaaattatttgatactaatttattatttaattaatatttattattttttagttatttattaaacgaaaatgtataggacttattattgaattaagccaatggcaatacatggagtagtttttgaaggtgacccataacatttagttgatttaagttgagctggcactagcccgttactaagaggagtgcgcgcgaacgaaataggcaacgctgagatgaactcggattgtgaaaagcacgcgtctcatgcgcattgatggtctctctctctcctctcttcttatgtatacaaatattctagcttcttctaatttcaagtgttactctgctagactgctaattgggttcagccaccttagtcttcaatcaggtgatacttaatttttcttgagaatgtggcagaaagttactttaattattcaattgattattggttaatataatgtatatatacagatcaatacatagaatggagggattgagaccgcaatcgactgtgaaggcggcgattgtcttcatactactcggatcgattctgttccgttgtgtatcggctgctgcaactgcaaatcactccatcgattgggaccttaactcaaacctcgaagcttggactgccaacactatatttcacgtcggcgattctctaggtacgcgtatatatattattgtaatattcatagcgctttatgaacttatgcctagtgtttggttctcgagaaatttttagatgaagtcttcaaattatacttcatcacctgcttgtgagaaaatttaaccgatgaaaatatcgtccaattaatatcttagtgagttctgaattgttaccatttatatatatatatacacatatttatataatgtatggggtagtattctcgtacactccggtccacgacgtggtggaagtgaagcgagaggattacgatgcatgtgtgatctcacacccaatcaaaacccacaacgatgggaacacagtggtgaagctcaaccaacaaggaaggaggtacttcgtgtgtggccgccaaggacactgccgaatgggcctgaagctccatgtcctagtccacccccgtggcgcagaccctcgttcaactccccacccatgtgctgctccggaggctttcttcatcaatgtgttctggttggttatcaccaccatactcatcatctttatgctatctctgttctgattaatatggcttccattcttatctcttggtatgtgcattggttaccatatatagtactattgattctaaccgatctactggttggttttgttggtatctttgcatatggatcatgcattgtgatatatgaaaacatataaccgtactgcctatatacatgaatactagatatatgtgtaaatgtcttagtgttgatatatcgtttgtttttgtaattttgtgactaaacactactatatgtgctaataatgcgtgctattatatgatcagtgatcgtattacttgtctttcattatataactgatgagatcgtcatgtgttctcactttgtaaaaagatatttcccttttttaatgggcatgtatgaaaatgtctgaatattttgtacagggattgctctcgaatttaattttaattaaaattgtctttttaattatttacacaaaatatctcgaaagtatttggaagaaaatagcattcgggctccttttataaaatatcaatggtgatcataattacaactatcatttaagtgttgttgtgaagaactccgatatgacatttttttttttaatcttagatatgacatttgagtgagtaggaaatagtaatgaaataaaacagcaacgctaggtaataaaaaaatatttataatatattggtgtatttttaaagaagtaccaattaatattggttatttttgtttagtatttttaggcaagttggtgtgacgccttgtgaaagataaatgattaataattttttataatatttatttaattaaaatgtgtgaaacatatgttaaaaatataacatagattat

SEQ ID NO: 69805 - DNA, 2441 bp, Cannabis sativa
taaaacaaatacaaaaacaaaagcatcttatttttattttataaaatttgactagaatgaaaattaagcatatttggtatatttttctcaataaagatatttaggtaataattattagagaggacgtacggtatgacagcagcatcaattatgtcggggtgggactgaagcaattgttccaactctgctggagccacctgaaacagtgaaaacatcatcaataattggctacgcaccttcaataaataattcagataaatactatggtgttacatttttaaataaatatataaaaataaaatcagagctaggttaattaattattttggtttggaataatatggacctgaaatcccttgtatttgattaattctttgactctatcgaccacaaaaaggaaaccttcatcgtcgatgtaacacaagtcccccgtcttcaaccacctctctcccccacctccttctactatggctgccttagttgcttcttcgtcaccaatataacctatattattatttatttattattataatatataatacaatgtaaatctccactaactaatatttatttgtactataataattaattacgtacctaatcatcccacccttaatatacgtatgcataattaataaattaaatcatggccggctgtaacgcctatgacattgttttaattaacataaaaaacaataatctaatttttatattattatacctctcataattgagggtcccttaacccaaagctctccttcattgcaaggaggcaaagattcacctgtttttggatccacaattttggcttcaaacgcttctgttatctttcccgatgaaccccaccggagactttcttcagggttcaacggccggaaaattgctccagccacctcagtgagcccataacccttaaaccaaacacacatttagatactaattaatacataaaaaatggaacattaatcaattaagtattaattaataaaaacctgagctagaactacgttggggaatctagctttgaaagcttcaataacctctttcctaagagccgagccaccacacgctaccgtttgtaacgagctcaagttgtaagccgccgttagagcagtattcttaaccagagccaccacaatcggcggcactagcgaagccgtggtcacctcgaattcctcgatcgccttaagcatttttctcagctcaaacctttccattaacacctccgcgtcacccatcccaaccgccttcacgcagctaaagaacccgtaaatatggaaatacggcaccgttttgagtaaaacacttggattcgtcttacccacgcgccacgcatgcgcgtcgtagctcgccacgagcgatatcagattacggtgagtcaacatcgcgccttttactttccctgtggtcccagacgagtacatgatcgctgccacgtcggattgactcacttcgagtaccgagttcagttcccgagtcgaactcgtcaacatgagcgagtcgaactcgggagagtccattgaaactacggtttttattagattctccagcttaggggtgatcgctgacgtggcaaaggctatgatcggtttgctgagctggacgagtctggcgatttctgactcggtgctgagtgggtttgcgggagcgatgatgactccgagagtgagtagagcgaagtagagaatcggaactcggagcgagttgggggatagtacgaaggctgtgtcccctttggtgagaccaatctgggtctggagattggtggccagtgttttgaccaggcgagtgaactcggagtaagaaaggcggtgaccagtgtctgagtcgatgagagcgagtgagtcggaccaattccaagggcgagttcggagaatggaaagacagtattgggggagtgtgagaggggcattttcgggaggaaggttgagaaggggaggtcttaggctttgaaaggtcttggtttgtgaattgaaaccgcttcttgggtcgacggtgtctttcattgacgcctagtttaggagaaaaagataattctttagagcactcttatgttgaaagatgatataaactctatttccattttaaacttaagtctttttatattctttaaatgttttagtttaaatatattttaatatagacatgctaaaagtaacgttaatatccttattgttctaataaaatatggggctccatataatgacgaaatatttacatttgctaggcaaactagtaactaataacaatgattattttaataatatatatttaaattatttattgttaaaaaatttggaaaattacagataagtgacaaaaagtttaatttaaagtaaataaatctccaacttaaaatattgaccttaataattcttaaggtcatcattatttaaaaaaaaaaaaatacaactgattttacgagatattatttgttatga

SEQ ID NO: 69806 - DNA, 1698 bp, Cannabis sativa
aatcttggactataagaatctgatgcacatttccaaagaatggctctacaaatggctttgatatccttcagaagtcttttgggtaagatcatgatatgagcggatgagcccaatatgaatgtattgcaatgagtaccaagttgatcaatgtcactcttcccgagattccttgtactccaaatacgaatcctccttgtcatcttctccacaatactcttacattcaacaacatatattttctttgaataaatgtgaataccaaggtacctaaatgagagatagctgcgagcgtaaccagaaacattaagcacccgatccacttctaattcagacatgccatgacagtacactgaagtctttgcagcattaggatgcatctgtggtgttaatgataataatttcaaacccctcaacataagaatgattgaaatataatcactattacagaaaagtaaaagatcataaatgattcaatttcagagtaacacaccgatcatgaaacttgaagccaggccatgttcacatcttaatcatgatttgagaacagtaaaaaaaacataaaaatgatgatcacaaatctttgtaatgtgatgaatatattgcctagataagagccagtatagaatttataagaatgagaacttgacagtctgattccatcaccagaaattgttgaaacaggcagaggtgaaggactagatagttgtggaagctaggacttcactgtaacagtaatgaaccagaaccatgaccaacctcggtaggtttggactcaatagggtcctaatacgaagccaattcagcaaccaagtgaccgtacgtgagctatgaactctcaagcatagtactatgaacatgtttaatttccactaaaccaataactatttcaagaagaaagtaagtagtagttagtctttgctccttgtaatatgaaatttgtttaatcacaaattagtgagagtaggatccacctatgaactgctgccaaagaaaagtttaatcttcaaaaggatattaattaagggactaaagtttcttccacccaaattttattttaattcatttttaatctgtaaatattcacaataatattgaaaagaaatgaattaaatatataattaatattgttgttcttgaattttttatactattaagttgtgcctcctataatatattatttaatacctttcaaaattaatgtaacttttttagtaatgtggaccttcaattcaatcacattctatttatttttatagtaaaatgagtgaagtggtgaatgatacttaacaaatgcaaattaaatatactttattatttaccattaatgaataatatatatatttttataataattcatatttttagttttaattttttaattattaaaataaaaaaaaaaaaagtgaaatgtatttaatttttatctatttatcaactattattataatgttttccaataaaattaaagaaattatgttaaaaagactatattactgtaaaaaattatattttgataatattattaagaagttgtatatcataagagtacaaagtccaatggagtaaagcacgaattattcaaatgaagtatattgattgaatgaaagagtttacattatggcagcatataggcatttggttacaagaagtaactttgtaactaactctaacaaacaataccaattctaaacataatta

SEQ ID NO: 69807 - DNA, 2144 bp, Cannabis sativa
aacatagacgatgatcatatgatagttatcatattttaatcattattatcatttgcaaaaaaacaacctgaataagagaatcatcacaagctctgtcaattaatcttccccgtccaagtaagcaaagtaaatggaccttgtgaacaatctccgcaatttcctgcagcaaaacaatgaacttttaatatttaaataagatgaacaaatcatccaaaaaaattggcagcgagtaacttattatgggattcacatatcaccttatcttctgcagtaactctgcgaataggtttccgcctcacagaatctggtgtctcattgaattcaattgtcacctcattacttgcaggatctaatgatggaattgatccatcttcccaatctaaatcatctatgtctgccctgctttctgaaagattgcatggtaaagtttcctcaactttatcttcccttaaagtgctgccagttgtatctctactacaaccatcagcctccgaaacagttaatttgaccctcgaatctatgtcttgtttgtcatccttttcggacccacttccttgctgaaatattatcgaacaaataaaaaaaatgcaaacatttccgcatgttaagttactgaaagaaagttccacgtctcttaaggctccatcatggacataacatccacaacatcgaatcacattgcacagttatagtagctaattccccatttagaaaactctagatacatgaaatactatcataactaataaagtaagtcaataggacaaaccctgctacttaagtcacattgctgcagattattgtcatttttctttgttcccctagagccacgtttattggaacgtctcagaagtttgccaacagcctcctgtgatttttcagccagagttcctgaaatcatgtacatacacatacatggataaaattaattacaagtcaatcctgcaaccagtaagtcttttctttttaagaacaaaccattgtcattaagaaactcggaagagcttctgctttcagaatcacgtataggttttgttgaagtgtccgtacctgcacaaaaaatattacacatctaattatcaaaacatgaaggaaacaaaaaaaagtgtatgcatgaatatgcaatgaaactgtaaaatacattacaaatgacaatgtctatctagcttgcttgcttttatcaaagtctagcattattttagtttttaatacttatttaaatattaagcaaatatatacctaaattaaactcatttctgcttttgcatcaaacatcatatggttatgtttggtatagtattggataaaatgaacattttaagtcagcaattcctcttgtttttccatgttaacgtcttaacaagcaaactaacaactcatttaatttcatatgaactcgtagtaattttcttttttaaataacgccaacagcacttatttgggtctcaaaactcaaaccaatacacaagaatcaaatccctacaacccaaatcatcaccatatgaccaacaatctaagtggggtctcttcgtatttgaggaaaacattgcatttcgtgttttgagtttactatactcggaaagagaactggggagtgtgaaggagaccaaaataaaaactgggattggagagaagcaagaagttaaatttacctgatgatgatttcttcctggtacgcatttcgtttgctgaggaagaaagagaaaatcgcgcctaaaaatgggtcagttggctttggcggttccagtcatacgccacttcatttcactatctaattaaatacaccattgctacgggtgcacatttacacccgaaacaacctgataaaaaattggttttaattttagtagactgggttcaggtgtaatccgtttctgtaccagattgagttcgagtttaatatttttgaaaattcaaaaccctgaaacccaattagcattttttttttatttttttttatgtatatttattatataattatattatatatatatgtttactgagtttatgtgttagtttatgttaatgtgttagtttatgtttactgagtttttcgaaaaccgaataattttagagcttaagaaagtaatgacggtatgaacaatgcaataacagacaaatttttttacgtggttcaggcatta

SEQ ID NO: 69808 - DNA, 1451 bp, Cannabis sativa
tagaatatcattttaatggaatggtcgagagtggaatgattattcaaaaagaccattccaatgcaagatatcaattttttgtatccattttacattttattccattcatattcccattcttattctaactaaatgccacctaagtgttgttagttggtcaatgcctttgaaatcaaacatagtgtaccaagagaaaagccacaaatttcacacttctataagttcaatttaaagcctaaaaatattcagtatcaccttgcatattcataatactcaaattcacaatgatatgaatctctacatagcttaaccaataatatactaaagttcattcacttcccaattttcttaaatactaaatataaacaaaaacactcaaaatgcactcaaaagcttcatgaatcaaatcacaaacttgcacttgaagcctcaaaatatgaaatcaaatcacaactttcacacttcaataattccaatttaaagcctaaaaaattctcaatataaccttacattcataacattcaaaattctcaatgataaaaaatcattataactatatagcttaaaacaaaaccaacacccaaaattcattcattccccaattttaaaaaacactcaaaatgcacaataaagcttcatgtatcaaaatcaaaaataaaaatcattacttgagagagagagacaacatcttcagaagaaagtaagccaaacccattattcaatggcttgtcatcctcagtttcaccggacccagaagcctcactgggagtggggacagcatgagtacgaagtttataaagaccacaactttcactgattttcaagcacccaattcgcttagtgattgttctaactgaagaagattgagtattattgataagtggatgatgttctggaaagttgggaataaacacagagtttgccagggcttccatggaagacaacacaaagagaaaaaaagatgttttttctttttgttttgggtttggaaaaacctttttaaatacagtaagagagaatgaaagaaagggtttttcgttgtgggttttgtgaaagagagagtgggagagattctcccccctttattttctttattatttatttaccctaatttagatttttttttttttttaatttttgattttgtttttctttatgggtttttgggtttaatttgaattttgtcaacttgtacatttcacatgtaataaattatgcattctaaattttttaggtcgtcaaaaattttattcaaactgttgagattattagatttaaaaatttttatctaattttactaaacaaaatttgatgtagataaaaatttaagggtttgtttggaatgtcgtatttggtcttatattgtattgtattttatgcaatatttttatgtaaaactatatgtggtattaattttcatagacacctaaatatataatattttagtataa

SEQ ID NO: 69809 - DNA, 1442 bp, Cannabis sativa
tgaaggcagattagtaaagcaaaaatatatatataattcaaaatagtaatttttttgctaaaatttactgttacttgattagctggctcggcccatatataaatggtttattatttttttacaaggaaaactaacaataataaaatcccccacaaaattttagttttttttttttcttaaaatatgaaaagtagaaagaaaccatcaattaaaatgataatattgtaaagaagagagaaaaaggcaatgatgaaaaattgtgagtttggaatgaaacagtaatgggagtagtagtactagttgtagtagtaataagaggaatgaatgatgcatagtgtatggcgtcatgaataaatctgatgggtgtggctggcagcctccattatgaccataaaaaagaaaattaaataaataataaaaaaaaaaacaccctctttgtgctgcacgcgcatgcaccccaccaaactcaacacactatctcatatctctctctctcttaattctcacacgcaagcttagccccaaaatatataaatcctctttcttttttatctatctatctatatatctctttctaaaatggtcaaccactttgttgaatcaaatcttacttgaaaagtgtaaaccaagctctctctcacagatatatctttctcaagaaaaaaaaaaagtgtgaaaagttgccacacaaaatcttcttccttatcttattaggtagcattaatctaattagttttttgaatagaaagaaaagaaaaggggatgggacaaatgagtatataatttttattttattaaaggaggaggaggaggagggatgatgaaagtgaaatagagtgttttgaaaacttattaataactccctaagtcccaaaactgaatggaattggaccccacaattgggccgacaacaaccgtagaaaatgggcccactaagccaccacatcatctaggcgtgtgtcccaacagctcggcaaatgtggacccatcttacattgtttgagttagacatggtgaccctactaggcattgcctttgggcgacaatagatgggttctgttgggtatgcgaaacaaagtgggctttgggcctttatccgccgccatacaatgctcttgcacgcgcgcacattttgcacgcatgtgaactattgtttccattgccacgcttcttttttttcttttctttgtttgtataaaaacaaataaataaggagtggtgctacaaacaatgggtgcacggtgcaccttcggacgggtatcatcaagcatcaggttttgggcctcagaaaagtattaacgagccggcgcctatatggaccggttcaggtacaggtttgattgggcgggcgtgactcggttttagacgggtacgggtgggacattcggctttgggcaagattaaattttcaaaataccttttttttttttatggaatttttc

SEQ ID NO: 69810 - DNA, 2822 bp, Cannabis sativa
tatttctattcaaaaacgcactatggagtagataaatttaagttataatatattggggaaaatgctcaatttgtttgtgtcaattacggaaagtgaaatttgggtcttgtcaagttgatagtttattagatcatgaaataaccttaatcgttagaaataagattaatgaatagtttttcaatggtttgatatagagaagtatggatattttttggtgtaatgatttttccctttgggaaattactaagcatttgtcttttgtaatatattgcagtttgcttaagtacccatttagttaagagccatggacccagctgagcgcaggtatttggaggatgaagattcaccagttgtgaaaacaatgaaaggtgctactacaggttttgtcactggaactatttttggaaccattgttgctacttggtatgatgtgcctcgtgtcgaaagaagtgttgctctccctgggctgattaggaccttgaagatgatgggtaactatggggccacatttgctgccattgggggagtttacattggtgttgagcagctcatgcagaactataggaaaaagagagactttgtcaatggagctgttggtggttttgttgctgggtcaactattcttggttacagaggttagcatttcattagattgaatgactaattgctttaatgtcttgatgtaaggagtggaaaattagattttatttggtttcgtagttgatgtactagtataaaatttagtttctttcaaatcatcacatataggtggtatcaatgctttagctgcaattttcattggaagaacaataaggtttgaggggataatgcagctgattcttgtctagagattgaacattttatatgccagcttattagaatgaaacatctttggcttgatatcctcatgtctgttcccataactaaataggaatagttctgatttttctggattcaaatgtcttagtatatgatccttggttattacttaccgatctgatacaaccacttagtttgagttaggaggatatgccggtagttatatactactctcatacatggttaatgcgggatcctaacaatacacccccttgtggagccaatgtatacggcgacccactctacggtggcctactctgggcctaatacacaagtctctcgttttgtgacgtcaatcccacttgggagtgcatgggtttgatacaactgcctgggtagaatttactcctaaaagctagcttaagagaggaaggtgccaagtatttatattctactaaccaatctcgtacttggtcaacttgagatgctaacactatcacaagcttcataactcctaccagaaactgagtgctcaactgttcttgatttttttttttcccattacaggcttaagtgggaaatacagtgtgtgagtgtgacaataaagttgctctactctcctaatctgcatatttcttttaacactgtacattttttttctcgctaattataatctgattctgctgcatcaaatccatgcgtatgtttcattgtccattggtctgaaatttcaaaatcaaatagtagaatttaaaaaataaaaataatattactactttccaaaaaaaaaaagagtagaatttcacagattttactcattgctatgtttaaaatactctaaaacttgtgcattgatttattttttaataagccaaatggagatgatttgcctccccttttccaagataatcttgaatcatgcagtctgcatgtagctattagtcataggagattgtatgcttataagtatctgttaagccataattttgttaagctttcattcctcaattcatggacagtttagattggtggagagtttaaaacattcaattgcagttaatttcaaaacaaatgtctacttatggattggctttgttttctgtgttataggaagaagcatctcaacagcaatttctgctggagcagcattggcagtcacatctgctgctattgatgctggaggtcagaccacaagaattgacaacggcaaggagtactacccatataccaccaagaaacgatctgcagttgactcgtaatctatggaggctgctgttgaagaggacatattgtcatttaatgggagagaatgagttgctgtattaaagtagctgaattttcagagatgtaatcatactcactttttctctctttctatgcttttggaatttagagctcgagtgtatgtgttaattttgaataaattctcttcatcattgcatactaataatgtgcgatagcttgaaatgagaaaggtcaaaacattttgattgagagaacttaattagcagtagaaaaaggtatcttataagtagtatgattgttgaacaatttctggatatttgacaaacaactcattctctacagtgaacattaattagacaagccatgcataattcatttttaaattctaagataggacacagttgtgaaccctagctatggtacattcttctcttacatcagttcttagcactgaaaatgtacatgatgtatgccttttttggtgtgatatgtcaatatctactacttcacattataatactagtgcacattataagagagaaagataaagtaatgtctgcttaactttattatgagaactagcagataattattatttttgcaattatggagatatattttaattttaggtgtataatgtatgttatatatgaaattttatattttcatattttatatctgacaacagtagaatgtgacgatttgactattagaatcacttagatacagatgagtattttagatttagcagagaaact

SEQ ID NO: 69811 - DNA, 2478 bp, Cannabis sativa
aagagtgtattatgttcttctgtatgagaaacttatggacttaaaacagtatttatagcattaccttatttgttttaatttccattttgcaggagcatatggaacttgagaaacgctaccgtgaactaactgatttattggtaagtcacattttcaaatgtttttaacaaaagaaaaataagttctgcaacttgttataacatctagaaaatgtatgacaaactgtgtataattaataattgttgtctgccattcagtactacaagcaaacacaattggaaaccatggcaagtgaaaaggctgctgcagaatttcaattagagaaggaattgaagcgtcgtcatgaagcacaggtttgcttttaggttttctaagctgcttgaatcattaagttacatcatcaatattatctctagtcttttctaatttaataaactcatgatgacattttacaggcagaggcagaaagaagtagagtttcacgaaggccctcatcttcttgggaggaagatacagaaataaagacactcgagtatgtttatgctttcaaagacctacacaaaaatatttttatgcacatttgttgatgactgttacataatattgtcttgagactctcaaggtccatgaagaatgttctgattgcatgaagaatgtttagattgatgagctttcttgaaatatgtttctttatttggagaattttaatatgaaacataataattgcaggacacttcccttgcatcatcgtcatatggctacagcaagtatgcaggtattaccacgtccctagttggtcagactaaaataaagaacaaaattcatgttattccttcagtttgattgtgtatgcttctatttgctgctgacagttgcagaaggcagcaaagttattggactcgggggctgttagggcaacaagatttctctggagatatccaacagcacgaattatcctgcttttctatttggtaaaaatgatttgacacgttattaaaacgactgattataaactataacatgtttgttggtagaataatttaaattacatttcaatgatgagtaatctttctacaggtatttgttcatctcttcttgatgtatctattgcatcgacttcaggtttgatataaaaccacctttttaaaattgctgaagcataaatttaactctctatacaactccgaattgaacttgatgatacatggctgagtccaatgtttcttcatatgcaggaacaagcagatgatctttctgctagagatgttgcaaatgccatggggcttgccaaccctaccttaccatgattcagtagctgctgctgctctcgcgttattattttttggccatactagtttctcctaaaatagattcttaaatgtctctccttaaggtgcattttcaattcattttgccagcctgaaatgccttggaggatgatgaagtaggtggcacaaatgaaaagtttatttctcattgtttccacactttattttcaagattggggaaattgctgcagattggtttggtttggaattgggaaaactggtttgcattaaagggtactcatttcttagtctaagggggcaatgtagcgatagtgtaattacttgaacattgctggctttgtatacctgtttggccctaaatatctactagctagccatctcaagtatttctcagggttggtactatttggtgtgcccacccaattctcattttgcattttcatcataattttgttcaaaagtgagagaaatgtggttacaaatacttgtaaattcaccattatcaatatttgtacccaaaatgaaatgggagatcttacactattagaaacatttgagctgactgaattctttcttaataagtttaagctttttcttttattttcttttgctggggggtggtgcgcggagttctataactatggtactactcatataggtgggaatgtctttttcttttctttttttctttaaaaacagttataattttttgaaaatgttgtaaacttttttttttaaagcaatgaccaaaatcatttataattaaataatgccataatggacaatttctaaaaaataaaataataaaaaattatctagttaaataagttatttatccattcaaagagtatgcacaattaatttatgtcgagcaatattggtcgtccgatgtacatgaaataggagcactcttaaaaaatttgaataacatacttttacatcatctaacaaaagcagacacaattgctaaagggtcaaaatcaatcagtacatcaaattttgaatggaaaatctatccagcgttacttatattgtcagataatatgtttaaaatactaaaaatcttcattttttactcttaagttaacagtcgatgcttgttcaacttcatctaattgttccaattgaagaaaaaaaatgttccaaactacataaaatacaaaacaaaaaattagcaactaataaaaat

SEQ ID NO: 69812 - DNA, 2340 bp, Cannabis sativa
aatagaatttttatctattcgtaagctgttattacaggtaaaaaaatgtaaccatgatagttacaataaaaatgtaaccatggaatagtcaccatacttatataaacaatcttaaacaaaataatttaataactaagatatcagtagtctaatcatattattctcgatcaatatttctccaacatttagaagtacaccgaattgcatttcaggaaggacaaatatagggagtgaatttataaaacttagtaaaaaataataaatatcaaagcatcaccagttcaacaaaaatgtctacaaagttagctttttaaataaaagcatctaatcattatcatgatcatgtataatcaaaatagaaaggtagcaaataattacaagagactaggtcctaggtacatgtcctaggtcttacacctataggagtgcacacataatccacctaatatgcaaaaatatgataaacatggttctcattaatataatcaaaagcaaacaaacaagaataacaaaaaaaatatatattctatattattttagaaaattcgacagcataaaggttgtaatttcaacaaaaccaaatattatgacatgcatacaaatttgtaaaaatatatatatctagcactcaatccctagaacagttaaaaaaatatggagattaagtacaatttttcaaatattttatagatgataaatataggaatatttctaatgctattctagggactactaatatccctaactgttttgagcttggctttgctcgtgcggaagaccgagcctgggctagtgacaatggaccgtggtgtgtccggggctactccttcattcttaaagcttggggccctaagaaatctctgtcgggttcctttgactcgactagaatatggatgcaaatccataacctcccaagggattacttctctgttgaaaatggaaagcttttggggggcaaagctggcaaagtaatcaaggtggagttggatgaaggtgctccggctttatggagtaagtttcttaagatattgatagagctgaatgtgaaccttcctctattctctggatgtttttttgagttggaatcgggtggacacagttggatacaattcaaatatgagagacttggaattttttgctataattgtggtattctgggccatcaaagaagaggctgccctctctcttcccctgttaccgtggctaatgatgttggtatcccgtatcccttgtttggcccatggctatctgtggcttcatcatatctcgatgtgttcgctggtgcaaactcgttttccccgtcccaggtttcttcctcacagattggtcgtggtgcgaaccggaggttgtctttgccgtcggccatgtctggtggtaggaggagcttgtatcgtccgaccatggtggggcgcggttcgaagcaaatggtgaaagtgacaggttagaagtctgtaacgggtcggctggctgagcagaaagtgtgggtgcccaagaaacctgcaatcaatcgacagcctggggtttcctatctgggtaaagagtttaacgttggagaagatgatgggcaaaaggttaccctcaattttccatcttataatttaaatcacattgaccagcctttgatgttgactaatgaatcagcccaagttgatgggcttatcagagaggatattgggcttgccttttcttcctctgggccgactaatgtctccaagaaagatcccaagcgtttgggtgttagtactgggccgtgcaagttacaagagaaggttattggtggggtcggccttttgaatttctataatgaccaagaagaagggacagatggagcaataaatgtgggccaggatgcaaatgggcctctttgtagggccataaacagttctaaatgcaatagcataattggtaacttggaacatgggccggccattactactaattctaacgagagctctatttgtggtcaagaggtaaattttcatcatgatgaaaaattagctttgactaatttttttcaagctcaaggcactcttttagaagagcttaaaaaatttgggaacttcgatctttatgagattaagtcaattggtggtgacattggggttcctactgcttcggaggttaacgagcgaactacccctttcaaaaagagaaagtttgatgaggcctccacatcactttgttcacgcccttggaagcttcttcgccctcatccctgggctatccgtgatttccccttggattcggagggtcgtgctaatgatactaaggtgacggaagacgagccctcggaggaggtctccctttccaataacgatttcactggcccggacgaatgga

SEQ ID NO: 69813 - DNA, 1647 bp, Cannabis sativa
  modified_base (640)..(641): a, c, t, g, unknown or other
agtttggaggcatatatatacatgcatatataatggtttttttttttaacattattaatatttaattaattatataagtagaacaaatccctcaaaatcagcttttataatatattttaactaacaaagatatattagtcaaatatgataatttaccgtcattatagttgagacttacttctcctgttaggttaatctattcaaattataacccactcacacatagatattattctacttaataactttctttttcaatattttaataaggttcactttataaaatcacatagaacaaaaattttagtggagcattatatgtttgctcttattttggagaaaccttttgttttaattagcactaataaatattataacggaaatttacaaaaatactgaaatttaagtaaatttttacaaaaatactatcacacggaaattttttcaaaaatactctgtttttataaaacaccagtaaaacacaaagcataacaactcaaaacaacagtagaacaactaaaaaataccagtaaaacactagtaaaacttaacacattatgctgcagtatgaaacttataaaaaaaatacagtaaaaaagtaaaaaaattctgcctaacaatatttttgtaaaaaaatgannaaagttagtataccatgtaaattctcctattataattcaaatactataactattagaaatattatatctatatcacaattctttttttttttttctttcctttttcttggaaaaaaaggaacatatagagtaagagaataatattaattaaacttgaaattattcaaataaaatgcatgtacaatggggaaaaaaatagaaaattataagtacaaagtgtaaaatgtcaataattcaaaaagattacttgctttgtactatatggactggatttgacacttaaagtgaagaaaaatgtcacatgggaacaaataataaacctacctccattttcacaaaatcaattaacattaggaattatataattcattcattcatctttaaaaaatatatatatatatataatatatttatatatttattatataaatgaaacgtggggaggacgacaagtggccgacatgtaaatgtagaaaagatcatatgaagagaagagaagaaaatgtgttactcataattaattattattattattattactatatataatttaattattaatggcttagattggatagtcataatcaataatcttgatcaatctcatgtgacattaattcttatatataagataaaaaagtagagtgtctgagatgatcataagcacaaatagtttgggataataagaaaatacatgaaaaagaaatataataatctcatataataattatgatagggaacttgctatatatacatgacaacaaaacaaatgtcctctctttttctatctcttttggtacgtgtacgtctctatattaaattattatttattttttttttaagaaaaataaaatttttattaataagtaaatcagacatggtctattacctatagatatattgttcattgaacagaatcaataaccatttacattaaatatgaaaaaaaaattaagaaaattatattatatattcattttgctttagttgttttaatttttacttt

SEQ ID NO: 69814 - DNA, 2707 bp, Cannabis sativa
attttatttttctatagcttttatattttctgtgttgaatcataatcgtgaggcttaaatttggttaatgaaaatctgtgttaatagtaacttttatttgttttcgtgcacatgctttaggactaattgcaaggagcaccccctcattattgtgagtgctctttcttataaaactatcttcaggctttcactcttttcttggaccgttagatccctgtatttttaagaggttttttttatgttcactttgacaatttcaattggcatgtatactgagtaaattaaacagacatgtggagagtgacgaatgccatatgtaaagtaaaaacttaacatttcattgataaggaaaatatatgatcgctcaataaatatgctatgttcagagatcgacctaggtgccttctttaatttagtgtaatataattaaggtaaacttgccattgataggaacaatttcttgtatggtggaatttcacttagaggagcatcttggatgtttgatttttacaaatcatagatttgaggcttcatttgaatgtgttggcttatgaatgttatgagtattgtccaatagaccttatagggatctgatgagcttcccaaagaacactcgctagtatcttgtcttaagaatctgtttccttcctccacacggatgtatttctctgctcttttgtggaagtcgtctaagctatccaactctcttttcaacatatttccccacaacccacctccagggtgtactgttcatctttggacacattccctactttggtaacttcaatattgaagtgttgcatgtagctttgcaaactttcttgctccccttgcttcacattggtgatacttgtgacaagaataatgttatcacatgcaaattgatgttgttggggggaatttgtctgaaagttgcttccaagatgtgattgtccccggtcctagctgttcgaaccatttatatacaacttcttttaatgtgatcatgaaacattgacaccttgccttacatgacacctttttcatcttcatcaggtcattaaatgcgccaagatggtactttgggtcagtgataccatcatatggtgtcatcttctgctccttgaattttggtggaagtggttccatttgaatctcccttgagagaggggattcttcatcaaactccccatcatcattcaaatctccatgcatagtggtagctatcttcaacataggtcttgcatttttacctccaactccttcatcctttcgctcatcctctcttgacagttaacgaatggaacttaggtcttctgtgtggttttcattgggcctatgagaggtactccacttgtccgattagtgtgtaacttatcactaaaattgatggataaggcctttcgcttaccttactcttgggtgggagacataggcgtggttcccgctagtatgagacctctttggtgaagtctcttcctttaggttatggggtgtttccctcaatgaaatcttctcatggtgggtaggctcgagttgcctcaactagcccgttgggctcttgtctcgcgacaggctccttccatgctcatctcttgggatgttatgagtggatgacatggaatcacctttgctagagtatgcagttgagatcttgttccccactcggtggcttttatgatggaaatgcgaggcatggattttgcctttgagtatgtcattcaacactttttgcataccagccacaatggtttctagcctcttattcttccagtggaggtcgcttatttcttcttcacagtagtgagcccaagaggttaaactcaccgagtacactttcttttcctttctaggcccacaccttgaagtttcgaggtttggtggcacaaaaggcggaaggcacttgaccagagatggtgtaataccctaagattaagagaatggattagcaaaccctaactagttaactgtgtataattatggaattatatgtttatataatttattatatgtgaattataatgatttatgatatgttaagactccattggtgagccaggggcattttagtaattttgacccatgaagggtaaaactatgaatttaaattaattgtgtgcttatggactatattattatatagtatgcttgttttttccttttttaggtgtgttctgacaagttggcgcgatatagtcacaactgggtatttcgggtcgaaccggatttcgggactgaaatataattttgggatgtttaattattttatttttatatgagaaatctcaaatgtattatttatgtatgaaatgtgagaattatatttttgcccttatatgcttgaaaatgataatttggccctgcaatgtggtagttgtgcattttgtttataattaattaaagggaaatttttttaaggaaaagagggctttttttctttttatgcattttccaaccctagcagctgaacacccctctccctctttatctccatattttcaatttgcttattttggaagaaattgctttgaagctttgatttttggtgggttcatggtgcttgtgtgtgcaagggatttgaggtagttctcctaccatttctaatttctgaattgttgctgaaatgagaatttaaaagcatgttttaatgagtacgtgttcttgaaatgcatgggtatgaattgatatgagttggtgaaattctagtttgaatcttttgttagtagct

SEQ ID NO: 69815 - DNA, 1980 bp, Cannabis sativa
ccaaaataaaataaggaaattgtacaaaggtaaagaaaacaagtcatcgaaataaatgcccagcaaataaggtagcaaagagatctttagcaccttatatcctccaccttgtctgcatggccacttggttctccaaaggcactgccatagtggaacttgccacatgaaactccagctttacctccaagaagctctatcatcttgcctacagtcattcgactgatgacaacagaagaatattatttaccagacattttaagcttgtgatggttatacaaaatggttgaggaaatgaaaaaataaaaaaaaaaataacaaaagcaacatgcaaaattggttttgcattctctcttatcaatttctatttcatttgggaaccatatatgtcctcaaaacatccttccaattcattaaatcattctcacattggtgaaggatgttcgagcgagctggtccaaatgggtggtgattttattatggttttattttaggctgcttcctttttcttttctgagatttgggcccctatcttctttattattaattaattattaaacaatcactgaaagtgccacatatctaaacctatttgtcttacagatcacaatgtaggaggatcagaaaaagttgttcagcgagtggtagacttattaggcgattcctcaagcaaaaatgaggaatggaatgctgttctaatgcgttttgctggaaagtgcagtcttgagggatagactgacgcagttgtattcttattctatctcaggcttggcttcttaaatgaagttaagagataagaacaacttgggtcaagaactacggggagagatgcagcaatgagaggccatagaattcaattttaagcagtccttaggggatttttttttttcacaggatttttgggtgtcctatcaggtacatttaagtcaagcaacaacttaagtcagtccggcaagaaccacatagccaatctgtctccaatatttgttgaaatgccgtaactacagaaaaatataaatttcttgcttttcataccaataaagccaatgtaccagtaagattgaatagttatagaagtagaaggaattaccttggaaacccatgaggattcataatcaaatcagggcaaacgccacgctcagaaaaaggaaaatcctcctgttggacaatggtgccacaaacacctttctgtccatgtctgctactaaatttatcaccaagctaaaatgacaagaaaaatagatttaagattagactataaataagcaaataacacaagatacagattccaaatcagatgcgaacacccaactctcttacctctggtcgacgagtatgacgtattatgaattttatacacagattgttatttttatcagaataaagagcaactttatcaaccacacaagattctccttcaggacctttaaatgtctgatatgcaggtttatagtcactacattgataaataatagttagtaaactgcttatcaaagaacagaacagagatctaagttacaaagaagtcaagaacaacacacctatcagctagtccagaactcatttgccctccccttgtaactttaggcgattgtttgttaatatagatgtcatttggtcgaataatttcgccaggtgcagcaagtccatcatcatccaacacctgaagaaatcagataacaaattctgcagctgagtattacttgaaaaattagactattgttggggatgttaagtggcaattagtctctccagttcaaatattccaataaaggaaattactttaaaacgttgtatgaagtaaccgaaaaaaaaaaaactcaaggaatacttctttgccaagaaaataattacatcgatgttcattacaaaacaatgttaacttaaaacaacaacaaccgtacttgtattgttagattatagagaaaataataggagtacaaaacaatattcactaataccacagataatcttgccacaata

SEQ ID NO: 69816 - DNA, 2134 bp, Cannabis sativa
tgtataagagtcattcattctgtgtgtgtaacaacagaggcttaaagcggggacgttacagatactgaaatatataggactgcattgatgcatattagataggggttaaggcgggctaggcctacgcctagggcctacctaacctaggggcccaaaaaaatattttccatttaaattatacatatttttttaattattttttaaaataccacatattttttttaatgaaaggttcaataattttctttcttttaaaatccactcaatttcagggccagccttaaatgaatctctttagagaagtgtattatagaattttcatgctaattgagcttaacaacactatttaagcaccaaacatatatatatttaaccctttagtaatcaataattagaagtatgtagaaaaaaatatatattaaatttttaaaattttttagttatatttattcaaaacaaatatgtataataaaatagtatttgactttattggctttaagactttgtcttctttattaaatatatgtattatgattaatattaattaattacactttaatatttctgattatagtatatatatatatattttttaactcatgataaggtttcattaattatacttcaagtaatctctttatttaatgtttgacctaattaatagctaatctattatctatagatgcttaattagttctaattataaatgcttctaattaattttactatttgtttccttccaaaaaaaaaaccattttgtttaattagtaatcaagtgctagtgttgcaattaaagttttattctctatttttctaaaaatatcatagttttttttaatgattttctttttaacaatttataataattttgttgttatgattatattattatttacgacaaaatttatgatggttaaatcatttgaaagtaatgtataataactagataattatcataaaataaattaaaaatcttctaatttattaaaaattatccgaaagatttaattgttattattttcacttgattatccaaaaagaaaaagaaaatagcaaaaaaataaagagacatttcttacactttctatataaaaaaatgtatttatttaatttcacgtaccacagataattttatatagaaactaatcatattacttgtagttgaaatttattatgtataaataatatttaaaaattcagtgtatcattatttgtataaatatgtagatgattatttaatagtcatactaaaaatataattatgatagttaaattatttgataattttacataggtaattaataggtaaaaaaaattatttttaaacttaattatatacttaaaataaattaattttttaattaaaatatttaatattgtaatttaatatttataaatattttaatttaaaataatatagattacgtacaatcagttataagtaatttattaagttaattaataaattaatcacatttgttttataataattcaacaactaaaaataaatgtaattaaagtagttacatattttatataaataatgcttcagtagagttattgaaaacgactttatgcaaaattattttttttttaatatgtgttattacttcattttatgtccatattaaatattatttccttacttaatttttatatataattatttataaaaaacactatcattagcacttctttcttcttctctctctctaaaattttttaaaaattgctcctcaaattagcactcaaaattgtaatcaaaactaaaggctttgatatttcattttaaaataaaaacagagattgagactaaaaagaccgagggttctctaatggtgaagtcaaaaaataataaaaaaaaaataaataaattgtacatcgatctgtctcctctcaaatcatatacaccaaaaaaggtttttgcaatattttttgactctgccattaaagaacttttaagtctcaacttttatttttcttttaagggtaaatggcggcaaaatccccaatactttcgttttggtttcattaaacccccacaacccaaatttgtaaacccccacaactactattctgttagcaatttatccttcccgtccaaatttaactgttaaatgccaggttgacttgt

SEQ ID NO: 69817 - DNA, 1675 bp, Cannabis sativa
cataacaagaatccaatccgattcaattcaatgacaaagatgatccattttcagttcaccaaacatatacacatgacttaatctccttaacaagcaaatgcaccaaatatataaagttagccagcaaaatctttggtggaacaaagaaaaccaccattaatgtatgtagcattagtcacaataaacaacaggaaaaaatgcaaacttttctgtacataaacaacaagactatatctcataaatatgttcataaacctgaaaagtcgtctaaagagttaactctgagattaaaccttaaacacaataatgtccttaaaaccccaatacaaaagttatgttcttaagcctgaaacatcatctaaagagttagcattacctttatctttatacacaaatgaatcataaaaccattttcatctaacaatcaatgttcaaactcaaataaccaatatatatacacacaatccagataactcaaaaccaacaaaattaagcaaaatcaaaacaaaaaagacattagaattataccttcttcttgttggcagttgcaacatgggtatcatcagtcttttcagcctcagccttaagatcaaccttcaaatcctcaacaatactcttactctccaaatcccagatcttaatactgttctcagtagcagcacaaagccagtacctgttagggctaaagcaaagagcatgaataatagaaccagcatcaagagaatacaatctctttccctcagccaaatcccaaagcaagataacaccatctttaccaccactggcacagagtgaaccatcaggtgaaacagcaacagtgttaacatacccaccatgtccagcaagagtacacctcagtttacagttggaaagattccaaaccttaacagtacgatcccatgaagcagaaacaatagttggctgaagattattaggactaaacctaacacaactaacccaatcattatgagcttcaccatcagtaatagtatacttacactcaccgagtgtgttccaaagcttgatcgtacggtcacgagaagcagaaacgatctgacgattgtcaatcgagaaagccacagaaagaacatcttttgtgtgaccaacgaatctccttgctgagactccggctgctagatcccataaacgaagctcaccatcccaagatccagaaagagcgaactgaccatctgatgagagaacgacgtcttggacgaagtgagagtggccggttagcctgcggtggggaacaccgtaggtcttgtcgtccttggtgagtttccataggattagggatttgtcacgggaagcagtgacgatgatgtccgagttgtcaattgggcaagcgatggctgttaccatgtcggtgtgagacctcatgatgccacggagaactagtccttcagctgccatggttggattgagaagaagggtctagggtttcggctgctgaagctctctctctctgtgtttctagggtttgtgggaaagaaaagagtgttaaaaatgggatttttatatgtggggatttgaagagagaaaatcgttttgattagggttttttttggggatatctgaatgaacgaaccctaaggtggttgtttgtttggttgggttgataaggttattctttgtttggattaattgggaaaaagcccaattgttggttcttcac

SEQ ID NO: 69818 - DNA, 1900 bp, Cannabis sativa
taatgatgatcattataacctatgttgaaatgataagagtttagtttatgcatctcttacctgatttagtttttgctggagatggctgtacaacaacatgcattatgagaactcccccagcagctgtatcaccaaagggtaatttacactgaccaacagtcttgttgttttccaaaattttaccagaactgatcagtttaacttcattcgcagtcttcggtatgattgttttacctaaacaagaagccaaatttagtataagaaaaggaaagagaaggttagagaagcaatgagataaacacaatggacaagaataagaacattttacaatattatgtgctaacttcctcttaaccaaaaatgcctacaaagatatctaaaagtaatggtatttgccataaccagctaaacccgagactcaattttaacaatgaaatatgaaccagtttgagaatcaagtccaaatattcataaaagcaacaattttaacataggcaaccaaaaatcagattgcccagaacgaagaattgattttaacattcaaagaaactcaaactaccaccaacgtgtttcaattcccaaatccacccagatccaccaaattactactaaagcatataacagcaaaacccattaaaattctaagctttattctcactataatcacaccaaacaaaaagaaagttaagcaaaatccaacctttgggccaatcagccacaattctctgcttgagcatatcaaccgtcgacgccgacgagtaacgaaaaggtccgatatccgaaccatcgtataaacggaatttaatgtctaccaaatcctcttcaggcatctgaaacgttgactttttttaatccaaaagcttgaccagatgatcaattacgataaagcgaaacccttttacttgccgattaattgggactcgaaaatgagctcatagatcaaaaaagaaaaaaaaaaatctgaactttttgggtagaattgaattaaccccaatttacaaaaacttcacaacaaaaatgaaacagacccagatttcaaaatagtgaaaagaaccttttttttttttggtggagttgacgatcaagctatgcggattcgaaagaaaacttcccttttctttcttccatgggggtttttcacaaaggtcggtgcgtttattggtgaactgaatagagaaaaagaaaaaaaaaatatcgcgaaaaataccaaccgctttgaaacgacagcgttttggagacctcaaataccaaatagcgtgtataatgtcacggtgacgttttcgggttttgaaaggtgggttctttttgtccttaaacgacatgtcgcttttggtgttagggctccattaccgtccaaaatgtcccaaatcaaaattctgaaattgaagagggaatgatgaagaggaagagaaaggaaggggaggtagttgaagagaagaaaatggagatggatatagtttggcaaacccctgcaaacccacctgagcgacacgattacatatttagaaatggtaactccaagaacaaatgaaaaagatactctttttattgtataattaaacaaaagttttgaactttgtaatgtttaatgagagattgactttaacaaatctttgggcggaaattgtttagggaggcgccatgtcagaccgtactacttcgagtttatcgctcatgtatgtatctcagtgagcttgagtgtgttaatttggttattttaatgggataaaacccttgttaaaccctgattaaaccccgttgctgttttctttagctgaactcttcaattggttgttggcataggttaagaatcgttgggcgggaaagaccattgtggatttgtttgctgaggagtttaaaggacggccatatgagtactatgtatgactgttcatagctc

SEQ ID NO: 69819 - DNA, 1899 bp, Cannabis sativa
cccttcagctggtcaatggataggtaagcatattttgtctgtaatatgcttactttgtagatgcaccatatccatattgttttgtgtctaaatgcctattttgaaatgggcatctttgtgcaggctgtgcggcaggggatttggtagggcctattattgtatcgacttgccttggaaaagcctttagtattgaaatttagtaggtactaagagatatatgttaacatgttttgctaattcttcatatcgtagtgtgaacttatgacattttttacgatcagtttttaggaggataaaaaaaagtgagattctgagttattattctccatttcccctgatctgcgcttaagtcaataaataagaatgttaggcttgaactgccttttcttgtctattgtaatttgtatttattgaactgggctaatatttttagttcttaattgtactcagttttccctagtttaattgacaattccttcaactttgaggactccactatagttatcttcaaagttgattggttttaaataattgtcgttagagtaaaccatgtcacaataatgtgtgcatcgttgtattgcccacgtcttaatttggttccaattaagaatttgatagcacccttttgttttggctttctttttcggctattagagagaaaagttagggattaagtaaaaatggttgtgatcaaaatccatattatacttatggtatattacgatgtgtatacatatttatatattctttttaataattattggcttgcgggagaagaatgaagtgttatcatatgttgataataatccctcctaacatccaaatcttagtcgaataaaacagaaggacactgtttgatgtccgaagcctggccacaactccacagccaagatgactgggccggccttcttcgatccgaactcattcactacagtgagatggcccaaactttctgcgacaccttaaacataaacccattgttcaagtactgcgccacctgcagattcatccacacaacttcttccagtgcttatccatggccacccaccacgaccatgtagtcatccactacaatggccgctctcttctttgtcacacaaggtattatatttgttgaagatttgattttttttttttcaagattttagatgttcttttctttaggtttccttctctaattacactttcttagataattatctaaatatgtttatgttttcatgatttaatcacacaatgtctaaagtgcatggttccctgatcataatcatataaatatgtccaaatgatgaatttttccttttgtgactgattcatattcatattttgagttatttactgaaacagatagaaactgtctctgttgtttatcaatatgtgtttttattattttctttgttttttatgcacttttctcaccatgtaactcttgattttctaatggatgtaactactaacagatgttccaaaatcagtttttatgttcggattggtagtactatctaattatataagcaggagatcgtcttgtaaatgcaacattatagagtgtccaagtcggcactgcgttttacggattcatcattcgattgctgaattcgagagggtgatgaaattaaacttctgggaaagaaggtttcttgtgttacaatcatattgggttcatcactagtttttgcttctaagttctagacctatatttatactcaaaatggctttcttttttggtggctattgggtaggggatttttttgggccttctattgtatccatttgcctcgaagcttttttagtaattgaaattttataggtgctaaatataatttatttaacatgtttggctcactcttcatatgaagaccaataatttaaaaccaataatttattatcctttctagt

SEQ ID NO: 69820 - DNA, 2391 bp, Cannabis sativa
aacactttttgcatttttcttaattcttaagtagttcaaattgttacaatttaatgccaatgagatttttttttggcggcaatagtagtctcttagttgttatctttctgttatctttgactttgactgatataatggacacataacaactttcaacatttaattgagaaaaactaattaaattaataaacaaaattttaaaataaaacataaaatagatcaatcctccactttcctagtctcagggtctgtaactgtttcctcttcccagtatttaaagttaggactgcgtaattttattttgtgtaatgcatttattttatttttgggtgggcctgtgccaaccaacagcagcctttcgtcatttagtcggccttccatgtttaatgcatttgccaagtgaagagctgcctgagcttgtctatgcgctatatatgaagcaattgggggggttggctcctcttcctttacccaatttccatccttaattaagaacccacactccatccaggccttccactcccataaccattcaacaacacttgttctgtcgaattccatccaaatatttccaatacacgctcaacattgttcttcctgaaagttttaaggacaattccactcatcttaacccaacatttgatcatgcggtcaatcttacaaatgtatgattcccatcttcaacctccattttcaccttccaccaccccacataagatttccatatacaactaaagatcgtgagaaacatgttgccattatctggacgcttggctatatataaccctgccaatttagcacttctcccaaaaatccacaaccccctgttcatcaatctcccactcctcctcggttccacaaccaaccaagcacaagtaaccataacacaccaatcatagttcaaagtcacagagactagaaagaaaatctcggggggaaggattgttgcttattttgcattattactccaccctccaaaaagtagagttatgaatgggacatttatagtggactgaatgatatatcaacattatactattttttttaaacctcgacatttgtagtggacaatgggacatatgttatatcattggtttatctaaacctcgagatcttatctcattcaaagatgaatggtttgatttgattggcaaaaaatatcaaataagatatgatttgaaaatgaaaaaaaaaaatatataaacaaaaaatcatcaccttatttttcttctcttatgtcgttaaaaaactgttggtgattttagatacaacgcacttaataagtttacataaaatagattttattggattcttcttttttctatgtgtctgtcaaaaaccaaactccattacactgacaaattatatatatatacttattctgaaagattaaagctaatgatgcaatagtacccgcatgcggctgcggcatgcccacttttgtgtttttgacccttattattattattattattattattttcttctctttttctaatagataccattggataccataccaaaatcttacgaagccattaagctatcaaataaataaataaggactatatatatatattaatcttctaactaaaatcctatctaaaagacttatcaattaatcataaataattaaccaacaaaaaaattacaagttattggccaaagctgtccaagctttgccacttttttctttactttttctcttgttgaccaacaaggaataatgtggttgaaagatataaaaccaatcttttgaaccacaaatataaacaaagggtatatctcctcggatgctttttgcttcctaagacatagtacaatatggaaatgataataataattatctagttatcagtatgcaaggtagaatccaaagccaatattcagcttctaccttatatgccaatgcataaaattgtaatcggtatgcaaggtagaatccaaagccaatatttagcttctaccttatgccaatgcataaaattgtaatcggtatgcaaggtagaacctaaagccaatattcagcttctaccttatgccaatgcatagaaatgtaaaatgaataggattcttatccttctaatgctaaacactacttaacgatgatgatcataacaaaaaataaaaaaaaaagactttccctagctattgttctaaaaaagcaaacatgtgttagctgagcaaagcttttgtacgtaatccccatactgctgaggcaaatacgggtattgtaccatttgagggtattgcacattgaaaccagggtgatgagcttggccactctgtgcatattgagcatataaagggtagaaattagggtacatggcagcagctgccccagaacccccagaggttgctacatatggtggatattgttgacctccatac

SEQ ID NO: 69821 - DNA, 4008 bp, Cannabis sativa
ggagatagtctaataacgttagtgtaaatcattaactaatttttttaatgtgcaaaaacattggagaaaatgaaagatttgggggagttcttgctctgctcttgtgtttgttttgtgtcgtttgacttttgatgatttttgcgtgttgtttatagtcaagactcaagtgaacgttccctataccttctcgtactagggcccactcccactccaaactatataaagtccatacaacaatagtttttggttacttacactccatcatcatcatcatcatcatcatcaaaaatttagattcaatttcagaaaaagaaaatagaaatattcatttcagattcagttttttttgatgacccacaaaaggcattctcctcaacaggctcgtagtagtagtagtagtagtgatggttttcctatcccaattcgagattccaagaaaaaacccattttcaaaaggtgggtgtttttccatttcttctcttgcttttgagttttgattctaaattgttgtttttctcttattctttctaaatttgggattttgtgttttttttttttctctttccagtgttgttggaaatttaactagaggattttctcttaatgaggcccaatgggagccttttctccgaagagtggtaagatcatcttggtctctttgtcaattacttaaaaagatttgatctttacttattttaaaggattttctctctctttttcttttgttttatgtttttcttatagttctcctagtggggttgtttggtacttgagaaaaatggtatgactatgtttatcataatcatgctttaaattttgacttagattcaaacccttgttcattttcatggtttgattttaatttggtttgatttggggtgttttttacagaagtatttgaatttaaattcttaaaggctgtctcttttgttcattacttaatatattttgtttggctttacagattcgagaccaggttgaacgtacaatatgttctgtcctcaatttaaggttagttctttcaactcaattttcttgctatttaataagattgagaatttaaaaggttctaataagaataaaaccactgtctttgttgatttcaggccctcagattatcaggaaaattcacctgaaggaggcggtttgcggttgcaatttgtaaccgaattacctaacaccatcttcactaacagcaagatccaaaccgagcaagaaacacctgttcaaatcatcctaactgatgctaacaacaacatagtcaattcaggaccatattcatccttgaaagttgaggtagtaccactcaatggcgaatttggttcggatgatcaggaggaatggactgagaaagagttcaatgacaaggttgtgcgcgaaagagaaggtaaaaggccactcgtgactggcgagttgaattttaacttgagaaatggggttgccaatgttggtaatgtatcctttactgataactctagctggatcagaagtagaaaattcaggctgggagttagagcattgcagaaagtttgtggcgaaataagaatcagagaagccagaagtggcgcgtttaaggtcaaggatcatcgcggggagtgtaagtttcaaaagcttaactttttgtacttgttgctcatatcaattcaagtaatcaatcagtgcttatttgcagatcagggccgtctttagggtagggtggctagggccgttgttttcaaaaaatagttttttagttatgatgccaaacatacactttaactttttgtatttttgctgatatcaattcaagtaatcaatcagtgcctatttgtagattagggccgtctttagggtagggtggctgaggccgttgcctagaacccctcagagcttgctttagattgaattttctaacatcggtttttgttttgtttcagcatataggaagcatcaccctccatacctacacgacgaagtatggcgtttggaaaagatagcaaaagatggggtgttccataagaagttggccgcctctagaattgaaacggtgaaggactttttgcagctgtacacgaaaaaccgttcggggttaaaaaaggtaagaagacaaacatcatcttagcatgataatcaacctaagatagttgatttagtttgataatatgtgtcttatggaaaattggaattgcagatactacctgggatctcgaacaaggtttggaacgcgattgtagaacacgctttcaattatgtaaatgataacaaattctatgcataccatagagttgaacatgatgttatcatctacttcaattctgtccttaagtttgaaggagctacattttgtggccgctttttctctcccgaagaactcaatccatctcagagggtatccactctaatttcactgcttttttcgattttctgaatccatagcttcagtatttgttatgtgaaactgatgagtatgctctttttctttattccccttaggttctggttgaaaatctgaagcaacaggtatacaaaaatgaaattgaactggtcccgatcgatgatctttctattgctgatattccaagaccgctgccaagtctacaagctgcacaatacaatgacttctcaattacacaagaaggtatacaaatcttaacctgtatatgtcaatttcggttcttcctcacattcgcatactgtatctaataaactgaatctctatgttttttgcagtgactcagccgatgattgaactcggtctcagccaatcgtcaactctaccatcatacccttgtgaagcagcagaagttagccatcagttagaactttcttctgcaccacagaataataaccattcatttcaagtgttttctcaaaatcataggaacagtttctctatggaagattttttatctccacagtacaatgtaggatccaattggtcttctaatggtttgcaagagccagttgtccttagcagccatttcgttacagagaacatgtttcatcagcttcaatctcccacatgggaacaagggcctaactttattagcttcactccaaataccgaagcagaacaagacctttcccctcaaattcctgattttttccatacctcgaaggatagaaaacgcaaggcaagctggtgtaagcttcgcgctgccttcaagtgttggttatcggttaaactggccgcccgaaaagtggcacggccaatgtatttaagctactaggcaattcaagctagtgtaagatttccactctcttcaagtgttcactatcggttaagctggccgccaaaacaatggcagggctgctgtatttaggttactaaacgatgcaagtcggtttaaggttgttactctcttcaagtgttgggtatcagttagagtaggcagttgtatcagataagtttaggtggtttaagtaagtaccatcaagttaaaatggtactcttttatatgtttatattataggatagtttttttcactaatctagtttcttaatcacttttctgttgttatgttgtcctccaaaaatgaagggagtttttcatgtacattgctcattatgtcatggtttttttgagtccaatgtgatgatgtaaatacttgtttacatgataatatgagaaaggttctggtttttgttcattaaaaatttacgaatttttatatcacatattaaaattttttatttatttatttatttatttttttactgtggggtggaattttttttaaaaatattatgtattatgttaagtctttacggttgttcaacgattgtttttagttgttcgactgttattttagttgttctgttttgttatttataaaaaaatagtatttttgtaaaaaaaattttataacaataaaattataaacttttacttaaaaatttagtatttttgtaaaaactccttaaatctattagggaaatttacatagtatactagcttttgtcatttttttacaaaaatactgtctggcagcattttttacttgtttactgtatttttttataagttt

SEQ ID NO: 69822 - DNA, 1053 bp, Cannabis sativa
ttttggaatcattctatccacaaaattaataatttgatctttcccccttcttttgtataaaattcaatgaaatatatatgttatcttacaaaagtagtaagggggataatatatagtgctttctaagtgctctttgtttttccttcctactttatgtcccttcatatcattcatatacttactatgctctccttcctcattattgatcttacccaaacttaaagttgctagtttcaaaccaaaataatgtgaagtcctttttgattttatgtatttatttcataggctaattaacctttatcttgttcttgtgattgaaagaaagaattatagagtttattgttcaaagctgattcatgataacaataataataatggagagagatgtctgattggagggccatactccatttgaattattagtttgggtctgccttcccttgctttgaatgcttatagaagttttaatttgcaccacaagttagtctggacacataatattattcataaatgaaattgtacagaacttaatataatttatttcaattttaaaacttttcttttttaaaatgcttacctataccttgtgataatgagttctatctcaaaactaattagtgatgagtagagtcgtccgtacttttacatatgacttaatatttttacatttgattcatgtgagacattgttatcaaaaaaatttcagatggttattttttgctcactaatcttgaatcacctcatcatgaagttgtgtcatttgctcgcttatttttgttcggatctcaagtgtctttgcattatttgaatgacgtacgactgactttactatccagataagtgtggatagaaagcccgctagagactcttaatatcctgacaagaatataaggttcaatctcaaaatcaattagtgattaatgaagtagctcgtatttttatatatgtctggataattttatatttaattcatgtaagataatattatttagggatatatgcagcataaataccatatgttttcggttttatacacttaaatatcacatgttt

SEQ ID NO: 69823 - DNA, 2445 bp, Cannabis sativa
ggaccctagtggaggatatgaagagttggcttggagacccttaaggtggtatgagccatgattgaggcttgcaaataatatagcaaaagatagaatcagttttgtataaaaatataaagaacaaacataagaaactctacgaagaagaaaaaggttgatagcatgccataaaaaaaattctatcccaactgactatttggactaatgaagtacatacatccacatcagtacaaccttggagccatttccaattatctttttcatagttggacatagtgttactaatgtcttgggaggattgaggaaatagagtatgtgcaaaggaaggttccccttgggcaagatatggaatagatcttgaagagtatctcgaaggaagggaagcataggttgctaccgacacttgaaaaaaatcttgaggatcattaatcactatcagatccgggggctccagactgatctccttaggaggactcatgtacatgttagagttctagtgaccttgatattgtagagacctaaagtgttaaggagaaattacttccacattttgagcccacaaaatatcatcacccaaaaactcagaaagtggccagggcatgacatgaaaagcagaacttgaggatcttcactaaacattatccaaaacctcaagggagaagccatcatcagagtactagaagaagcacctaacgactccccctttgtcagctgagacatggggggagggatttcttcaacaaattagatgccttggttacaactctttcaaagttgaatgacgaggagatcaaacctcatccttagtagaacaagtttttgataaagaggcaaaatctgccttagttgcgtgaactgctctttgactattcacttctttgaaagaggcagttgggatcacgacctcaacgtcagtgttattagaaccatcgtcgtaatagtcaacgagagaaggatcttctcctgcctctttggatagtagagttttgtgtatgtttttcaaagtgatcttgctctttcaatcagtgaggccatacttcttcaaattggagggtgtcaaaaggttggcacacatctggtcctctagaggcacgccaaagagcttctgtggcccctttgcgaagaattttgttgacaactttgatatgtctctaacctcttaaaggaaactttcaaacaatcatgtcaagagcaaagtataatatagaaaatgaagatcaatgaaaaaaacttactcgcgatcatgaaaagctcctgctccacttaggcacacaatcaataaagaagaagtatgtcccccaatgccttgtgttagatacacacctaataattgtgggcatttttagagaatccttttgaagaaagaaagtacctcattaacctttgttaatggaaaggggatacacatagtggacctcttttggcacaggctcacgattaggtatacccttgtacgccaagtaaaggcaagtagatgctaaccaactatttaggtggagctgaagagaagcaatacaaatctagttgatcatgttcgtaaagaacctatggagaggtaggttaatccctgccttcaagacatcattgttaaaggtgaatgttccctcaaggggaagagaagcccaccaaataggctttgtaggcataatcactacatgcactcaattgtagtagatgcttttgagtttcttgattcgcttaggggacaactctctaagaacattgtcctacaaaaaaattggtgttaagatgcatcgcggggagtgcagcatgcctcatggttttcctaaaggacgtgtccgcacaacatttcaagtttttcatcctatgtgcagtagtcttgtgagatgaactgagaatcacaagaccaatatttttagaaggctgcctgggggttgaaataagcccgtaaaggatccctcaaaagaccctcaccgaagggtagaagaatgaaggaaaaccaatctcgaagctaggatggcccctcccaggtgagcttttgtgagaaggcagttacgctggactggtgatgggaacatggggcataaacttctccaaggtctccactctcaccttaaggaccaaatatgaatatcatagttggtctaagtgcattaaggtatcaataaatataagatgaccacccaattcaatggagactatgttagctcgagttctctcaagtagttccttttgctcacataataactctaagtgagttatcagagcctcccttaatctatggtagatcatgaagtgatcctcaacccaatcatctgagtcaaatgacaaaatatccattgggacaagtcaattaggaattgagctactagcctcaaaagacatgggaaagaagcatagtagtaacactaaaagcctacaggtaacaagtagagtgggagtcaaggaagtttcagaattaagtatacgaataggtagagttac

SEQ ID NO: 69824 - DNA, 1826 bp, Cannabis sativa
ctttcgccttttactaaagaataccgtgtgttcgccgctattagtggcatacgcctatttttggaggagcctctctttagagtgctcctaaaatactaagttaaaattttttaactaaaggtaacttattctacataataatttagatccagaaactaagtagatgtgttctaaacaaaattgaaatatattttacaaaaagaaaaaaaaaaaattgtgataattttataccaataatttttaccaagtcatttaatgatataaattgagctatatttgctcttacattatcaaatatcaatgtatttacataatcaccttgcaaattattattaatatttgatgaaatgactttgcaaattataatgatggtagacaaaaaagaagacacattaaccaaagaaaggtaaaatcatatttcagccaatgacaaatgtttgttctaagcaaaaacgagaaatcttcaaaagtttaatttggccattcatccaattgccatttcaaacattcccaacaagcagatagaattagaagcaagttacaaaatcatcatcagtggagtgataattcattcaaaccacagatatatagctcttaatgaacataaacaacagaacttagttagcaataaaaacttatatggggaaacctcaaagttgacacttacataaaacctctattgccaaaatccccttatataaattataaaatacatcctaacatcaacaacatcatcaggacattaaaaaaaaatcctggtttttcacaacatactaaaaacagattacagaaaacagggcaagatcaagactgactacttgccaatactaagcacatttttttttaccttaaaaagcttagcccttcttctacaactctatattttcgtctattcatattcatttggtggagctttttattacggcacctcgttacccgttcaaaagcttcaccaccttatgctgtatttccgttcttttcttgcttcttttttttttcacttttttctttttttttcttcggtcgttttcttttccaacaaaaccaaataacacaaaaaccaaatcaaagaactgcagaaaaacttgccatccagtgttcaacggaaccatccaacggctgtgcttcacaggcttcacttttagaacggcaggagtatcaaaatcaaagtcgcattttgatatcatcgacggctgaaaaacaggaaatctgggtgattgacttgaagctgtcttaaccagtcatctgcagcttgagagagggagtttgctaatatgcgctcagatcccccatttgcagtccacaaggatcctctaaacttgtaagaagcaagaccgaaaacaggcaaggacattttagggacgccttctgtcgcactaggacgcattacaactggagcacaagcattccatacacctgaaagaagacatgacattgcttggtttacaacatagctgaaaatatgaaactgatatacacataattactattacgtgacacaacaatctacaagtattttacgaatccaggtaggtaaataacaagctatagagttatttccagaactcaaagtaatataacatctattcccaaacagtcaaacttcttctcatatataaatgggaaaacatgtatccctttttgctaaaatgatgattcttgctctacatccattaacagagcaaagccataatgcccaagcaacaaagttgtgaaaaaaggaattctgctgaaaaatgatggaaagaaaagaataaaggtgtttatggtagatttcttatttgaaatcagtgagaaacttaaagtacttgaatactataaatagc

SEQ ID NO: 69825 - DNA, 2104 bp, Cannabis sativa
  modified_base (793)..(813): a, c, t, g, unknown or other
gaggagtttgggtaatatctggcctccaggattttagagactaatgagtttggttgtttgaagatgcgccaaacttgcttagcaagaagagcctgattgaagtgaaccagggaccggaaacccaatccgccatcctttttggacttacacagcttttgccaactttgccagtaagagggtatatgctcccaaatttatatattttcaagaagaatttaattgcccaaatataaactacaatactataacaagagattaatatgtgactaaattatagtctcatgttatttttgttttgttctttcaaaaaatgtgtatcttttaactcaataagtgtgtgtattatatccacccattttttttatgtttaaaaaggatatacatattatcataatttgaattatattataaataatagaatatattaattatgttcattatttgaatttatataattcttaataataataattaaaatagttacataatttacaaaacactaaatcctacgagttaataatgtaatattttaatacaaagtaagtatatttttttagtacctacactcttaaaaatacttcaacagggaaaaagggaaaaaaaatacaatagaaatcaatgaaaaggttagacgaatttatgctaaggggcatatagcctcttagtcttagtacatatagtggtaagttactatttttcaattcctaaaaaaaaaaacaaaaagaagttactatttttctatgaataaggctaattgccaagccgtatagaatatataataataataataatnnnnnnnnnnnnnnnnnnnnnaataataataataataatagaagcatggaaatgatgaattggggattggtataatgattggtggagatcgaaggaagaaaataaaaccaataattataaaaggtgacaatatgttgagtagtagacacctaagatgtacatgaaaaattgcattacatgtcgctctaaggtgtatcaaataaaacaagtggaccctttaaggtgagaagaaaaacaaaagaaaacaaattgtagaagaggagtggagtggaatagagtggaccctttaaaaccatataccatagcttagcctccaaaaatattgattatttctacctataattaaaacccccaattcatcaatcatgaaattagcatatgtacatatatatatatacatattacaacctgtaatcctgagagattatagctgtactaccaccaccggaggagtgtttttagttctgtataaatgtgtgtatatatgtgtgtgagtgagtgtgagtgtgagaaaaaccaaaacttgtactttgtagaccccaatagcttcttcattgcttccatggtccccttcttctccctaattttcctacatcacgaccgataataacatattataaagcgatggacgttttgtaggaccatttatatacttcaaattcactaccttcccaaataaataataataaaataaaatgaaattcactaccttcttcttatttcatttgttgatcatataaatataaatgaaatttaatttgcttcttttttactaactaatcaaataatattaatatacttttaaagtatacatgctaataagactatgttgatttttgcactatgttttaatagttttgatgtctcttacagtttttgtacctttcatgatttttctgtcatttattatggattgaccctatttgtttagggtaattttcaatgggcaagagaaataatttattttgtgctcctcacttctacttcaatgacttttcaattttgagagaagtatttcaagtttatatatttaatatagattgttttactatccttctttcacattacctattttttaattatattgtgtggtaatagagttttatttattgttatttggtaggttggtttgtgaagggactacgattacaaagactttaccgataagtttaatttttaaaaataatctgtcggatattgattttcagcagttttgaattagcgggttatagtaagttgttactagccaaagagtaataactttggctagttatacttaaaaattttgaggagactaggggtggactatttt

SEQ ID NO: 69826 - DNA, 3320 bp, Cannabis sativa
ctcctccttcggttcagtggtggatgactgcaagaaacttcttggaagtttgagtaatgtatctcttttgtttgttaagcgttctgcgaattgtgctgcgcattttgttgcccgacactctatttcccttgctgaacgcatgttttctaattaatagtgttcctacggaattgttgtctattcttgggatgctcgtaatatctttcaaaaaaaaaaaaagaatacatataatttattatagatgtttgattgcataagtgctctctcaaaaaatagattttggatttctgaatagtaaaatgactccactatttataactagggaagataatacattaatttggtgtcccgaaatacataaagaataaaaaggaaaacttgcttactttcctattttacaataatcatgtgggaaagtctcacaaaaataggaaagtaattgataaatagaaaaggaaagtgcctcagtagatatttaagatgcatttaccctaaaataaaatatattcgtgttgttgtaaaatcaaagcttgttacatagtgagacttaccttgcttggaccttttttctcattcttcaactgagttattttctgtggaataatcaaccatgaatgacatgacaaggatattactgcccgtccaagtcttaaaatactccacgtgtcaataagaaggatgtcacgtcaccctgtgcagaatttgggacaaatctcatttttatcttttttaaaaaaatctcaagttttttaatctcattttatttgtttttttttgaatgaatctcaattttttaatctctttatatatataaatctgaatttttctttttttaatattttttttgtgttttataaatctcaatttgttttaaaagaaaattgaacttttgtctttttttttaatctctctctaaatctcaattatatatataacacttttacttctagaattggtttttggataacatctagctttccactacatatttttttttggagattttttcatttagaggaactatactacaattgtagagttcttgatcgattgctaattaattaacatttttgtatatgaagtattatacagtgaaataattgagcatctagtaatatttgtatagctagataattactaacttaatttctccaataaatataccatcattttttccacttttcttttttgtttattttttattctacagttacagaatcgtgttctgtagatataaaatatatgtttcattactattattattattataacaaatttaattaattattaattataaagtagtaaatttcattttgaaatgcatttatagtatcatattaaactttttgttttatatccacaaaagtaatattgatttttatttatttattttgtgtggttcataaaagataagagaatgggaaagagtgaggggggaaattaagaaggtgatatgtaggtaggtgtatgtctccatgcctaattaattacattttgatttgatattatgaattattatacgtattcctataaataccaccatgtatacacttctcgatatacatatatcatcaagaaaaaaaaacatatatataaaaaaaatgatgatgatgatgaagaggtaaatagtactatttgttgtgattgtagcaattgtcaataatatggggttgtgctatgggactagagtagcacatagtgttactattattccaagtagtaatgatgaatgcaagaaagaaggtcaatattgtagtgccttaccttggcaacagaaattttgttgtgaagggtttatttgccaaggatttctgagtagtgacaacaaatgtgtcaaaattccaagctgtcaccgaaatgttggtgacccttgtgcccttttgtcaccatgttgttacccaaatcattgcagcgggactacttcccctggttcaaaatgtttgcccccttctactactactacaccattatcatcaatattgtcactaggtcttggtgatgaataattataatatgtatgtataataattatatatctgtatgtataatatgtatgtgtgtgtggtttgtttgtttctgaattgtaataagaaagtacctctatgtatagtacttatactaggatatatgtcaaaccatgttattataatgtggaaatataagatgtgtatctcaattggtactttcacatgaataaatggcttgttcaatatatatctatatatgtgttatttttgatattataggttagaaaattaaatagcccaaatatatatatttgtatataatctagaatacaatttataatagataataattatataagaattaggtatacatacatgattgatcctataatttgatagtgtaatactataaactaaatcttcctctctaaatttttaagttggaagcagttttgtttatttaattatcaaaagtatacaattgtgatgagacaatatgtaattgtagaattaaagagtgtacttagatatataacactagttggacttgacttgttcatcaaaagctctggttgaactttatatacacatatgctaagctagcttattaactcactacaaaaaatttctacatttagtgacaactttttagtaacaatataattttttgtgactaaatgcgacttttagtcacaacaaaaagttacttatgactaaaatattttagatactattaggttatttttagtattaaatttagaataattttagcatattttttttatttaatatagatgatgtttggagcattttcacgctttttatcttttaattttgtagatttaaaatagttaaagagttagaaaatatcaatagaaaagatagaatatcgcataaaaaaatatcacggtgaaaaaatatcaaattcaggcccagaaaaagataaatcacgtggaatttggttcagaggagacacgggccgcggcacaactttagcatgtcgcggcccgcctacgtggaaattcaagttaaatatcccaagaaggccacacgggacgcgaaatggctttagcatgccagggcccacatctatttatgcaacaaaataatatcttattcaggaggtttcccaaattcaaatctgaattggaatttaaacatgtgcgttttatccatttttttaggcccttaatgcctatataaaagggaagaagagaatcgatttcaagaagcaatttgagagagaaaaaaatagagaatacaaatgcaaattggagagatcaactgcaatattggaggcattcttcagagggtttttagcattcttctcttctctattttcatctattttct

SEQ ID NO: 69827 - DNA, 1788 bp, Cannabis sativa
  modified_base (1583)..(1590): a, c, t, g, unknown or other
ccaaataaaaattaagcatatagtatttaatatttttcttttgaatgaatttaaaagttaatactgtatgctaattactaaatatatatatagtattttatcattcaaatgcattgaacaacaacatggtagatttgttatactaattgtagtgttgttatgtttctttcagttagtctttagttgaggctagagtttgagatatagagggttttttttttttgtttgtttgtaggaagcaatgtcttcgtcaacagtgaagaattatgatatattagtgaacatagattcagattgaataaaatgtgcctgccttagccttagcaagtagtcctacctaccgtcattactggttacagtctatcattacaccaaatcccactttggcttggaccccttgctctatattctattatgaaaatggaatagctctaacacaaatcatgatggtgaaagcaccatcaataataaaagaaacttatcactaccgattcaactaaagcaaaaaaaataaaagcaaacactaaattcaaatgcaagctaacaaacaaaccagcaggagaaactcaagaaaaaaaaaagaacgttttctatttgaaatgaaatcagtgctaacaatcaccgtgtcactatataattaggcttgaacagcataccccaccaatcataacattggtatacaaatcaataaggaacatttttaagataaaatataacatttggtatacagattttattacttccattcaatcctctaacatcctaatcatttcccaaagcaagagtttgtcgaaagagggaaaattttgtaaatataaatttgactacagatatgccttgctaagacagcacgtgaggaaagtgagactacaatgaaacctttgacttcaacttttttgtggtcttactggtaagcaagaaccgagctccctttacaagttcttccttaaccatgaacaaaacagcagctgcaagtacactttgcacaatttttgtgctcatccctttgtaaaacccgtagaagccttcgtaccggatcatcttcaaaatagcatctaatgtgcctttgtaatgatgccttttgtcaccggttgcaatatgtttagcttgaagcctagccttgacaactaaaagaggatatgtgacaacagtagctcctagttttgccagagcaccaagaagaaatgtctctaaagctgtcactcctttgttacgttgcttactcaaatcacgtcttttcctaagcttcttcaacatggtttcatacaacatgaattgtatggaaggattgctaaccataattaatgttggaaatacacctctccagaatccccaaactccagcttcaccataaacttcttgaattgcatgggtagtcccaaatggcggaggctcggttgctgcagtaagaactgcttcatctggagtaattggtcgtgtctcaggcaaggactttgagatttttgtatgagtctgcatgtcacatattttcaacaagaggactaagatgtaatttaaaacagaaaaaggaaactaagatactggcacagcaggaaaaaaatatacatataaatatatatatnnnnnnnnatatatatatatatttatgcatgtataaatcatatgcgacagcattgtaataaagcacactaattaatttttcaaagattcagacaatattccaagttccagaccagcagccactgtaatagcatccaatccaagaatgtggaatcttgtagaatgcaggtccgtcaacacttttaaaaactaaactcgttttatact

SEQ ID NO: 69828 - DNA, 3155 bp, Cannabis sativa
ttttttataattgaaagatgtgatgtttgagtaattacatgtatcgtgtaattgaagatttgatgttgagtaatttacatgctgtgcaacaacaaagacatatttagaaagttaaattagttgaaaatatttttacattgatatttaacttagatcactcttctatgtttttttttttttgggtttagttaacaaattgagctaaatgtactaaaaatatcaattagtagctcaaatatgtgattttgaaagttacaaagtggaagtcaacgaaaatcattaatgggtctcaaataatttaataataaaaaaaaaagaaatttatcaagataaataaaacatgagagcattaaattaataaagagaaaagggattaacctgatgagggtgatgaaggggaggaataaagaactcttgcatggtataacctgtcctttgggaagacttactactacctttatagaaggtaagatatgacttctctcctaagctgttttcaatttcctttccccttccggttaccttccaaaaccctgttttagtcttcctattcctacattgggagctcgagctcctgtaaaatgaccgatacaagaaccaccactcattttctttagttgaatttaacttcaatttagctgaaaattttcatcaaacaaaaaccaacaaattaatatatatatatatatatacatataaacataagtttattctctctcaaaccaaaaaagacagacacacacacatgacacatataccagataattcccaaggttcaaacttcaacatatcgtcaatctcaacaatgtaaagatcatatttggaattcattccgagagttttcagctccaagtgattgatcacctcctgttccgttggattgaatgtaagtcccattggcaccgttgatgggctgctactcacttttctgttctagctaccaaatttttgtgtgggtgtgagacttgaggtaatggcgggataagaaagctgaaaataaaaatggcttcttgggtacttgtgatttccgatgaagcactagaattccatctcacagctactggttttgggatttactctctttgtgtttcttttttttttctcagtgtgtgcagaacgaacaaacaatgagagacagagtagtagtgagagtgagatggtgcttttattaagtaaaggtcattcattatcaccaccagttgactttgtcacagtaaattgtaaagtcttcctcttattaccttacctaagaagttgttaagtcctcattcttttttcatggggtcagggatgccatcgctttttgtttttgataagggaaatgatcgctttctcttttctgtacttttggacgtttttgcttggaaaataatacattttccttttccacacatcaaaatttggtggaaatttgttatcggagttacatttaacactagtaagtcatcccagttgactagacacagatcaggaggagggtaatggggacccaaatgtttgccttgtacaacaagaaacatgaccctaacacacacttcactcgtttagatatggagattcctcaccacttctctcaattctgttcattttccactctgtgttccccttaagtcaacattcgatctttattcttcagttatgctccccatatacaaatattatttcttaatcaaactttatgattgcactcttgttttatattcttttttttcttcagtagtggggatatgtataataatttattccaatttaatcttataaattaacttccaatcactatgcatgaaacaaaaggccaatatacagatttcatatatatgtgcatatatacatagggaaacatagtagaaccttggtataaaataaggataattttataaggtattatttttttttacgttacgttttttaaagatttttttatatatatttttaaaattttttatacaaacaacacgaaaacaataaaagaactacataaaaagtaacatgaaaataacatctaaataacatcaaaataacaataaaaaataacattcagataacaaaaaattaacaacaaattaacttgagtacaatataaaattttctgtaaataaaataaaaaaaaattgtaaaaatatttaaaattccataaaatcgtttttttgtaatttttttattattattgtgtatttatgaaataattcttataaaatataaacatttataatacagatgagatattattttatttttaatttaatgtcccatactaaatagtataatctcactttaaattcaacaatatatacatatattttatctttattatttttatatataaaatgtgactatttaactatttttttaacaaagtattttaacaatataatatattctgttaaatttaataaaattattatttattttaaattaatttgaatatattaatattatttattttaagttaattcgacttataccaattttagattgatttaaatatatattatttgtaatattattattttttattgttatttttaatattaggagtatggtcaattttaatattttttaaactttatatttatttttctcatatttttcaaactttaaatattgtttttttaaaaaaaaaaaaattaataaatatttttctttataatttataaaattttaaaaataaacatagcaaaaataaaaattaaaaatataagtaagtacgtacaataatgcacgtaataataatcactataaaaatcttaattttagttaaaataaaatttgtggcctattggagtcaaatgatgatcttgccaaagaaagttctgagatcgattgaggccatttgtagagcatttttttagaaaggtcaagcaatgtttcaaggaggagggtcagtagcttggaataatgtgtgtcaatcgaagacatcaggtggtttgggaatcaagaacatagaacattggaataaagctgtcatctgtaagtatatatgggcaatctcaaataagcaagagagcttatggctaaggtgggttcatagtgtgtacattaagaattaagagtggtgggactactcttcttcaatacactctagctggtactggaagaagatggtagccttcaaagatcaaatcaaattgctaatggtagcttatctctgacaa

SEQ ID NO: 69829 - DNA, 1379 bp, Cannabis sativa
tccttaaatccaacaatctcgatagttcagggggcattttcaataaccttaaaagttcaggggacaaaaattctaattagcctaaaaattattacgaatatataagagggaggagtcacacaaaggctcccctgaacactacacacgtgcgtgaatcgctgtccgtatgaccgatctaagttggttggtgtggtatgtactttattttttagagaaaaattatttattaaaacatttttattatgtatttaattaattaaaatagtttttaaacgtgtttaattaattggttaacaaagacattttctcttcctttttatcagcaatgttctcccgatctaacttaatctctcatgattagaaaaaatgaccttcttcccgttattgctttgtatataatgcatgaggaccaacagaagaaaaacaacccttttcacactgaaaaatataaatatttttattattacgctatattataatatatattccgagcagtagtattttttcggtgtagtattttcaatgattctctacaacgcagtaaaggtctgaaatagtggttcgataaggttgtttcatcttgaagacaacaaaattgatagttgcttgcacaattttgagaagtaccacaaacgtcttaaaaaaaacaaactaactcgcgactcgactcaaattttcatgatcaatagtttcgttattttttaatttatgcagcagcacaaacaagaaatgcaagcaattagtaataaaattatacaaagtaatgaatcacatattgtatgaatttatgatgaaatatttctttatcattttaatattttttcagtgcattattaatatatatacctttcaaaagtgatcaattttaatcatagtgcttcaagcttaactaatctcttgttaacacatgcactattcagttaatgtaataatttaaaaaaatacataagaaaataaatatctgaaatcatcaagtatttgtatattaagatgtgattggctacattgtactattatttttttttttttttaaagaggctacattgtactagctctaatcgtaatctagtatcatgtatatctataataaatattatttccccataatgatcatattaaaaactttcaaatactactcataattaataattaaattaatttccttctaattgaagtcattagtagttaatattaaaagattacataacaactgacttgaggaaaatttctttatatgccacgtggactaatcacgacaataagcgacaaaaattagcaaacacattccaagggtcaagatttcttgtctaacaactttgtacacgtggacaaatcacaacattaagcaaccataattagcaacatatttttaaactctt

SEQ ID NO: 69830 - DNA, 2516 bp, Cannabis sativa
gataccataagttaatttataattttttgagggacaaaattataaatacccaaaactcattatataatgagcctataaataggtagtggtcctcaagaaacacgaagtttttatttttttctccttctcatcagagaaaatgttataagaaatagtgtatctttagaagatcacaatattctgtacaatctctaataatgactttagattagtgtttccgctcatcttttattattatttttttctttgatttagtaaaggttctatagaatatgatttagaattttatatattatttaaatctgtgaaatattctataaatgctaacattgccaccaaatatagttttgactcagcaattattatttaaattttgatgaaaattaaaaaaaaatcctaaagaagtataatataaatcatcatttaattataagttttgttacatacaaaacaagagatggtccaggccaaatgcatgtccccgtagccataaactcttcttccaaaacgcgttatggtatcgttttcaatagtgtcagataatatcttaatggtacgcgggtaagcaaataaattgaagaggaggaactaagaaggaaaaagaaaatgccctatttcattccactactgcccatacgtcaatgctctttttcattctttaaagactgcaaagactaaaagtgcacactgtttctaacttaaacttcaatgccacgtaatgaataaatatgatgtaattccaagaaaggacaagggtaatttcagacaaatcacgactccacaatccacatccatgactcttgtttttatagcccaaccaaactctattatattatactattatataatcttcttcttcttcatttcatcttgaattactaatttatgaaaacaaaatggacagagaacaacacgagcttcagtttctgggtttcttcggaatcttcaaagaatcttataagatcgtcctcacatggaggaaaatctttagccaaatcactctggccctaattctccctctctccttaatcttcctcgcccatttccaggtctctcaaattcttttctttaagatcctcaacaacgaggaccgactcagcgacaccgacgtcaataatcgagaatacgggaagcttaaacacatcatttcctctcaatgggctggattctggctcttcaaggtcgcttacttcaccttctcactcatcctcctcctcctctccaccgcagcagttgtctacaccatcgcctccgcctacaccggcagatccatctccttcaagaaggtaatgagcgtcgtacctagggtttggaagagactgatggtcactttcctctggagctttgcgatcgttctcgtttatcatgttgtggcaatcggattgctcgtcttgttgattctcttgctagggttttcatccgctggaataatcttcgttgccttgttcctgatcgtttatgtcattggaatcgtttatattggtataatttggcatttggcttcagtggtttcggttttggaagaggtttacgggatcaaagccatgaaaaagagtcgaattctgatcaagggaaaaacaggactcgctgtcgcctattttctggtcctcggattcatctttggcggaatcgaatttctgtttgagaatttcgttgtcctcgatttcagtggcagtttggctctacggattggggttggaatcatctgcttcttgctcctcttcaagttgattctgtttggtcttgtgatccaaaccctcatttacttggtctgcaaatcctatcaccatgagaatattgataagccctcattgtctgaacatctcgaggggtatcttggtcattatgttcagctcaaatctactagggatatccaattaggggaagctcatgtttagtttttttttttttcttaattatcttatgataataaacaaataatgtcataaatataaaagatgtgtataagtcaaatgaacattgttgtttaattgtaaactttattacgagacaaaatcatgtgttattttgttgcttaaattaagtatattatatcaagttttggagaattatatcgatatcattgataatttgctgggtagtttccttaggaaatgggaaactcttaacttattatatatatattttgaaagagaaatgctaaagggtactagtagtgtttagcacctttttaagtgttaatatcgttattggtacaactaagtatcaagtcccatataatttaatataataacttttaaagaatatcgctacgcaacatgtcgagaaagtgctaagtactactggtgtctaatagcaatgctcattttgaaaagatataatattatggacccgtttggcataacttttagaaaagctaaaagctgctttttgaaaaaactgtgataaaaatatgtttggcaaacagttaaaaaacatctttttgaagaatttttggagaagctacagctaaaagctaaaactgctccaacccaacttttagaaaaagttatttt

SEQ ID NO: 69831 - DNA, 2216 bp, Cannabis sativa
ctcctctgctagaccctgtcattattacatagatcatcacccagttaaacccctcttcatcaattttgtttagacacaaaatcaagcaactgaaattccaataaaggtttggtttgccaactttgcaactgcactatctactgcatcattacctcattaaagaattcaattggcttgtttcgccaagatttgggaacctgaaattggagtctgtaaggaccatcccaatcaacaccatttgtgaatgaaaagatcaagtttttagctgcaaaaagatggaaaatcagtagttggaatcaaatatcgatatctaaggtaagcaaactcgtagaagagtagtcaccgtgcttgggaacacatatttggatactgtataatggggaatcagcttttcctctaagtttcttttgcattgccctgggctccccaccacacataataggctggttaaaacctcctgcaaattaaccacttcagtaatgacaaaataagtcatctaagtgaaatgataaattttcaagtctctctaaccattaaaagcaaccccgaattcttcgtttggaacaagcttagttgcatctggattgtagaagacctttactctttctccctattaaggttttttaaatgttatcaataagagaatgatgactgaaaaaaacacaaacatattctatgaaattaacagaagatggcatacagcagtgggaggaagaccattcattgtcttccaatatacaggggcctttccaagttcaaacatagcccagcttggcaaagtgaacctacaaatgaatgaaacatatgaactataagaacatgtggtccatttctcaatgtcaaaacattgataggaagagagaattggaagtcatactctttgatttcctccacaggacttgtggatacagctgcagcagcatacactttcccattaaatctgagaactttcttcttattcttctcagggagacttcttgaaagtgaagaccccataaaattgctagctgcatcaatacatgtcctatgctaagctaagttcatgaaatcaactaaaccaattttatgtaattattgcaaaaaccagttcataattgaatctaataaatattgtccaatgaatagtaaccatgttcatctctttaacttacacaattcaaaatcattaatggaattatcctcaattgaacaaaaaacataataatctggttagagggtattaaggacggtggcatacctagtgggttgggaacaagttgactgcctttattggcagataaagaactcacagccgaaaaggtttgggcggaagttgcaaagattgacccatttgatgtagccatgaatcccactcactccagaaatgaaaggcaaagaacagtgaagaaagaaatatggggttaaacctctccactaggtactactagattgttgtactgtttaaagagaagaaagagcaacaaccatagaaacaaaaagttaggcagaaatatctatcttatattcattaccaaacaaaaatcttaaatggggtattatcttaaggataaaaaatatctggatcatattactgaacccaactataaaaggacaagaaaccaactttctcatctaaaatctcaaccttttgtctctttcttatatattatcattacccaattcaacaatttatggaatttaaacaaacctacaaaaaccacaaacttttttcccgcaatttgacaagaaacccaccaagaattcaagcttatattatatatcacacacaatattatacaatttcacacaaaaagaattaaacaaaccttctccattcatggctatgcttacttctccaccgtccaaacccaaagcccatatttttatttctctccaccgtttaagtcaccagcctagagggaatgtagcccctttcaggccattaccaaaggtttcaacttttccaaagcctgaaaaacttttgggaataacaaaccttttaaggcattttcatgtaagaagtaatgacagaagaattgggttagttactaatgcagcattaagtgagagtgcagagccagtaaatgggaagagaattatgttgtcagatgtggtggtgaagaggccaagaagagttttttctgggaggaaatggaattctatggatatgggcactgctggtgttgttttggcaatgcatttgcttagtctttttgcaccgtttcattgtaattggg

SEQ ID NO: 69832 - DNA, 2630 bp, Cannabis sativa
aggtgttgttggttgttgttgtgtcgttgactatgttcacacacaatgaataccttttgaagtaaggttctttcaattttaattgtatgtagaagaatagcttggatcgaccttaatcctcaacggttgatattcttctttcacttggtattttacttacagttgagtgcttttttggttgcattggagcacttgtttcagcttgtgtactggttcttcatatttacaatctattgaaatgtattggatagtaacttcgtcatttatataatttattccttgatcaaattatccatgcaaaatatgagagacggaattgcatcctttatctaatagtttaaaaatttaatcattataaatcagttttgggagaattgtcatgtaatacaatagttatatttattgtgaggcaactaatattaaactttaaataaactttaaaaaatctcataatgcggatatgtaatactaaaaaaactgctttagttatccctacgctatatcatatgtacaagttaactactattaattggcctgagtaattcaatacaattaaagtttattttatttcgagaacaagataataatttattaattgtatacaagagttaatatagaattgaacatgacaaagaaagacaaataagaaaggaaattattctacttagaagaaattagttatagtattttgaacaaccaccaaaacataaattgaaaacaaaagaaaggaaattacgtagataattatgagaataatattttaggaacacaaaatggaaaacagaacaggtcgatattggtatgacattgtattgtctatataaaaaattgttgcatgcagagcatccttgttcgctgattatttatcatcatttgctgaacagcaatttttctcatgttttttacgatctcatcatcatcaccatcatcatcattaccatcttcttcttctacctcttcttcagcttcagttgtagcacactccagatgaactccatagtcacaatcactacagaaataagcccaatagctcttactgatacgtgattcgcacacataacagtaatactctacttctttttctccttcttcatcttctttctcatttggagcttcttctttctcttcatagtctctttctttttcctgatcatctttaatatagttatctttttccttctctgtatcatgatcgctctccttattgtctcctattaattttgggggaggtaatgagaacacaaggttgagagggtggcagtgatcttcccgttcgatagactcagccaaggcgacacattgaacatgaaggtcgaagtgacaatcatagcagttgtagacgaaggctcctccgccactgttacaacaagcatgacagttgaagatgtaaggaggggtggagtggagagtgagagggtgatcaggatgagaagggtgtcgagtttgtttagggagctcagaacaaggcttgtggaggatgaagtcacacttcttttttgtgcacttgaatgctgatgagcctggagatacttctagtagacaacatgagcagatgatttcatcctcttcttcatcattaatttcacaaggattcaatgggtgctcatgactgaaatgcttgatttccatattgtcgatatcaacaaactttactatacaagtattgttttggttgatattatttgagagtgagcaacttattaatataggtaatgtcgagttaattgtcaacgttcgtattggttttactatattgtactcaacttgcacaaattgccataatttatgtttaatattgtaaatatggttcataaaccgtcgacttttactagtcaacgtcgcgtttccttgtttttaattagatcaactattaaactatgagttgaaagacattatttatttgtctagttggagtatatgcatgtgatgaggtagttcttgtagttctttaattagtcatacatgaagtgtacgttgcatgaactcactcaagagagatagtggcacaattattaattgtaaagtattggttcaaatacatctcttagtcatgtgctattcagtcttggattgtgttatgacagccatgcatgtatgtttagttgcaatttattattcatataccatattgatctaggtccaattactaattgtgccttgtgcaacaacaaggctcaaaatgtttggagcttgtgggcaaaatttaagattacctattttttagtacaaaattatgataatattgtatttggatagaattttagctagtaatgagtgacgaaactattagtgatgcttgactattatgaaaaaacttttaatgtctctttttcatatcattacaaaaaaaaaatatcacttttagtaacaaatttttaatcatgtagtactaacaatggagatcgaatattcttataattaaagctcattattttaatgagttgtattttcattttgatacttattttaatctattattttaacatatatttatttcattaaaattactaatttaaataactcttaatataaattacaattcaatatttataaaattatactttagaaagatctgaaaaataaaaataaattattttccatccccaatattaattttccaataaatatta

SEQ ID NO: 69833 - DNA, 2041 bp, Cannabis sativa
gggtgagtccactcaacatctatttcccataaataggaaacccccatcattagaaaatgatgacagattccagaccagcctgccggaatacctctgacatactttctagcttaggatcaagaagtgaagaagagaattattgtgaacttaggaaatattacgcaaactatcagagttatacttagtgactcaagtaattctagtgtaaataattggatgttaaaatacaaatttgttgttgagttaatttttaacataaacagtaattatatttatgttatattaaatgtgattatataattgaaagtgttttttttttttaaaaaatattacaatttaaatttaaattcacaacttatctctcttatcttttattttatattaaatatgaatatataatataaaatatttttaacattacatgattcaaatttaaacttacacatatctaaaaaaaatatatatttttattaaaagcattataccaagattaaattttagagaatttatattatatatttttttaattattttgtattgattttaataatattttttttcttcttatgtacattatagtatttttttagcaatataatttttttatattgtgaacagatttcttttagttgtgatgttaattaactaaataataatataatttgactttaaatgataaattcgttaaatgatttacacaattttgagtttaaaaaaaggataaagatttaaaatttgaaatctggagatagtgtataaattactaattagtgtcaaaaaaaaattaattagtattagcaaaaattatggcgatggtttatcatggtaattgttttgaaatgttaatgcaaacaacacacagcgctatcgagcagaacgacagtaggggtgacagtaacagtgataccaatattcagttcaagatcaatttcatctaccaaacaaagcatatcatcggctacggccatggccatatatgtaagaacaactcctccgacagaagaataatatcccacttcaaaatcaatgaaccagttgaagcgacagccccactcataaatcaatccacaatcttgactagtttcaccacatcctacttgcttttagaatccactctgtccagtattggacttgacgaatatccaactatcaaaatcagaattatagaaagtcttgctattcactgtcagaagttgatggacgaaggtagagtagtagttgaggagggaagattaattgttattcctgtaaccgtgaagattgataggtccatatatacttggatgtgtgaatgtagaaggtgtattctcaagtataataatagaatagtaaagtatcttgatcggtgcactgtggatggagagggaggtacttgtactgtgtgtttggacgagtttcaagtaggatcggaggtgttgcggatacctcattgtgcacatatttttcataaaaactgtattgttgcttggcttcaaaggagtcttacttgtcccgtttgtcgctctcaattagttcccgattgcatgttatcactccgctaattattcaataatcatcatacaaaacattaaatattagatattagtagtagtattggcttggcaccattaataaaaatacctattatttaatagatttaagttgtctgatttacaatggatattaatttccgttttgttttcaaaattatttaatagaattactcttattatataagtttataatttgtttaatttcatcgtcattacttatattaattaaaaattatttataattaagaaatcattattgcctttaagattggaaactattaatagtgtgtttttatatgagattggatgagagattgaggaatgaggttatgtaaataacaattttactttaatgttcaacttattaaaagtaataaacatttgtttttgtattttacataaatcagggaataaagaatgagatggttaattacacgaggttggcgagattgttactcttatatgatacactaatgtatatgtatacatatacatataattataaagga

SEQ ID NO: 69834 - DNA, 2622 bp, Cannabis sativa
  modified_base (2493)..(2493): a, c, t, g, unknown or other
agaaagaagaaatagaaattatcaataactcaagaaataatgtcaatcaacattcatcatttccccaaataggagtttagttcataatctccataatcaaatttaaaacagaaactaacatagaaaaattaagaatgaagaaagaactggttggaaaaatcgattcgaattgcaacaagccgttcttgaatttctctcctctgtttttaggtcttcaattctgaatgatcataaaaaatcatgagcctcccttctaaatgagccaagttttccttttgaaatttgtgaaaatacaaaattacccagaactcatcaagaaagcttcgctgcgacaccaaatccgtagtcgcggcagttgggatgtctccaattaattttctctttgccaatctctgtcacgactaggaagaatggctaccgcggtgagcttggccaggaaaggactttagttcttttcccaactctttcctcttttgcccactctattctcaagaatacatcctttaaacatcttggggacctaaaacaaagagaatcaagcataaaacagtcctaaaactagaaacaaagatcgaaaactaccctaaaaagtgacccaaaactaagactaaaattagcctaacaatgttttattgactagatgatgtttggaggataaacaaactcaccgaaatgatgttttcgtatagttttaaaaatccacgaagtctcaaaacctgagatttgacgcttaagtttggaggttcgctgtagcaaacaaatgataagaaaaaccttgccgggggctgtggccgtggcgaagaggaaggcttgccgcgacgaggaaggtgtcgccacggtgaagggaaaggcttgccgcagcgaggacgtgattccaactttttcaaattttattttattttttattattttttaaagcacattttttaggggatatttataggacttttagggtttgtttttgagcacttttgaactgcatttttgagagagaaactcagagagagaaagagaagaagaagaagattgccacatcaagtgttcatcatcattgtttcttttcttctccttaatcttgtactttttactatgatttttattataatgactaatttctttttagttaagggttatttcaaaacccaagacatggattcttaatttctatgatgaatgttattttcttacattccaatatattgaattgattcaattattcttttttcaatgccatgattattgtttaaattttatttagatgatcactaaattacgttttgctttaatctattatcatcttaggattactattcaactaatagtctagggttctaagtgtttgtgataaattgtaattttttatgttctcaaaagtttttttatttgtgatgaagaataaaacctaggttaaataaattatatgcttcattaatttattgcctggattaatctatctccattgaattcaaagctttatctaagttaaaagagttaattattgagtgtttcgccctgattaattgcaatagggaaattgagataattttttgcttcagcattgtcttcgagattaataatttgattgtaaaattaaaataacattcattattagtaattaaagatgatggttgagggtggagattaccctttaactatttcttgaatatcgtagtgttgtattttatttattttcttaattttatttgttcattttattctagcaaaattaaaatcaatccccattttattattgtttaattttgcgtaatagagtaaacatagtcctcatgggatcgactcgtatatacttttatactgaactaattggaagtattagaattaaattaactagtaaatttgatacagcataatgacatgcatcatcaatacgtaagtacatacatagccattaccaactcataacttcaactctccgagattcaaatcttcccaagtttcaagtagctacaaagaagtacattgtagtatcccaataagtctaatggtaaataattagggtttctatttatattacgttttgatcaggtaataagtgagattatgatcctactaatctatttcagcataaaatttaaatttttactataactgagtaaataagcgtaatttatgaattacggagatttatatagaatttgtgaatgtaatatgagctatatataatataaaaatattttcaggtccggcgagcctaaagatctgataagtggattaatattcataatctgtaaattacagagatttatttgaaatacgtgaatataatatgagttaaatctgaaataaaaaatatttttaggttcggcgaccctagagacccgattggaggccaaaaatgtcacaacaattttaattaaaaatattgattggattattgagataagttgattttagaaataccgaaattattttagggtactcaaaattcgctaaatactctagaagtagagatttcttagtggctaagaaatnataagataactattaataataaattttttataaatcttaatattattaatattattattgttgttattaatatattattttttttaaaacttatcgtaccgtacgataaatttttatatataaatatat

SEQ ID NO: 69835 - DNA, 1151 bp, Cannabis sativa
tttttttttttcgttttactttagagggaaataaaacaaaaataaagatagagctacttagggattatttcaaaaatagtcaaaaataacaaaaaaaagttacccttttatagaataattttttatggacttttgttcctcacatactagtattttatttttaagttaaaaaagactattgtgtacatatttttcacatcaccgaaatataatataatattggggcaacatgaaaacacttaagttaaaaaaaaaaaaaaaaaaagaagtaatttttggtacttttgtataaattagtttcccaactacttactacttttgtggaattaattgaaaaacttcgtaacaattatctctctctggcaatagtgccaaataaaatttagcagtgtcaaaaatctatatttattccattgaatgtcaaattaaatttaaacataattaatatatttaagaaattattagaatatattttaaaattgaaaatatttatcttagatttaatttgatttatttttgcaaaaataatgtagcatttttggcatagctgaaagagtaattaaagaaatgacaaagaaagagaaagctgaaaagatggcatatatatgtaaggaaaaaaaaaaatataaatttcacaatttttttagaaaaaaaaaatcaaaatttacagttaaagctattaattacaaaaatataacatccttttatttagtttgtagatatcaattataaaacttgtaatatattattataaacttgtaaattttagttatgaatttgtgaacttagttcgaaaacctgtatatataattatgctcatccatatttttatatttttttttcccttctaaattctgtattttgagcatttttatttcttcttcaatatgttgggtattttttgataatttacctttacgcatgagaggcccaaaataaagtatattcagctatacaaatggttttcggcccatggcccaattctatatgcggattgattcatgcccacccagctacttctctacgccatttccttgcaaaagacactaaatgttaatagggctattttaaaaaatatggaaaaaattgttaagattatgataaatatagcataaaaagtaaatgccactaaatatggcattatctaacca

SEQ ID NO: 69836 - DNA, 2292 bp, Cannabis sativa
ttttttttttttgtttttttgtttaagtctcagttaggtgtttaacctataaatacggtttatactcacgttcaaaagaagaatgtttggtaaactatgaagattttgtttctcttctttcgagcatctggttcaccatttatttcactgtaatatatttagttatttgtactcataatctcttaaccagcctctttaatttgtatttggtttggtttatttactgtttgtgtttacttttattctctctaatttatgtagcattttattataatacgaactatatacaagtggcgaaaaattgggcaccacctgttctcattatagatataccaggaaggatttctttcaagagttgagtaaccttcctcccttggttttcccatcctaatggggaatttattgagtttgactgcttcaaaatccaggatgaaggagtatcacgaggtgtctgaatatgaaacctgcaagaggcaaagaatgtgcccaagtgttgctgaggagaacccaagactgattcctagtcttcctgatgagctgtctatccagattatcgctaggcttcctagaatttactactttaatgtgagaatggtgtcacgaaagtggaaggctactgttatgagccctgaactttttaagttgagaaaggaacttggcaccactgaagaatggctgtatctattgactaaagcggaggacgagaggtttttatggcatgctttggaccccttatcggaaagatggctgaggctaccttccatgcctgatgttgtttatgaagaaggacaaaataaaggtggtttttccatgtattggatgtggaacatgttggggcctagcatcaaaattgctgactctattagagactggcttgggcgtaggaacactttagatcaaatgccattttgtggttgtgctgttaacgccgtggatggatgcctttacgtcgtaggtgggttttctagatctgcagccatgaaatgtgtctggaaattcgacccagtgcaaaatgcatggactgaagtaactgctatggccgcaggcagggcctattgtaagacaggaattttgaatggcaaactctatgttgttgggggggttagtcaaggccgaggtggattgagtccccttcaatctgccgaagtatttgacccctccacaggtacatggtccgaagtgccaagtatgcccttctcgaaagctcaagtgttacccactgcctttttggctgacatgctaaagcctattgcaactgggttgacttcatacatgggaaagttatgtgtgcctcaaagtctgtattcatggcccttctttgttgatgttgggggagaagtttatgaccctgatacaaattcatggaatgaaatgccagctggcatgggagaaggctggcctgcacgtcaagcaggaacaaagttgagtgttgtggtagatggtgaattatacgcttttgatccttctagttccttggacagtggtaagattaaggtgtatgaccatggggaagatgtttggaaggttgttataggaaaagtccccatctatgattttgcaggttctgaatctccatatttgcttgctggatttcacggaaagcttcatgtcatcaccaaagatgccaatcataggattgcaattttgcgtgctgatctacagcacgatagccctgattccattccgtcgagctcagcttctctcacatctgaatcctctgactcacaggcagattcagatgcagttatctggaaggtcatcgcgaggaaggacttcggtcccaaggaattagtcagttgccaagttcttgacgtttgagcacaagagtcacacaatcaagtgtccgtacaatgacacgagtttcgtttcatttactttttctatgagagcaattatgttatttccttttaaaatgaggtatattgtatagagcagtgtagtatataataaatgtatacgtgtaaactgtttgtgagaagttctcttattttattacaaactgaactagtgtcaattgccagaagctgatgtgtgattgattatctgttattgggtgatcgccttgaaagtttaaacaaccacaactgaactgacattgatattactcttggatatgggatgtttctgatacaaacaaccacaactgagacattcaatactatacgtaccgtaaccatgtttgtcatttcttaatatattcacaataatgattcagtcatggacttggagtagtaacttagattcttatctcgtggagccaactttgaaatatttggctaagacatcaatcgt

SEQ ID NO: 69837 - DNA, 3669 bp, Cannabis sativa
aggagtgagttcttatcctgctgactgttacacctaacatcctttgccttaatttttgataatatattataatgtttcaccaccatctgattattttttttttattaacaaaattcaattcagttcagtatgtatctaatgccagagttgcatttaggtagctttttctttcccttgactgataacagaaaaataaattttataacttactcaattattgctttgaaacattatattatccctctcatctgtactgcactcaaccacaatgtcaaaatcttaccctttggtttttcaggataccaaaacaatgaaataatgaaggtgatgacatttggtaaaagataagaggaataaaaacttctaaaattttaagttacattaataactaacactcagttggtataccattcagtctctccaattggagtgaaacaattttgtttgggacatcagtgcttttgtccctcaactctcacttctctacaaattaaaggaatcaaacatacaattattgatgttcacaagacctatatatctatatgctaagcaaacttggtgtatttgccaggttgttttcactgaacaaaagcagtttttgtacagattaaagaacaaggctctgtctgtagctttatttgtttcatgtataattttctgattcatcttccagtaatttcagtgaagagagtatattgggtttttctagtggtttcaccatcatctttgaaagatgccggcatagatggccaaacaaatgcaggggcttcagcaggcaccattggagggtgttcttcccctttcagaaccttcaagatggttgtcatggagggtctttcattaggatttggatgacaacaagccaagcccaataacaaagtacaccccacttcatcttcttcgaaaacctcattcaatcttggatcaatagcactcagaatcattcctttgctgtaaagtccccatatccaaagtaccatgccattggtgaagctgttctcctcattctggctccctggtttccttccactgatgacttccaacacaagaaccccaaatgcatacacatctgtctccatcgtggctcggcctgtgagaaatgattctggtgccatgtagcctggtgttcctgctatctccttggttgtgtggtgagttttctggctttgttgtatgatgcgagccaaaccgaaatctcccagcttggcattgaactctgagtccaacattatgttgcttgactttatgtccctgtgaagaactctgtttgtacaatcattgtgaagataatctagtgcctgagccacaccacatattatgctgagtcttcttttccagctcaactcaggtatttccattccaagcttgtcatctctgaatatgaacttgtctaagcttccattaggcatgaattcatacacaatgagaagctcatggctctcataacaccatccaatcaatttcaccagatttctatggctcaggctgccaattgttgtcacttctgatatgaactcttgttgtccttgtcttgaatccttggagactctcttaacagctaccactttgtctcccacaactcccttaaagacagttccgaaaccaccttttccaagctggttcttggggtcaaagttgtttgttgctcttctaagttccttcagatgaaacttctttggagtcatggatgagccttgaatctgatcctcgatcctcggatatgtcctttcaagatcgttcttgcaacaaggtcttttccagtacaaacaacagacaataccaattaccagaacaactgttgttgtcacaccaatccaaacccacttgatgatactatgatcctcatcaatgttcaaactatgaaactcccatgaaagtatgcagttcctctcggtgttgttttcgccagtggagccagaaaatccaacataaaccttctcaggaagatggtctgagagattgataggccatgtcaggactggactcttcatgttattctggctcatcacttcattggtcaaagaaacaaacacactgatgttgttcccatcataacggatttgaaccgttatattactgccactcgaaatgttgactccataatcagtaagagaaacttgtttgattgagtagacactgttcaaattcaaccccacatggttatcatcaatatcttcaggaaaactcttcctcgtgtcaaattccaccgctacaacacctgttttagacattgatgatccatttgtgttgtcgtttacaatcccaagccatttcccttgactgtcgtttggaagggaaggatcagcagctaagataaacgacaatccttcaccaagtggataatagcttgtgggattgggtgagatgtttagtataaaagtggtgttgaaagaagtatttatgatcttttttcctttgctttttctccatactctaactggctttataaacaaggatcttccagactggtttatcaatcttttggggtcactaagatctggtgtaacttggatagcattgaatgttatcctagaattattacgaatcagaaaatcttcatcctcgtcatgaaaagttggatagtcaaaatccaagcattccacattagtaaaagctctactaaagagcactataacaaggattttagctaagaacaaagataacccaaggttaaccatgaacagcaattttctttttctttttgagaatatggagtttggtgatgatgacaatgttggaattgggtagaaagtgattataattatgtcaacttagtcgctagtgttataggaaatcaagctaagaaacttccaagtactctcttaaataattaagttatattctttgtttttggtgataatcatgtcttattattttatttatatatatttgaataagtctaaaagcatgagacaaatacgccataacaattttaaaaagtctatgtttagacatatattcactatcatcgtttgttgtcaaagtttattagtattagctttgatatagattaacggctcagattagtttttaagccagaaaagtgccttgagggtgcatatttaatgtttggctactcagttttacgtcacttcctaatcctacccacagttcttcgatattaaatttgttttaaaagtagatatcttgaatggatggatttttttttgggtaaggttgaatagatggaattttgaattctagctattcatgaatattcataacttttgattattcagaaataaattaaattttttgttttcttagcatataaatttggaatttgactactacttaataataagggataattgcataagggacaatttttttttttttttaaattatatttttatgtttaaacttttttttttatatataattttagggtttttcataaaataacacgaaaataacaacaaaattacataaaaataacaacaaaaaataacatatagataacaaaaaatcaacaacaaattaacaaaagtataaatataataccgtattttttgtaaataaaattaaaaaaatcgtaaaaacatttaaaatttcgtgaaaccgtatttttgtaattttttttttgttatttttgtaaatttgtgaaataatccctaataagaataagctcaatgaaaatgatatttataaatgggatgcaaaatgact

SEQ ID NO: 69838 - DNA, 1915 bp, Cannabis sativa
tttcacaatgtggctaaatttatactaaaatgataatgcgtgtaataatggaatttttcgaaaaagaaaaggtttgcatataccttgggcttcaatttatcattgtcagccaaaatccagcactcatctttttcaagaacaaaaggttcatcatttgcatcagtagagaccatttcgtacccttcaatagcagccactcttcgtactatataactttctgggttctcgggatccttcaatactactacatctccaacaaaaacatgcctgtcaacataattttgacaacactaaaataaattaaccgtaaccaactagagaattcaaggtttataagcaaatgattacaggggcaacggcaaagtcctttaatagatgtgaaggtttaaaaaactaaatggacacagtattgtatcaaattaattcatatacatacaagaggagaacctatttcaatagggaagtaagaaagtgaaggtttgaaggtaacttatgtcagatacaaatctcaatcattatcgatcaatggttcacacagatgttctccctaaaaaacacaagtttcataaggcaacccaacaactcaaagaaagtatcgaagcaactaaaaaacaaataaagatacgttcgacatgacaaggtgcctcatcattggcagcatgtgccccgattatcatcacccaacattgtgtacaaaaataaaaagagcattgatattgggttctccagctgaacccatcaatatttatgaaacaggaaactccatcatattgctacattgatcccatgaggaatgatgcaagctttacataatcacgtagacaatgcatgcttctagagacttaagcagaaaatcacctagagttaactggcacctttcgaaaaaaattattacttaaaccgataacatagctgcaagcaaaactaagggaaagaataatagctacagagcaattgagactaaagttatagtcacttagaaacaaatatcagaaatttatgcaagtgaatcgaaacattgtcacagatacttaaaacaatatacaataaagggccaagcacactagttgacttttatcagcaaaataatcaaaattcctaacttaacaactcggtgatctacgaattgataacattcatgttattcttcctaagttttaaaatctcagaaaaacgaaaaattaaagtgaaaacaagagctacaataaaaattataaattacgctggatcggtagctggtagtttccgaacaagaagagttcctccgccaacagtcggggtcatctcctctcctttgttccaatgcaagtatgataaccttccttgaagaagatttttccatacagcatcacccacttctctgtcagtaatttgacctcttttataattctacatcacaataaaaaatgcaacttaaatttaactaaaatttgaggaatttgatcattgttataatacaaaaaggcctctattattctcactatatacaaatgctatatttagtacaaaaaaattgattaaacataaattacaaaaattaatgaaaaaccaaaccaactttttagaaactaagttgtaaatatttcattgtatttcttgcaaaatatgacccatcatacttaagaagattcaaattgtcaaaaatcaataactcaacaactgtatagatataatatatgacgttataaaaatagagcattgttattaggcaccaatggtgctcagcacgtggcgttttacgattggttagcaatattatctaaaacttatttccttaagttatataattataccaataacaatataaccgatagagtgttaggcaccagtggtgccgtttaggatttcccatgaaaatatatataaaatccaacaccacccagcataacattaattaagaacaagacactaaaat

SEQ ID NO: 69839 - DNA, 1138 bp, Cannabis sativa
accgccaacctggtggtcaaaaagtccactgtttctttgccacttccaggggctacagctggcaacactgaaagtgactcctcctccggcgtgccctctgttctggtgaacacagtaaacaaagaggaggtacccgcttcagtatcggttgcagcatcgcagcaagacagtagtcacaacggacaaatgactccctcttctaggcaagaccaatctgagaatacttcaacaacggctaactgcattcccaaactgctaaatgagtcaaatcctaaaggccctcagtctagtatgggcctggcccaatctttactggacccatcgaatttcaacccatatacaagcttactgggcagtcaagcccaaaccatgtcgtggccttcacaacacttatgggaaatgggcttcaaaactttaactgggctaggtacggtagacaagttcatgcgtgaaccctcaatcttcaaccccctctttgagataaatgacttccgttccatggaattcgagaatggcccgaaaaaacgcaaagctatggaagggattattattgggcctagcccattgaaaatcaatgaacaggattcccaattgggagattccagccaggcgagcgggagccatgccctgagttcgaaaaaaccagaagacccgtcttctgttatcggggatgacatgcaattttcccctggttcagtggacgaaacaaaatcgacaaggaaacgaggccgtcgggtgtctactaaggtggaacagcctgcaaatggtgaagtgacccagaggcgaagagggagaccttcaaaatccaacccctcagtgaatgttaaacccaattctttcaaaagaaattacaaaagaagtgcatcgaaaaagaagcaaacaatcaaagctcattgggataacgagttgtttgatctcacggttgacttggacaaccacttcgtgctcgtggaccgcagttcaaatcagaagccatcgtgtatcattcgggaaattgatggggagacagacgaaactactaaggttgctaaccaggattttcattttggggctgtggagacttgcccaaaaatgtctcccaatgcatcatgaaaatattggcttggaactgtcgcgggctcgggaatgccgcgacagt

SEQ ID NO: 69840 - DNA, 2408 bp, Cannabis sativa
  modified_base (36)..(40): a, c, t, g, unknown or other
tcgaatttaaggacttttgtctaatttcgttcaatnnnnntaatttagtgattgtttatgtattaaactatgctcctcagactttaatatctaccaaatcacgctactcgtactttgacatgcgtcaaattatgccctgaactttcatcaatgttaaactttccttactaaaattggacaaaaatctttaagttcaataatctcaataattcatgaaaaaattttaatgactaaaaaaatttaatttaatacatattaaaactactcgaagacaaacatcttaattagtcataaattattatattgatttacacattccaattaattattcccttcaaccaattgtgtagtcgtggaaaccggggcggcaaagagtcaaagagtatatggtgggctgatgagatgacattaattgattgagtttatatattaccaaaacgtgccatcaattactttttttgctcaaccaaaattcattaagctttgtatatatatatattcctaaccattttatattatgttgttgttacgtgtatgataatatttaaatatccccatgtatttataatatttagacatgcatgaacatatatatatatatatatttatagggtatgattctaaagcaattaataataaatcatatatgatggagacatcatcatactatcggcggcatccatgtacaagtgcaccatcctcaccttcaccacgccttgtccgaacccgtagcgggagttcctccataactagccccaacactactactactactactactaccaatcgttccaaatccacaacaacaacaaggccacctaataataataattacaattactacaaaaattctactaattcacacgtgcaaaagaaacaaccagctcaagatcaatcatcaacttctttcaccaagttctttggtggtgcaacaaaggcccctaataataaaccggtcccgggttcgtcttcggcgtgggcgctttcgccggctcggtctcttccgtttgcagtggcggcagcgccaccgaaatcctgttcgggttcggtgaaggtgaaggctagtaataagtcgagtagtagtagtagtggtggagttttgaagtattttattaggcataagaaggtttcgcgggttcaagaggaggactttcatcggtttaggattttgcataatgggctgcttcaatggagattcgttaatgctaaagctctagctgccatggctgctactgagcacattgccgaggttagtcgcatcacctttttcataagtcctcaaatttggctgaaattaggagtaaatattttaatttattaattataagtaagaagtaaaattgctagctaattataaagtgtaacattagtaattaaatatatacacatttttaaaaaattatccattatcacaaatacatgttatattacaattaatgaaataattaaatatggaggagttcaatattaataatataaaaatcgtggttagatatatttttaaaataactgatccaatagtgcagtcgcaaccaatattatttaatatttattaaaagtatatcaagaatatattaaattacaaatatataaaaagttaaacaacttataatcattataatataattagtaaaataaaaattaaatatatatatattttattttgtgtcaaatttagaacactttttataagattcttaagatgatttttaattgaaaatatacaattcgtttcacgacaaaaaaaaaaggcaattttttaaaatattctaaaatatatttttataatatatttttttttattttacatattgtatgtatatacatacatgattttttttttctaaaaaaatgatatattatgagtatatataataagttaatatatttacgaataaactgtacatttttttaaatattatattattaacttttattatatggagatggatcttaatgaaacttacaaatcgtaccatgtctttttttttttctttttttccatttattaatttatgcagttttagattttatatttttctgttgagtttttataaaaatattagatcttggataaaaatttataattttattgtcacacaaatttttttataaaataaccgtaaaaacaacaaaacagaacaattaaaacaatagtactacaactaaaaaacaaccgtagaacaatagtgaaaaattagcatagtatatagtataaaaaaatatatattattttaaaaaaaattctaccccacagtaagaaaaaattagaaatttgagtatgtgatgtaaatttttttttaagaaaattacactccttacctactttttgtttcatattttaatttttaccttcattttactactctttaatttatacccacttttataagttatattcccattat

SEQ ID NO: 69841 - DNA, 8774 bp, Cannabis sativa
  modified_base (5495)..(5499): a, c, t, g, unknown or other
  modified_base (6829)..(6834): a, c, t, g, unknown or other
aacagtacaattcgatcggtattataataagactaagtgtgtctcttgatgaaaaaaatagaaagaaagaaatttaaaaacattttgaggtgtttgtgtgaggaaggaaaagaagtagacacaatatgagtttgattaatattaatagtggaaaagatgaagaagaacatgactactattactcatcatcattagtagtacctttgctacaaccaaaaacactttccaattcatcatcatctcatcatcttgattccaatcatcaccaaataaaaacaggtaattatataatttgaatcggtctacataaaatgttctttcttctcttgcgaatattattataaattttgcaatagaataattttcccgaaaagtttagatcttcgtgagaaaagtactatttggctcagtcactgtaatgactttctaaaattagatagtgacctagtctaaatggtacctatatatttttgttctcatttagagtattctttcttctcttgtgaatattattattataagttttgcaatagaataatttttccaaaaaaattaaattttcatgtactatttagctcggtcactataatgatattttagggttatagatagtgacctaatcgaaatagtatttgtatatttttgttttctgttctcatttctacgaaaagaaaaggagtgcataataaccgaaatttgttgttgttgttgttgttgttgttgttgttgtgttgttggtaacagggaatatatggagttgtgtagcacatataataacaggagttattggagcaggagtgttatcactttcatggagtgttgctcaattaggttggattgcaggccctttagccatcatagcatttgcagccattactattgtctcaacttttcttctttctgattgttacatattccaacatcatcattgttcttcttacatggaagctgtcaaactccatttaggtatgtacattatacaaattacttttcacgtaaattttattttcgatattataaatatttaaaaaaaaataaaaatttataagtaatcttaaataattataatacacacgtacgattgtaaaaaaaattcttataaatatcgaaatttataaaatatataccgagagtagccctaaaatttattgggtacttaattctatcaataacgatataatatactaaacgtaataaataaaaatatatgtatataaaaaaatttaaaataattttttttctcttaaactaagttggcactaaacgtaagcctaactcactttaattcaccttaataaaaccaaatatcccttttaaatatatactttatagacttctatacgaaaaaatattggttaaaaaaagtcaatacctaataatttataactaccattcttccctagctactagtcttataattttactttcttcacaaattgtaattaatataaattttatgattgatgcatgattaattattattgtgtatatatagggaagaaatgggaatatgtgagtggattttttgtgattttgagcttatgtggaagtgggattgcttatactatcacatcagccacaagtttaaggtaaatacatatttatttttccatgtttcactatatttttaattactataaaattaattatatatagcataatttgaatactttgctctttaattaactctcccacattgttttcttaattattgtcatattactatttctcttataaaaatgttgaattggtaagtgattaaattgttttgacatatattataatttatagtcttggatgaatcatctttcccccaagctcatcaaatccaccaaataatacaacattaaacatgatatatatagcataatttgaatatttatttaatccatattttcctatctttactataaaattaaattagcatgcatggtatatataaacataatttgaatattttactctttattttctctacacaatattttcttaattattatatcatattactattttcttttataaaatgttgaataggtaagtgattttttttttttttaatattagaattattaactttggatgtgctaaatacacttataacacaaatatgattataagtcaattgtattataaatttaaattaatttacttttagaattattctttagtgttgttattcaaacttgatcatgaggagatctagctttgatatacttcatataaacaatcaagggtgacaattctttgtttatgagttatatttgtgtcgtgtcgagacccaaatccgttaacttttgtgtgaattttgagtcgtgctgtcttgtcttattcgttttcctacccctataaacaactcgtgacgaatatgaaaagaagaagagagtacaaaaaagattgaaatgatgagatatatcttcattgatagcaaaaatagtcaatcactgaaacaacaataataaatgtagggagcattaatagtaaataagtaacactaaatttttagaatggtttatccgaataaaaatatcagagtttagttcgagcataaatagtaaataagtaacactagatttttagaatggtttatccgaataaaaatatcagagtttagttcaaaataatcatagtgtgaaataataaattaagagcttattaatttaacctatttataggttacataatgggccttgacccatgatcaagttaatcatagatttgatatgcttaattatggttaagttataatttaaatgtaactaataacaaaataacatttaaataaatcatctcaaatgaatattcttcaaaaaagattctagaatcttgacccgaaaacaccacaaagtgcacaacgacctgaagaatgccttattgggggtccaagacctggagaataccctaaccctagggtgatgggtcttgttgttctacaggccgcgattttctttttagttactttatgttgatcgagttgaaaatcgatgttgatcaagatcttgtccaagaaaaaattactaagagaggcctaaaatggtgacctaggcactggtccttgcacttcaaaaagctctttgttagttgcaggatgcaaagttacaagtgacttttttaggtcattacattttggagaattgattcaacctttaaagaagatagttgaaatagatcacactagagtgcattatgagtttaactgttgttttacttgtacattttttggccacgggtcaacaaattttgttcatatcatcttgtcaagtattatagataacaatttctatctagataggaaatacatttagttttacaagaaaaacactatgacatgcatagtagtccaaatttacttgtcataagattgcaaagtcaagtttttccctaaaaaaagtcaagctttcttgtcttctatactaaccaaactttttttttcatttatgaattgaaaaatgtatgatatatctctatacattttataatagaaaacaatactattaattttttttttaaaaaaaaaataaatcaattcattttcaaatttataagattctaaaggaattcgtttatgataaatcaaaagggtactaaaaaaattgtggaaggataaaaaaaattgtgaaaatccctaaaaaagaaggaattttttttaaaatacacaaaaataataaaaaaaaaatacaaaaatacgattgtacgaaattttaaatatttttatgattttatttacagaaaatacggtcttttgatgtatttttatgttgtactattgttaatttactgttgatttttattatttgtatgttattttttgttgttgatttgatttggatgttatttttatgtaatttttttgttgcttttataaaatatcgtaaaaatattaaaaaaatctttaaacgtaaaaatataaaaaatttactaaaaaaataatgttttatgtaattattaaaagctaaaatttcaaaatatatatcttatataattttttattgtaactaaaaagtcattactaaaaataatttttttaataatatatgtatatgatctaatattatatatattaagtttttttcagttattttcttgccctagtagtccaagaactagaataccaattcaacaagacaaatattatttttatataataatatgtatatttatatatttgacaacacaaggcaagatttttatcaaaagacttgacttatgaaacaacaaacttaaaaaagtaagtggaccaaagttaaaaaggtaaacccacccactcactagttgattatatatactaaaacaagacaaaacattgaattgactttgtgatagagcaaggagctttaatatatggtcttaatattcatgttataaagctaaagagatcaaataattaatacaacacaagtggttcttcatcactattatattaaaaaaaaatagaatatattgttatagggaatgttcatgagtaccttaataatattaaatgaagattgaacatgatagtttaatgaaatattactatgtgatcttatatgattacttaataattttttagtcacaataaatttttatatgattaaatgttaattttagtcgtaacaaaaattatttgttattaaaaagtagtatttaaatgcaagttgtcactaatttatttttaatcatggcaaattgtagctaaaaatatatttaaagaataaattataatttttgtaactacgtactacacgtttagctacatactttgtagtgataacacatgaataataatttatatttagtcataattttttgtcacttttaatcaaaaaaaattattttgactaattaaaagtaagattttatatagtgtatatttttttttttgatgaataatatatagtgtatattaatatctaatatatggtaattgttatcattaatttaaaattaaattttacttattttaatttaaaataaaatatattaaaaaagcatagaactcatgtcacaatatatagtatttaacaccttagaataataaatagcaatactcgattcccaaactcaataatagtactccaattcattttttttatacatagtagaaaaaaaatggatcacataagatactaatctcttttctgttgttattgttttagacaatattctaaaacccatataattattacttcattttttagtagaaatgctaagagataccagtaatatctagtactattttaagtattatatcgttattgatagaattaagtatcagatatctcatagaatttaaatgtaataatttttacgaatatcgctaatcaatcgcgtacatatatttagtgataatattttagtcacaacatgaattttttgtgattaaatgtgacttttagttacaagaaaaagttacgtgtgactaaaacatagtatttaaaaataaattatcattaatttagttttagtcacaaacgtattgtgactgaaaatatatttagttacaataaattgtnnnnnttgtgactaatatttttagccacaaattttttaatcataatataaaaataatgatttataattaatcacaatattttacttttaatcataaattttattctgactaaaaatatcattttctttagtgatataaatacaatatcacatgataccaactccaccatatatagtactcttcaaaaactacagcctttaataaaaattcacaaaaaagtgaaaagactaccaaagtccaatcacaatctttggccatgatagaactagaatctaattataaaactttctctccaaactttatcatgatagaattgggacgttcaatttcactagttgtaagctaaacaaagacaattgattatattgataaattgtccttttgttgtttactaatagtaagtagaatggactaaccaaccactcactcattgagtgcattttatggtcctcaaaaaatgaccttaattaattacttcacatgcatatgtcactattgtttatgaaaatcaaaagcgtctatagatagaaaaatattaaatctctcgatcgttacaaaataagttcataggtatggaagaaacatccaaacaactataccagttatcaacaaacgcccacttgatcatgttatgaaccataaaattacaagttcttacaatatcaaaaagaaacaacaaaaaaaaaaaagaaacagttcattttcaatctcccatctaaaatcagctccagctccagtaagtgaattgataaccatctttaaatcacttttcacaatagtaaatttgtacctctttatctttatcgtatcaaacgctaaataacaagcatccgcctctccaaaatgtgtcgtaaaagtcaaaagtccaatttgaccgttgtcacccatagcactacaccttgatggtctctatgcttaaacatggatattcaagaaaaagtagtaagaaaattccaagatgaagatgacatttgattaattgattccttttctttactattggacaaatacccaaatattcatggagactagtttaactttaaagtatatatctttaggtcttttcattttttccaagatttttctattttttcttcctttctttccatattcatgtaactattgtgaccatacacatattacctcaaattacaataatgtatttatatcatatattaccccaaaataataattttaatttaataattattaaaaacattagttaaagtatatttcaaaatattaaataatttttttaaaaaataaactaaaacttcattgaaaataaaaatttaaaacaaaaaaaaaaaaatcttaaaatcaagaaaattattnnnnnnaaaaaattaaataaaaaaatataagtttagaaatagatttagatttatttttattaatattaagattagaaactataaaatccaatttctatttatttacttttatatttttatttatatatatattttctgtttttcagatttttttttaaaaatatatatatacaacttgaattacagccaatctttcaatatcttatcatggagtagcaataatatcttatttatttagttatatttttgacaaataataatatcttatctttgtacgtattaaattctttcaaataattcatttttataaatataaggcttcacatttaataatattttcatataccttacaaaaaaaattaatatttttaaataaggtgcccttatttttttgctataaaaaggggacctataataatggatataccaattcaaagttttaaaatatataaatatttatataaataaaatactctaaatttttgaaaacaaagattctaacttctactaccaaaagcttttatttcctttctttaacaaaatttcaaaaaattaattatattttaagataacatatttgtttttcccagaagataatatttttaaatattttttttaaagttattttcttcaattaattcacattcctaatagaaaaaattaatctctataaatacatctcttctttaattggtgttattccattttgagacacaagagacaattcacatgttcacatgcacacaaaataacaaaacacacaaatatatttatctataaaatataacatatttatatttataaatataacatatctatatttatatatatcaattattataacctaactcaccaccataaaaaataggaagtgtaaaacttgaacaagaaaaatggctgtgcagccaaatttcgaactggagagggatttttgcaacgacgacgggcacccgattcgaaccgggacactatggagttgtgtggcccatataatcacagcagttattggagctggagtgttgtccttggcatggagcacagctcaattgggttggattggaggcccaattgcattgctatgctttgccataatcacatacatctcttcttctcttctttctgattgttataggtcacctgattctgttactggcaaaagaaaccaatcttatattagtgctgttacactccttctaggtaggtataatctttctttttttaatctaaattaaaaaaacaaatcatcgagaacgagtccagatgattctgtttatgtttattgggccgaaagggccgaaaaaagggcctttcggcccaataaaatgagaaaccacctgatgatgatgattctggactcgttctcgagcttttgagctataattttttttattcgaaataaaaaatttggggttaattattcaggtagtaaacaagcttgggcttgtgggttacttcaatatttgagtatgtttggaactggtattgcttatgttattgctactgcaacgagtatgaggtaatatatttatatttatatatatatgttataaatttattgtgttatttaatgtttttttaatgagttttattttttttttttttaatgtagggcaattatgaaatctaattgttatcatgataaagggcataaagctccttgttcatatggaacgactatgtatatggtgctatttggagtggtggaaatttttatgtcacaaattcctgattttcataacatggcttggctttctattgttgctgctattatgtcttttgcctatgcttttatcggatttggattaggttttgcgaccgtcataggtgagttttcgagtaatactgtaatttctttaaaaaatactgtgtaagttttatattatgtactgtgttaagttttcacagttattccacggttgttatttaattgttatgttttattgttt

SEQ ID NO: 69842 - DNA, 8087 bp, Cannabis sativa
tatacaatacccacataatccgataaaatctctataattaataaattacgttatatttattcattcactcatattttactaatttactcgcaagtactttaatgtccatataattacatatttattaaaatatatccatttaaatattattatattttctgggatattaaaactatcccctccttatagaaattttgtcctcaaaatttacctgaataactcgggatattgctcctgcatctgcgactctaactcccaagtcgcctttaatcttgttgttcctccacaacactttagctagcggaatagtacatcttattccgcaatactttctccttctgtccaagatctgaattggatgttccttgtatgacaagtatgtttgaagtttagtatcttcataactaaaaatatgggtcgtatctgacacatatacttctgaagcattgaaatatagaacacattgtgaactctagataaagcaagggtaaggctagctgataagctacctgacctatcctttccaaaatatgaaacgaaacaataaatttgggacttagctttcccttctttccaaatctccaaattaccttcattggtaacactcgaaggaagacaaaatacctaacctagaatttgatatatctacgtttcgaatcagcgtagcttttctgtctactttgtgaggtaagcatacgagctcgaattttctcaatggcctcactcgttctttgactgcatctggccaaaatgtctccgttcatcgacttcatcccaatgaatgggcgattgacattttctcccataaaacatttcatacggtaccataccaatagtactctgataactattattatatgaaaactcaatcagaggaaggtacttgttccaagaccttcaaagtccaatacacatgctcgtatcatatcctcaaatatatgaatagtcctcttagactgaccatcagtctgaggatgaaagattatactaaacttcgttgtagactctcccaaaaattagatgtaaactttggatctcgatctaagacgatcgactttagagcactatgaaaccaaactatctcattgacatatagatcagggtactgatcccccgtatacatagtttgcactggtaaaaagtgagctgactttatatatcgatccatgattatctagatggaatcatagaacactattgttcttagtaatccaactacaaaattcatggttatttcttcctatttacactaaggaatcttcagaggttgaagtaatctcactggcctatgatgctctgctttaacttgcgaacaagttaggcattttgacacatattctactatatcacctttcatacttggccaccaatatagtgatttcacatcttgatacatcttagttatccccagatgtaatgaataaggcatggtatgagactcatctagaatcttctgtcggatactatcgttaactgttacacaaactctttgtttttaccgcaataacccatatgattaaattgagaaaccctttgctgacccgacttcaagcttctttttacactcttgcaattttggatcatgttgttggtttgctttgattctctctaataaatcagactgtaatgtaatattggctagtttcccaactacaaactcaatctttgctctggtcatatcctcagtcaattttggtgagatcctcttcagtccataaatttgccttggacctttttgactcaaagcatccgctaccacattttcttttctaggatggtacaggatctcgcagtcatactctttaactaattccaaccaccgtcgctgcctcattttcaaatccttcagaatgaaaaagtatttgaggctcttgtgatccgtgtagattttacactttatagataatgacgccaaactttcaaagtgaaaactactgctaccagttccatatcatgggtgggatactgttgttcatattccttcagttgcctagacgcataggcaataactttatcagactgcatcaaaatacaacctaacccttgttttgaagcgtcacagtaaatcatgaatttctcattcctgactggcaaggttagcactggtgcggtaattaacctctgcttcaatgtctggaaactacttttgcacttgtcagtccaaataaacttacaattctttcgggttagttcagtttaaggtgtagaaatttcgacaaacccttcaacgaacctcctgtagtatcttgctaatcccaagaaaatttgaactttggttgcagacttgggtcgaggctattcctgaaccgtttcaatcattattagatccaccaagataccatcttttttcacaacatgccctaagaagcttacttgaggcatctaaaattcgtatttcttgaatttagcataaagcttatgctctcagagatgttgcaaccccattcgaagatgtttctcatgtgcctcttctgaatcggagaagatcaaaatggcatcgatgaagacaattaaaatcatctacaaagtctttaaaaactcggttcattaagtccataaatactgccagagcattagttaatctgatggacatcaccaggaatttatagtgtccatatcaggtacgaaaagctgtaatgggaatatcctcctctcgaattctcaactagtgataacaagatcgaagatcaatctttgagaagacggtctttccctataattgattaaatagatcatctatccttggcaaaggatacttgttttcaccgtcaagttatttagctcccagtaatcaatgcacatctgtaaggttccatccttcttctttacaaataaaaccagtgcaccccaaggtgaggtacttggtctagtgaacttaaaattcagcattccctataactgaaccttcaactctttcagctctgcaggtgccatccgatatggagctttaaatataagttctgcccccgatatcaaatcaatttcaaagtcaatctcccgctttggtggtaaccccagtagctcctctggaaagacatccaataactcttgaaccaccaaaacgtgttccagtcccaatggtatttctttcgtggtatccaccacactggctaggaaactgacacatctatcccataacaaatctcttgccttaagccccgagattaatgtaatttgggatccttgaaccatgtccacaaacactatgggtccttaccctcaggctcaaaagtaaccatctttattttacaatcgatggttgcgttatactttactagctagtccatccccaatataacattaaaatcctctaggttcagctcaagaaaatcaaccaataattttcttccctccacatacattggaagggacctaacctacttgctggagataaccaaatctccagtaggcagtaaggtacaaaaaccactcaattaaacatcactaggtctatgcagatttctaatcactttacttgacacataagaaagtgttgcaccgaatcaattaaaacagtcaacaaggcgccatcaatagaaatctaacctgtcatagtaaaaggccagcatcagcctctgcttgggtcacagtaaacacccgagcaagaactagagtatcatctttcttctattttggtctctgtaactgtgggtaatttcttttcaaatggcccactacccctcactagaaacaggctcgagcttgacattcgccctgttggcgtctcttgcacctcaggcactctggataggttctccaattttcattcctaccacatcggaaaccttaattgccttggaatctcttgttaggacccgtagctgatggatcattagattttttcttacgatcattagggtaaacacctttaccagaaccaacattagacgtttacttccacttatctcttcttacactatttttctttcaaatttgatcttgtgcaccctcagcagcgaaggctagctcaaccaccgagcatatgttcggacaatccctggttgttgggaagctacaattacatctcgggcgatatgttcttccaatcctcaaatgaatttggcttttctagcagcctcagtggccacttcatcaaaggcaaacttcgccaatcgataaaacttggtggcatactctgtcactgtcgtattttcgtgagttaaccgtatgaattctttctaagtggggatggaccctcctaaatgaagatcaattgttgtttcgtaaggtgttataagttaaatgtctgagagataaatcgttcttggaaggatcttttaagaactcgaattcttggttcttgaagaatatagtgaaagcaaaggagattctgaagaaaggtgcgtgcaatataatttctaatgggaaagagactaatgtctggactgatccgtgggttactcatggccaagatttctacccaaagcctagtgattctaggccgtgggggtgacaaaggtggcagagttacttttaaataatgggaattgggatatgcctaaacttagagttttgtttgacccagaaactactagtgacattattaagagtggtaaatccagtggccaaggtagagataagtgggtttggacaaaggagcctaatggtttatttactacaaagtcttagaaagagcccctgattgcactatggccctcaagttgcagaacaaactttagaactccaaaaccttggaacgtcataaggtcctctgttggtgcatttttttcgatgctctgactatttaggccattctagccaagagaattagtatagaagaggtttcttgccctctctgtggagagggtgaggaatcgatgcaacatttgttccttttttgcacttatgctgaccatctctagagggcttccccgtgggggattatgcatgtcttaggctcaggagctcgtgtttgggattgggttacttttctttggagcttgaagttaaaaggggtggatactggtaagttgttcctctatgcttcgttgtggggtatactatttggagggctcgcaacgataaggttcataataactgtaggtgtaacattaagcaaatgattgactctatctctatttgttacgcagattatgcatcttgtttacttattctgccattggctgtgatgcccccaagctggtctcctcttccaaatgattggattaaaattaattgtgatgtcaaagttggtagctgctccatgtgcgcgatagctgtagctagggatcacttagggattgtcttgtgggtggctaccaaaatgctctatttctcggatcctcttattggagaagttggggcttgcaggttagccttagacacggctgttatgatgaagcacatttttgttcttatggagagtgactctgaaaaggttatcaatgctctgaaaggaaatttattcggttgagaaattgataattatattcattattgtaagcaactctcttctaatttgttaggttgtaatttctcttttattttaagagtttgtaattttgcggcctataatgttgttaggtgggctttcgcgaaaaatgtaactgggattgctaatctcaactataccagactctatcttgtgtaatgaccgtgaggtttaattttattttatttatatataacaaattatttaaaaaaaaaaaggatgatgtgttgaaaataattgtatagagagagggttcctcggtatacatattttatgtttttaatttcatgtatattatttgtttgataaattacatattttgagttacatttctgttacttagatcactaacactttattaaatgctaactaaagtaattaatactagcacatgtcagtatattatcagttcatatcatactaatattattttaaaataattaaacaaataaaaatcatagttatttgaaaatagttttttaacaaataaatgaataactaacaaattaaaagaaaaagaaaaaatagagtgtatgatctaggctccttcatctcttttactttcttctttttatctgtctctcatctctctttcccccggcgtgtttctctccgacattaatggcagaccttgttatagatgcccactttgtatataatcccttactatggtacgcaaagagacaagattactctatgagttaataagatgaaagacatactcaatttcataatattggatacgagatgagattgttagtatatgctcttcaagagactaatcttctctttataagttctcactcgattaattagtgtaggggctttttaatgtgtaatattcagagataagttgaagaatgtacttccttttttgtatccattaataaaaaatactcttatattatacttcattaaaaagtactcgcttttgtatatctgttgtccaatatatcttcaccctctatttaagtctagcacataatttatattaacctaaaatgtataataaggacatcatctataaaagtgagtatattttaaagaatatagaaataaagataaaaattaaaacagataaaataaagtagatatacaatataatttcctctaatattcaagttgtaattaatccaattaataatttggaaggtatatgtattaggggtaggcatccaatccaatctaactttttttcctcatctgatctaatccaattagtaattggatttgaaaaaatatcattcgatccgatccaattagacctcaaaatccaatcaaattcaatctaattcaatccaattactattagattggatcggttttttaattggatatccaattacacacttaaattttaatattaacttataaatatgaaaaaaaaaatacgtaaaaactaagtaccaccttttatttaagtttaatacttcataaacatactactcttacaagtgtaatgttaccaaaagttttaaataatttaaacaataatatttctaagtaataaaataaaacaaaacatcatgaaaataaatacacaaaacaatgaagtgttacaaatttaatatacaaaaaaaatctaataaaaatataattaatatatataatatttttcaatatttttattatataaataattttttaatatataaatgtaattgaattgtatcggtttttaattgaattttgagattgacatttaataattaattcaatccaattagaatttaatttttaacttcaaatttaattaaattttaattgaatatttatttttttataattagattggattagatcggatcgatccaattggatgagattatattggttattatgtatatttatattatttgagaagaagcaaacatttgtgaccctctagcttttgtagcaattttatacaagggctgatagagtagtggagcttggaaaaggacaggttttaatgtatcggtgtgagacccacatcacatgcccatcaccaataccctgcataaaagcaccaaccaaccaaccaaccttcttctactggtcccacacacttattaagtctaataatactatttatatatattatataagaaaattatgcaatatctaaataggacttaattattaatttttaatatttatatgatatatgtttgtttcttttatatttatagcagtcaatccattcattttcaaatagtttacagatgctaaaatcttatttcaaatatttagttgcacaatatttttattattattattattatatgtccaatcaactattttaaatgttgtttttagtggtatggtaaattactatgcattttcaaaaaattaataaaatatctactataattataatgtatgacttcattacattataaattgatttctctaaatttcaaaaataaaatacttatctgtaggataaaaaatgacacacctattataattggtctatatatatgtagtaaattgcgctataaatacataatatttcagattttatacacttaaatatctaatgtttattttggaggcaaaaatacttaatgttacaatcctcttacatcgttactactacttttgttaactcataaatatagatacgtggagggccaaatgcattacatttatttattatattttaaaatttaat

SEQ ID NO: 69843 - DNA, 3155 bp, Cannabis sativa
ttatatattatattatttaaaaatgatgtaacaatagtaatctcttatattgtgcttatattatattttacaataaaattgtaatacttatatatattttttttcttataataaaatctctaacaactagttataaaataaatttaggctggtaggagtgaatatgaatctagaactcgtttagatggtggaaaagctaaccaaaacgtggtagtgaactcgggaaggtacgtggctaaaacccatttcacattctgaatgtaaatactcttaattttcaaaaaataacattttacaatttcattaatagagattgtttactaagaccgtggattcagtcaagtcatcgggagttaaaccttcccttaaacggttcagaaaaaaattaattagtcattaaacggcgttttaaccatggttaatctaccaaactaaaccttaactctagttcaccacctttatatgcttacagaatcacaaattatatagtattaaaattaactgtctacaacatcctgaccctttaactttgcccatatattcgttctttgctgcactactttttggctcctctgcttcggcttctctattctctgttttctgggtttctgtgtagatttttcttacagaggtaactagactgtttctatttcgtaacttgttttcttgagctatttttaaattgttttgattatattatgtaataacttatacatatgtatataacttctattttctgcatacgtagatgccaactgaaaatgatcacgatcaatgtgacgaaaacaattcagaaccattcgttgaaattgatcctagtggacggtatggtcggtacaatgagctacttgggtcaggtgctgtgaaaaaggtgtatagagcttttgatcaagaggaaggcatcgaagtggcatggaaccaagtgaggctacgtaacttaagcgatgaccctgccatgattgagaggctttattcggaagttaggcttttaagatccttaacaaacgagaatataattgctttgtactttgtttggagggacgaggaaagaggtaccctcaatttcatcaccgaggtttgcacaagtgggaatttaagacagtataggatgaaacataagcatgtttcaatgaaagctttgaagaaatggtccaaacagatcctcaaaggcttggagtatttgcatacgcatgacccttgtgttatacacagagatctcaactgcagcaatgtgtttgtcaatggaaatattggacaggtaatgataatactgattagaaaaattgttgggaataaacaacgacaccccttttgagtatgtttgaagaaaaagaaatcccaatttgactttacttgttttaaagtatttttttaatacttagttgtgttttgggatcaacaatttttggcaggtaatctaatttatcttctttctaatactctaataataggtcaaaattggtgacttgggattggctgctatagtgggaaagaatcattcagcacattctgttctagggactccagagtttatggcacctgagctttatgatgagaactacacagaaatggttgacatttactcatttgggatgtgtgtgctagaaatggtgaccttggaaattccttatagtgaatgtgacaatgttgccaagatatacagaaaggtttccacaggtgttagaccttgtgccttaagcaaggtcagaaaccctgaagtgaaggccttcattgaaaagtgcctagctcaaccaatggcaaggccctctgctgctgacctcctcaaggaccctttctttgatgaagttgttgatgatgatgatgaaaataaaaatgatgagacttcttatgcttcatgaatatgatcttgtacaagtggccatgctaatattaggtcttggtcaagattaatcatacaattaagatgaatggtcagaatcgtgtactacagataggggtgcaaattacagtgttctactcgtttttgttgaatgagagatgtatctcaattgtttttatttttcccttctctctgtaagtaaaggtttaaactttaaacacccaatatattaattgtttagctaggtgaagattgattctttgttggaatagaaatgtaataatgtgtatgctagtattttatatatacatatacattagcggtgtggtccggatggttattccattgatttgaaatgaaattctaattttatggtgggacctcatctttttaattttctttccttttcaaaagataagaaagggaaagtttgttcttaatttaatcctcagttatatttgttaccagatatatagatatatattgcgtttctcatatttgtaggaagttagatttggaattcaaatcaagtgtcctagaaatgaattatttaaaaagtaaagtcaaagagagccaaaacaaacaacaaatgtcatgttaaaggcaagtcaaaaccaacatgtgtattcatgtaatgagttgccgacttataaaagattacaacattcacaagagagctttttcattttcagttctgttgggagaaaaataaatattttaacgtgactcttggcttgttggaaaggaaaattgtgtagtggggaagttggaatacgaataatgaattgaaagtttctttttttcttatttatcatttcatttggctgtggtctggccgcgctgtcaacactgttttgttggggataaaaagttttgctgttgcttcactggcactgatttggttttcttcaaaagtgataaaagttatatcatagccgttagctctttaaaataatataatatgaatacgccattataagagaaaacttatttgtaacttgttggaattgactgtatttttttatttttttttaagaataattagtatttttgtccttaatttctaacactatctaattttattcttaaaatatacgaattgttaaaaaaaattctacaatataacaattacatcttcttttagttttaaaaattaatatttttaacctttaaactttgaccaatactaaattttgtactctttcataacaaaaatggtaaatttcaaaaattataatttttttattaattttgaaaaaaaattaaagaaaagttattaaaaaatctgttaaaaatattaaatttactaaaaaaa

SEQ ID NO: 69844 - DNA, 2658 bp, Cannabis sativa
aaaaaaaaaaaaaaaaccttgagtccttgactataaaccaaacaccttaaattcttcattgtataatactttactatataggccttctcttttgtaataaatttttaaatattaccccaaaaaaatgtaataattcttttttttttattattattatttttatgaacgacatgtcaatgaacaccatgtggtgttgagtggtcatgtgtattataattttatttttccactctactcgtttgactaatgttcatattaaattttagaggtcggcaatctatggagattgaaataattaattaaatcttcaaatgaatgtgagaaaaaaaaaagttttaaaccatgtgattgggagtttgatctgtatttcccattcatgatagtgactcgaaaattgagttgaataatccgaatgattcacattgtaataatttagtgataattgttgtgttagttttgttattattattcaagacctatcatgtaatgtattgtatcatattcatagtagtaatttttgtggtttattattactattattgtcaccgaagtaggggccgaggagcagttgctttctttgaaaaaaaaataaatatacatttcagttagttacaatatatatttttgaaaaaaagtgatatttataaatataacacaaggttgatataatagtaaagttattttattacatagtgtaggttatgagttctaatcccaattaaaacatatttactttggtatttaaattttactttttgaacttctatcaataagacttgtatttagtgtcttaacaattgaacccaatgtttttattgttaatttttttttttactttatactatatttaatattaaaatacaaatttaaatcaatttttaacatgatatataatatagggaaaaaaaaaacaccctccctcacttacaaaagaaaatgtcgcccatcttcaacttaaattctgaatctgccactgcagcgaaagattttgaaattactttaatcttttgaatgcataattttttatttgaattgaggggagctcttcttgtattactaatgaataaaaaattcccaaagagaatggcctactaatcaaaattacacaattaatcatgtgaagggtagcattaataagtgcccaagcttttaaaaagtgacaatcaagaagtcctgcccacaacacaatttcatattaactcaatctaagcttagcccaattgtaaagtttataatattttataatatacaatcttctagcctaacttttaagtatgtggcccaaaaggcttcttattatttcaataaatatggccccttttattggcttttgctttcctccaagtgcatgctacactgaactgtcatttttctttttttgtttatcctttttcaacaaatgtctccctttctttaaatgataaatatgtattaaaaaaacactgctaattcatgcatatacaaaaccatgaacaaatctaacctaacaattataacaaaatcaaatggtattaaggatagaatttttatccagattggccaagcccttttcttttttttctgagaaagttctgttctcaactttatgttatgccaaaacaattttaagtttgtggtttgtggcctgcttaggctaactccaattggacactaaaatagtgacaaaatttctctattttctctccaactataaaatcaacaccatatatggtgtggtctgcattaagtcacaccataattgtttatggtagacaacaatatcctacatttttttgttataataatactaatattataactttttttaaaaaaaatatacaatattgatttaatattctaatttaaaaagtacataactttttcattaagattttttttccttattagttttaattctaactatttttcattaatattgtctggctcacatagtcacatttgtaccacatggcattattaattatgacacatgtcttaactcgtatataaatagtgaagtgatcatgcctttatatacccaaaatttagaaaagaaaaaaaagaaagaaagaagaagagtttttttcttttttttttttttgaaacgagaaggaagaagagttcatatacctttatacctatatgatgatgaccattgaaaactgcagcatacataaattaattacttcaactccaatcatatatagatatatagtactacttatatataattaatactatacagagatataatcattcatacttgacaaaagaaagacttgcacgtttatatctatttatagtctttcccacatgaatgaaaatgaatgaatgagctgctatgtgaaattagcatcttatttagaaccattcatgtatagttctatatgtaaattctgtttaggaagtttttcttgatattttcttaagtttatgtaaattttaaattaataatggcgcaagatagaattaataagttaaataatttatttggtaaattatatatctacttattggaatctcggttatataggtccatggtccgctcagtagttataataatactgattgcaaactcacttaattaattttaatttatcaattttaattctaaaataaactatatcttatttatgaactttcactaagtaaggacttagttgtgaagaaaagagattt

SEQ ID NO: 69845 - DNA, 2467 bp, Cannabis sativa
cacacacacacacacacacaagataaaataaaagatgaattgctttagatagtacaactttttgcctggattttttttccttccaaaaaatgtcaggttgaagctgtgtggttctatttttttgcaaaacagttaataatctgtagatttaattggaatattcacaggtgtagtttttatcttcagccttgcgaaggttcaactgttcagatcctcacacaaggaaaactgagtgcacctcggattttgagaattcataaagtaagttatttttcatggtagatatagcttacaaaaggcaaatgttctttgaatgttgtaagatgataatttatgattagacagatgggtttgataattattgaacgcgttgtggtgggtatcaataagaaatattttcttgctctctaaatttaactcttgtagccacatttagtattttactgttaagattattggtcattaaaactatttaaagatttattctgaagttggcacatgctctgttaaatgttgaagaaaacctgcatactcttttgcttttctgtatgctgatgtttgtgatgtgcatctttctcatggtttatcttgaaagttgagtgactgagtttgatggtttttttttcttttaaaataataactagctttgatgtttttcactacataggtaataaattatgttattgagaagatggttcttgacaagccattggatagtttaaattcggatgcaacatttcctcctggtcttgctggagggccattgcaacctgcaacagttggtgatggatcttttcgttctggaatgaaaccctggcaaaagcttaagccctctatagagattctctgcaacaatcaggcaagtgcatatgcattttacagtcattcttgttggcaaaaattgatgttgtatttataaatttgacatttcttgtaccaattagaaccctttaaactaattggtaacaacaataagaagcacaataatggtgttggattctcatcttggacatgcctagaagcttttgttacattatagctactggcattacctattcatctttgatatggttgtatgacttactccctctcttgtcgctcccaggttttgtcgccagatatgagcttagctacagtgcgtgcttatatatggaagaaatctgatgatctggttttaaattataaggtattacaaggaaggtgattctgcatggccatggagttgaccggtgagttatttttctctctttcccctcacattttcttatgggcttgggtactatttttttttaaatacaaggccagcagctagaaagaagacatgcataaataggtgagatgatctgtttggttttgtagagtcaagatttgtcttctttttagttatctctttggaaattaggaagaagttctatgattacttgtccaaaaaaaaaaggtacaaaaactttagttctcttaataggtttataaaatcttaccaatgtcacagtgattgcaaaccaattttatctatttcattcctcagatcattatgactgatatttgcaggtgataatgctgtaaagttcagggaaatattgaattttttttcttcttctgaggacgatgtctctggaggctgctaatccaaaatagatgggatccaagtaaattttaaacaaagtacaaatctagttcatctttccttcaatatgtgctgagaaaagctcctctatagcattttcctatttggtggacaatggaaagtgcgtattgccaattggtggatattctgcattgtggaaagaatataaaggttttttcttgttttacttgtggatgaagatttgacagaaaagggctttggaaattcccctagggccaaattagaagtatgatgatgaaaaaagaaaaagaaaagcactgtaggggtttatgtttgtgggttgggtttacaatacatgcatagctatagggttctcttctctattgtgaaggtgagatttatttatatttaattaatatatttttagaaataagacaaagatcccatttctctaaagttggttagatttcattctccctttaaattcctacctttctctacaaaattgtcttcaggtcaaacttattcctgcctaatcgtacataacaattcttttttgcttaacatccatattttaacaaaattctattgacacggttgataaattaaagctgattttgtctcttttgtcaatggtaattgcattgggtcttgaataaccttaaaacattttgagcgttttgtaaattataatttattattacaaatgtcacatgttaatggcttttttatgttattacggatggtaaatgttaataggctgtttttttatatctcttcaaaagttactaaagagcatctcacgatacatttggttaggaataataaaaagggaatgtatttttttttggaaaccaataaagtttttttttttttttt

SEQ ID NO: 69846 - DNA, 2051 bp, Cannabis sativa
cttggcttactattaatatggatcacaatatataaaagttactcatttactaatcttattatacatgagcggtagtgtttgaataactttattttttctttaatatatttattagagagtacattaattgagtaacattcattacttttggggaagctttaatttactgacttggagaaaatatcgtgttgtctatccattgactgctaactttttaaccaatgctgactggtacatcttattcttggaaattgacatttttggagcagaaatattgcgtgtaaccacactgttggggaatgcatcagttttaggtcaaagtgggcttgaacatgctagccccctggcttctggaggaatgtattcaaatggaggtgctgatgtgaacgtatggtcatcacggttccaatcagaagtacggattactaaccattaacataaccttattttcatctaatttttactgtataattttagagtattcctgacacgattttttgcattccagttgtttaactcttaacatttgtttgagtgcttgcaatttagtgacaggtagtcagaagctaacatcaacgagcaatcaataatagattttagcttagcttcctgttccagaatctactgatggttctctatttctcatgcctttatatctttgctttccaggcaaaacttgatttcaaggcgtagtagcatagtctcgtttactttttgacataaggctgcattttctgttatgatgcaattgtgaagcagtgtagttttgaactaagtagcgcacctgatcttcttatgactgaccctctgtttattcatctagtagtcttatatttgttgtcattagggagattttaactgacatcatttaacttttcgggtatagcaaaagtgcttaactgagatgtcagttcatcagctaaataatactaaaaaagaaaaaagtttgtcgttataatataaaattagtgtcttggttgtagctcaacttcttgatgtaaagcctagaagaaatagtcttcttcttcttctaaggttaagtttgatattttctggttatatatcagctgcagcgcattttttccctcacttaatattaatctctccttgctcgattatatcctgtgattttccttgcactggctttgttgtggaaattgacacttatggtaatattcagatgtcgagtttgttacagcctgcatcatcaccaaactggctgagttctcaaagtagctcatcaggtttaattgttaagcgaacaatcagagtggacattccggttgaacattaccccaatgtacttgttaaaaattttaaaccacttttctcagagacttttatttgattaaagtctgacattgattgcttttgttcatgcagtataattttgttggccgcctccttggtcctagagggaactctctcaagcgagtggaagcgactaccgactgtcgtgttctaatcagaggtcgtggtagcataaaggatccaactcgggtaataataagattttctagcatgttgtttctatagtttttttatcataaaaatgttagttatttattctgttgttcatttctaacaggaagaaatgatgagaggaaaaccagggtacgagcatctgaatgagcctctacatattctagttgaggcagagttaccggttgaaatcattgatgctcgtttaatgcaagcacgcgagatactcgaagatctactcaggccaatggtaattcctccatttctatcatcttaaaaaaaaaaaatcatgtctttacaatctgctatcacaatttacttccctttacaccttcgtaccattttgatctcaggacgaatcccaggatttctacaagaaacaacagctgcgagagctagcaatgctaaacggtactcttcgcgaggagggttctccaatgtctggctcggtctctccattccagaacaacagcctcggcatgaaaagggccaaaaccagggggtaagggctcttgttgtagagcttgtgtgtgaaaatttcagcgagtaaaaacaaacagcagtttccc

SEQ ID NO: 69847 - DNA, 1463 bp, Cannabis sativa
cagccaaaagaattcttggcattgagattataaggaacatgccacatacaataactctaattcaggaaggctatctcaagaaaatagttgacaaattttgcatgaaagacgacaaacctatttctacacaactaacacctcacttcaaactgccacaagaataatcttccaaaacagaagctgaaatagataaaatggagaatgttccctattctagttgtgttggtagtctcatgtatcccagggtctgtacaagacccaaccttgttcatatatcattgtaatgactagataaattgcaaatccaagaaaccattattggactgcactcaagtggatcttgagatatatcaaaggaaaaatgagaacatgcctggtgtaggaggtgagacaaatcaaaaggaaaaggaagtgataggatttgttgaatctgaatatgttacaaatctagacacaaaaatgtctctaactggatatgtgtttagagctcgtagaggatgtgtaagttggaaattcaacttgcaaaaggttgtagcactctcatcaattaaggcagaatatagggatgcaactggagcccttaaagaggttatatggatcatagatttaacaaaagaaatgggatacaattcagacaccatcacaatgcattgtgacagccaaagtgcactccacttgatgaaaaactccatgctccatgagagatccaagcatatatacataaagttaccttttattaaagatgttataactgcaaaagcaattggtgtgaagaagattagtacacatgtcaacccagctgacatgtttacaacactagttacaatggaaaagtttaggttatgcctaagcttattgaagatcgaaggaatgcaatagcctctgttcagaggtactcattgattgatggaacgatcaattatttttttattaatttatatacaattagctcaattttttaatgttatcaagagactaaaataggtggaattgatagaatttcagccatttgtttataattaactaacttaactatatttgacagtttgtttgttaggttattgcttgattttttcccatctctttggagatccattgcttgtctatatcaggagctttagttctcaatgctaggtgatgatctagagagggagaattaagaagaaaaaattgagagaggaagaatgtacaggggttgtgtgtgtttgatcacaattctctgaagtgagcattttgtatgtgcaagacaccattgttgttattgatccttagagatcactctctataatctaagcaactattgttaataaaggttggttacaaggtggtttccctcgggaattagatccatgcaggaaattgtttgagattgaatctcattaaatctgttgtctctcattttttatgctacaatattctgttatagcgtcaatctgttattttagttttttttttctaatttt

SEQ ID NO: 69848 - DNA, 1289 bp, Cannabis sativa
ggtggcttttgtctatcctccataaattccaaactagctggagacaaacgcttcggccttgtcagttcagcatatttcttgctctttagaaaactcaagtattttgaccaacccggcttagaacagccatatgctgcatgttgtgctaaaagaccgtcatttaaagtgttaatacattctacgctaatatacagagcacgctttttatgtggatcggtttccatttgctctatctgcaacaaaaaaagtatcttagaagtccactatgaaaaaccataacgcagtttttctcttggttaaaatctttggttacatacctctctaggataaggaggttcagggaaaagtttcccacatttgtaaacaatgtcgtcttcgtggtgttctaatttgctaaaagaccaattccccacttgaattggcaagccataatgaagaagaataggctcaacgccttctcgtggaacataacctgggtataacatcagattatcattgatcttgtgtcgaagtcctgcctaaaaatcaaggaggatacaaatttaagcaagtaattagtactaagaacatcaaagtaaagggtaaactcttgtttaacaagaatattgttctgacttacttcagcagcaccaaaagagtatccatacatctcactgatccatcctttcccataaatgtcaccggtaagatttgttccccaatgagctcggtcttctcgcacttcttctgttttcgaaagccacaagggtgctagtttcctaagatcatcgatatgcatagctagaagcccaccaactttatcacatagttccgggtgtttagtgtgcattccagcaagagcattatcgcatccgaccaagtacctgaaggataaattcatcatacaaataattatgtatagccaaattaaaagaaaaccaaaggcaaaggcaaaataattatctaagtagttcataaactaatgtggaaaccgccagaccaaatatatccaagtaactgaatattcagcattagtcaagtctgcattatcaaaactttacagtcaaagcattgtctgatattttggttgtggtatggtatggtttgttttgttcagtggctatatatggaggatctctagaccacattttgagccatttacatcagataagttcttttactttagatattaaagaaataatttgattgtgaacattactttttaaatatcttttaatattaaaatgaagtgttacagtttctcaagctagcaatgatagtgatgttggattgatctcttgacttggatt

SEQ ID NO: 69849 - DNA, 1675 bp, Cannabis sativa
ctggccgaccatgggtggctttcatggggtctggccatggggactatgtccctaggctggccagcctatgcctggaactagggttcctactcggccactaggcagggtcttgggatctggccggccactaggacatggaaccctagtcggccaaggccaaggctccaagtgggtagctagtttttctccctcttttgacctcggctggtctcctgacgtccttggaggcatatacatgctgtggccttatgtgtggtttatcttggaaactttgtaaaaggctagataatgagtccattatagttaattatgcaacttaggacttactgtgtgtcttggtaattttacctaatacgatacttggtcatttggtcgaccttgtaccttttgttttacatggaagatgatgttgagtgttgttgacttgaatatatttgtagcttagtcaagttgctcacctcccttatatatttcttccatgcaggtagtgctcggtgttgaattggggaggtgacaactgggtaggtctcctgtttgcctcgtacttatggcaaggacgaaacagactcttgtaaggctcccccgtatgatccttatatggccatggttgccataagggttcgaattagagtggaggaagagactgcccagcctcctgtcaaggctaagccagaggtggactcggagattgggagctacaatgtagaattcaagctagaggaggttgctccagtgagggggaggagttataggacatgttccatgctccctcaccatcctttggcccattatgatgcccaaggtagtcttctgaacgggcttggtgcaccttcaatactaggactggattatgtcctggaacagtctcgcgtgtcggagatattggatgcaaaaccaccaaaaacaagttgggtttcgccagcttctgctctttctgatgaggccttcgataaggtcattactagtggccaagtaggggtgtccgttgggagattacacgcaggaactgtagggcgcacaggcctccttcggactggttggcatggtctgagcatcatatttaacatggggctgtattaccgctccattagtactttttggacgttgcagcttactttgggatgtgcctaacacagtccataccaaagagcattaagtatttatcagcgatgtttgtcttgtacaggaagcttagttggtctcttcctaccccttacgagattgggtactatattgagttgaagttggggttaaagcagagaagactcggctatttttattttagctagcttggtcaccaatgtctaggtgacaccaactacaaagccatgtcaaaggttggcaggtacaccaagaagtattttatcgcacatggtcttcgcaaaattgtacacaatggatttcaatttgtcccgctctttagacgtttcatccctactttggaaataagggatataacaaatctgcttgtggaccatcactgcctctccctccacgagggtctgcacctattgggtagtctgtagcttagcatgttagccaaggtaccaggaggcccactagaggagcggggtcagctgctggtaagaaggctattgagtcagccactcggtgtatagagagggctaaccctttcttggatgaggctttgcaggagttgggtgacggtgtgcct

SEQ ID NO: 69850 - DNA, 3199 bp, Cannabis sativa
tacttgattctgtgacgtcatctttcttaccacatatcaaacattgatgtccatgttaccagagaaaaattctggattaacattatctctaaggcatatccctagaaggacgctgacaattgagtaactaatcattaaacttaccataattatgcaatattgagtacttggggtatagtgtatacaattccaagtccaattaaattatcttaaaactgcatatccatattttctatgcctattagttaactagatctttaactttttacctaaccaattaacttagttttgagccaatgcttgaaattcttgaaacttcttagagacattctagattttctaaacatgaggtaaagatatgaaaatctagagtaatcatctatgaaggctatgtgatactcataacccctagcttctacattctaaagtccataaaattttataccaactcaagtggttattaggctttatttctctttacagagaacgaacactttgatcattttaatttctagacatgattcatagacttataactcacctagggtaagttattccaaaggtcacctttagttagtttataaattctatcatagtcattatggccaagacataatagtcatagataattcattttaacgttatttgtctttcaacatttatagtttttaggtcttattacattaaagagtactttgttgtgagttgtttacttggtctcagaatatgtagcttatttccatacattcaacacatagtttatatatatatatatatattgaatagttactttaaaacttgcaaaagtcttaacttagtgttcttcatgtaagttagaaactgaaattagatttttactaaaatttagaataatataaatattttatccatagacaaaattttatatctaaatttcagatgagctatttatctagcttggaccgccattaatacatattaacaaacttcaaactttaacttgccttttatatctcatcaagtgtatttaaagtaatacaaacatggttagtatactctgaatcaataatccacattgattatatcattctttataacacgtgcctaaaatgaaagaaatggtttcaatatcttcgtattttgatgctagaaatatggagcaatccagtttctaatgctcatttttttgcaataaattacattacttttttaattttgcatttccttacaacttgttgtcgatcttctgaatattagctaagatagccactagtttgattaattcagtagcattgcaagtgagagactcaatttcttaaaaaaaaatgaggattgtcatcataactacacataatatggttatttacactattcattttcttagaaactaggataacgttgtcatctactttcatctgtaattttcatgaatatggagttcattaatgaatttagattcaaactacatagtgatgaaaagacttcatgagaaacaatggagtaaatggacaaactttaagaatatttgtctattactatctcttatagttgttctataagaaacttagaatagtattataagcaaatgttcataagttttctatcatgataaattttctttagctaaagagtatcagatcgaggttttttcatttcaaaaagtacattatcaataactgaaatcatcgcttagtctatataaattttattcacataacttaagaaatttataaccatgtaacaaacatgaaagatatggaaaaaaaaaatacctaaaacaaatatgttatccgtgtttttggcaagggacacgtggatcctaaatagatgtttaaagcccatcagtgggctcaaaataacataaactaggctgaacccaattattatctggccttctgggagaacaactgcacacatcgctagatgagcttccgtcaagcctagtaagcatatggaagtatgtcaactccgtgtacctggaagagaatctcaatgtgcatctgaaagccaatcccaatttcccatttaatgctccacacagaataagggatatcctcccaagattgtgggcaaagaataatatcttatctaagatgggaaactgaagtaattgaagaccaaataattactatcacattaattatccacaatcaaaggacacaatatgaacatctatcactgtgatcaagtttccacatcagcatatatgcattgcctcatggtctgggcttcactagataagcccaaatttatgtattaattgtaaattccccattagagggaaaaggaaactaagtataacctctactactgtataaatatatattgaatccttcatataaagggttggaaattctagactgacttgctcaagaagagaatagagtgatcatacttattgtaatcccttagacttttctagtctgtctagtaataatactgacttatggactaaggcttattaatactccaaccatggaggtcttcttcattcatcgatctcttaattgtattttttttagcttaaatattaaataattcgttttccaaaaatatcggtaaactttttggtgctttcattgagagctaaagaaagcagagataccatccaagattatgttcagtatttatggtactcacccaaacccaatcttgtcttcattacaacaaccctaaaaatggtgatgttgattctaatgctaagacaagagacgtagaagatccaactgaggtgaccagtcgccacaagaaggatcaaactaacaaggattctattcctgaggactatatggatgaaggcaacaaatcagaggagactgattctgttgatcctgaagataattatcaagacatgcctattgatgatgatgctaaaaaagaaggtaatccagatgagtcagatcctgtggtcaccgtggcccaaaagttgagagaaactgaagataaatttttgtcgcaagggcaattttctttgccggtgcataaagaaatgtcgagaacagaggctgtcattaaagcactgactgctacaagaaaaaccaatcatgatgccccaaaagataacactactaggaaagttgatcctaaaaatcctagaacctacgatcctcataaagataaagggaaaagaaaagtaggtgaaacatcaaagaaggctgcccaaactaaatagcaaaagaagtccaaatctatcaaccaaccttaaaacaaaagaaaagaa

SEQ ID NO: 69851 - DNA, 1201 bp, Cannabis sativa
tacctttgtggattggaaaaagtcttaaaaagcttattattctaagcttgagatccaatcattttgataaaaacatgccaccaaatctttgtcacttgaaacatcttcaagtgttggatctttctctaaataacatttttggaagtataccaaattgtattggtgactttacatcaatgaaacaaaatgaaggtcttaatactgtccatgttagaacaaagacttatgctttcaaaaacacaatgacaaactatggtgaacaaattttcttgacttggaaaggaactttgtctaagtacaaaagtactcttggacttgtaaaggttatcgatttatcgagcaacaagttggttggagaaattccaagagaaatcattgagcttaatggtttgatatctttgaacttgtcaagaaacaatttaagtggacaaattcctgtgaatattggtcagttgatgtctttagatgctcttgatttgtcaagaaatcacttttttgggaaaattccttcatctctttcgaaagtggatcgtctcaatacattagacttgtcatacaacaacttgtctggaaaaattccaacaggccctcaactccaaactcgagacgaagctgcatacatgggaaatcttgatctttgtggatcacctcttcataaaaaatgtccggatgaagaagaacataatgctactcagcttagtgatgagcacatagaaaatgaagatgagtttataagcaaaggattttttatcagtgtagcacttggatttttggttggattttggggaatttgtttcactctaatcttcaacaagtctttgagatatgcatctttcaagttattggatgatatagaagattggataaagctaagataatgcaagtgatcatagataaaaggtacaaaatatgctaattttttctttttcaaaatttgttatttgataatattcatatttaattaagaggaaacttatttgtgaagactatacatttttaattttatttttgcaggggactcacctttttcatttatggagagtgtagcacttgtggacttttcttcatattatgttgagatttttcttagatatatttgaagtgtaagaaaatggttaaagggtagtttattggtagttttgttttggtcttttagcttttgttatagtatatgttgtacaaactcattttgagtattgta

SEQ ID NO: 69852 - DNA, 2024 bp, Cannabis sativa
  modified_base (1111)..(1120): a, c, t, g, unknown or other
  modified_base (1686)..(1702): a, c, t, g, unknown or other
ttgtatatgctatattacatacactatatatatagtctaacaattactaattagctttgaatattacatgtttgttaatttatgatttattttagttttacatatttgttttaaaatacttagctaagtttaatttttgtttacaaataaatatttaagttctatatttgaaactctcataggtattagatgttaattaagtcattgttaaatgttatttttttttttgttagtatatttaaattaatttttaaataacaaataaatatttaataacatagaccaatcaaaatgttacatgtagtagttcaattactcataaattactcctatatatatacattaataaatatatattatatataatatgtatataaatatataaattcaaaatagaaaaacaatcacctgactacacatacatgtcatgatgacaatgatgaaaatgaaaacaaagtccaaaactaatatgagctcatataataagtattatatataaacaatatattggcatatacaatttctttaacatcatgattttaatgtatatgcactcatgtagaaatctgatgaagatggaccaagttcatgacagtatagtgttctgtcttctcttgatcatatcaactctaataataaatattccctatcatctcaattggatgtaattctgatgtagcatatgggaacttcatcactgtaatatatggccactgcattgattcctttatgggaaattgatcaattatggatcacacctaaatgcaaaattatatggtaaagtgttaaattttttattaatttatattttataccaagtattatatagaaattaggggtgccgaaacgtgtcatcgtgtcgtgtccgtatcatattttatgtgacccgtttttatatttcgtgttaagcgtgtcgacccttttttgactcgtgtctaattatctcaatcctaacccgacccgtaaaaaatcgtgtcatgttcgtatcgacccactgtgacccgttttgctattattgaaactggaattatagagaaaaataataaatttaagctccattagaaaacttatatacatacataaatatagtttgttatatatataataaaannnnnnnnnnaaattaaaatatttttaatttcatgttaaagaaaattaaatttaaatttttttaacttaacattgaatcactaaatatatatttttatataattatattattattattaattttttactttattatatttaaaaaaatcgtatcaaacgtgtcacattcgtgttaagcgggtcgtgtcgtgtttgacccgtttctatttcgtgtcaagttgtgtcgacccattttcgactcgagtctaattttctcgaccctaacccgtaaaattcgtgtcgtgttcgtgttcatgtgccgtatcgaaacccgttttgccacccctaatagaaatggtttgagagccactaacttaacgtttcctcggagattcaccgtgctcaaccctaattcgatcgctctcttcatttgtctcaacctaaccctagttgaaggagtagtaaaagatgaatgcaattatgtgttcattaaaacttgtaggttgttataggatcactacaaaaaaaatagctaccttcagtgataatttagtcacaaaatatttatgttaatgactaaaatatagtatttagatnnnnnnnnnnnnnnnnntaattttagtcacaacaagtatattgtgactaaaaacacatttagtcacaacaaattgtgatttttataactaatacatttagtcgcggaccttttagtcacaacataagaatgatgatttataattaggcacgactattttacttttagtcacaacttaaaagtaagattttttgtagtgggtgttttgtttttgtaagtattagacttcttgtaagtataattaacaagttaattttcagatttatgttaaatcacacttctaattaatttgtgtaatatgttggtttagtttctcaatctctcttcttttttttttttt

SEQ ID NO: 69853 - DNA, 975 bp, Cannabis sativa
aaataatttccaacaacttgttgcttccatagcaggaagttgtggtcatttaatcgaatcgagatattgtggttgaagatcacaggttcttgatgtgttcaagttttcaaagtggctccatttgcaccagcaagattcggttgattagtgacaccagagttcgcaccagtattgcccacagtcgccatattcacgcccaaatgagggagctgctctgataccatattgaagaatctagccattgaagaacaacaagaacagaacaaaacagagaaagaaagataagaggaaggagaagaaagagaaggaaagacttaaccaagattctcattcaatatcatcaagtgttacaacttttatagtgtagcaatacaagaagtctataacaaactctaccaactaactcacaacataaggacacgtgttaaacaaacacaactaactcaaaacagctaacaaccatgtaacgattttaactgtcttcaatacaagggacatgatttagtacatgtcaaaaaggcaaaaatactaattatcctatttaaattctttgagcctctaggagctctttctttgaaactgttaaaaccaaaaatttaacatatattattattactattttgattaaggataacaaaaaaagtattttttttgtctgtcatcttttgtatttaaaatatttttaataattttttactttatttttcaaaataaatcaacaaaaatcttattttttttttattttatcttaaatttttacatttcaccccatatcacattctttaaatacattacctattaccctcaaaaccgtccaaatgacgtggcatgctagaactgatctgacaggtaaaacgagaaaggtcggatagttaaaaattatgggacatgattttgtcccgtgattgtactttcacggaatgtatttcgtgatgtacgacaaccgttagatgagggagttatttgatctgaggg

SEQ ID NO: 69854 - DNA, 4867 bp, Cannabis sativa
aaaaatttgactaaaaattattttgggtgctaaaacagataatggtgcatcaatatatctattttaaggggtgtattgtaaaattttccatatatatttgtgtataatagaaaaactcaaaccgctaagaatttgctcttcttttttcaaattggtttagtatcatttccttttcctagaactgtattcgggtgcacaaatttagtgctcttatttttgtttgatcacttgtatgatttgttggttttttttatgcctttttcaattcaatgaaaatatttatattttcttaaaaaaaatgagagattatttttttaatttgtggaaaaagccataacgtaaaaaaaataaaattatatacataactttttttatataaaaaaaagttgactaaaagaaacacacattttattacacattaaataaaatgcacctcattccataccaataaaatgtcacaaaaaatgccttcattggtagtggtgagagcaaaagtgatgctctgaattttcttatattttttatctttatatataaaaaatagttatctaacgatatttattaatgtaacattattttttaattttctctattaattttaacaagatatactttatttaaaagaatattcttaattagtttgtattcattatttaacaaaatagtttaattaatttttaaataaatattatatctgtctatctatcataacaaaaattgttacgttttttcaattttaaagggatgattttgtaatatttaatgttttttttttctatagtgatgatttttttcaaacatttacttaataataataataataataaacaattaaattagtttttattgggagtgaataaaagtcggaaaagaacaagaatacattagaataacatatcaaagtttagttctaaaattacgtgtaatgattttttttcatcatatttgttgttggatcactaaacgaaacaagttccaagaaaaacaaagaaacgaagcctcaagatttcagatagtgaatttattagttaggagtgtgtataaatcaatccacttaattcaataagaatcgatcgatccaataattacaactgattgtcaaatattaaatatccaattataatcggatcgaattagttgttatttttaaatattcaattaaatcggatcggatggtagatgtggccgtgtccaaaaatctaatacatcccatcaaactaattagtatttttatttagttttgataagtaattagattttatattgttatacgtaaaatctatatgtatatatgaaaattaacattaaaatttcactttttttttattggatggatccagtctaatccaatacatattggacctaaaatattagatgaattcaaattgatctaaaaataataggtctaaaatattagataaacccaaattaaaccaataattaatatatatgaagtacatccaatggattgaactgatccaatctaacatccaatggatgttggtttgattggatgactaaaataattggatcagattggatggtaaaatctaacatccaatatataattggatcagattggatggtaaaatctaacatccaatatataattggattatatctggataggcctaaaaatattagatgtgatccaataaacaccccaatatcagctatgaataagttattaatggaggagaatgaatcacttgcaaaaacaagtgtctcggctggtttcctataaaatggctatatgcggcaacaattaagtaatatcctagaaacctaattatgaataattagaatttattatatattatgaattaattaggtagtaatatgcaagattatgatcctgctaacctaatttagcttaaattataaattttactataagtggataaataagcgtaatttattaattagagagatctatttagaatatgtgaatataacgtaagttatttttgaaataaaaatatttttaaattcggcgactctgaaaactcgattggaggccaaaaatattacaatggttttagttggtaatattgatgggattattcagataagttgattttaaaaatatcgagatattttggggtactcgaagttgaccaattaccataaggttaaaaaaggttaaaaaattcttattggttaagaaatagtaaattattattaataaaagaaattatattattgtattatattattattattaataaacgttatcagttaatatatatatattaagttttttttttttaaaaaaatataaactgtacaaaattttttcttttggtgcaacgaaatgctcctccgccttaatttattttgttcgatgttcaacccgaaatttagtaattcaaacttcgatagtagcgaaatagtaaatcattgaagatggaaagcttaaggtaagaattgattttgtttgaaggttaatacgattggttttatatagtggctttgtgatttagagtagttatggaagtttgactttataaaattattattgggtagctatgaaactagtttcgatatttacttgttaaatttgaggtgattttaagttagaaattgagtttggaactttttaaagcttaagtttgaatgttattggcgttttctatttaagggcttgattttaatttttgttacgtaaggattgttgtatgtatagtatatatgtaccctataaagtttggaatgatttggataggtttcggtggtgtttcagtgagtgtgaaaattgagattttcgacccatgctgctgcaaactggtccacctcttggtgcaaccggttaatcggttcgtggtgaaacggttaaccgtttcccaaccagtttgctgtttcagggaatttcaaagaaattgagaatcgtatttttgtcataactttccactctggtgtccgttttggatattctatataccgtttcgaagcttccgacaagctctacaatatggtgtatgttttagagtcaaaatataagttttattttagtgtatttgtaccacgggatttggtaagaaaccttaggttatcctttgcaaatgttaagcagtattttgagataaacacttattggtttactgttgttgtgacatagggccgagatcatccagaaggtttctccacttgggttgactaacatgcatgaatttggatcaaagataaaaaaaaaaaaatagtataatgtaccacatgacataacaggtttcgtaattatcaactgtttgattaggcaatgataatgcgaatgtgatatacaatctcacctgattaggtgatgtgatgtatggattccagattatgatatgggcttacttgattaggcaatgtgatatacaagtgcacctaattaggtgatgtgatgctaggctatggcataagcttacctaattagatgatgtgatatatgaatatttgtgtgttgtgtgtcctccaattcataaacactattagttcaaaaaaaaaaattaataaataccattaccaactccatttttattggatttttgtatttatatacatatatttggtgtatattaaatttttgaacacaaacttattaaatttaaaaaaataaatacactttatattcatacccataatacccttctcccttctattctcttctcttctaacttcaccatccatactcctcattcacatctatactgatggtgattcgatgggggtccgatggtggcccgatactacctattttttattttatatatttttttacataaaaaaagtatcatcagactaccatcggaccatattctacatttatagatgttaagttccattcactaagctcgtcaggaaggcatcgggccactattggaccgtcataagactaccattggaccatagcatcgggacatcatcggatcactattggacattcgactacaacatttactcattttaacaatagaaaggaatggggcaccatcggaccaccatcgaactaccatcagatcatatcattaggccactatcaaaccttcgtcttcaacctttactcattttaacaacaggaaggtatcggaccaccatcggaccactattggacgttcgactacaacctttactcattttaacaatagaaaggaatggggcaccatcagaccactatcggaccactatcgaactaccatcagaccatatcatcaggccaccattagacctttgtcttcaacgtttactaattttaacaacaggaaggtatcggaccaccattgggcctggcaaaaaaaccaactttttgcccaaaactcatatctggttgttttcgaccttaaatttaacatctactcacagataacaaacattaatcatacaatttattcctttaataacattgtcgatggtgaagccgtggttgatagagaagtcgttgggtctgcggtggtcattgagtctgtgagtcgttgggtctgcggtcgtggtcgtagagagaaaagaccgaggttggtaggttgtgggtcgagtgagcgagagagataagggagaaagagaaagaattaggtatttgaaatgggaggggcagaattgagttttatgaaatattaacctattctactaggttaacttaagtttaagaaaataattttaacccttttttatttctaatcatctctacatttggatctagccacattaatagatttttttttacataataataataataataataataataatattaatttactattattatcattattatttggggttttttcattagtgtacaacaaaaataattatattacaaaaaatgtgcaaaaaaacacaattttaaaaatgtacacatttgaaaatatatttacaaaaattcata

SEQ ID NO: 69855 - DNA, 3617 bp, Cannabis sativa
accatgtagagatttttattaaacaactgatcctttgatattagttgtttccctattgggttttataagctcactcctatatttttcctttcaagaactcagtttggtacttgtagctgtgaaagaatcgttgatggagaacaatgtgattagcttagtcctatctttaatattaattaactattcttttaaagactaatatgtaccaaattattaatggatggtctgatcactctaattgctatgaaataattaggaatgagaaatgatggatgcttagtattattttggtattttacaacttattaaatctaactatttggtgactacataactgtggggatattattgttttacatatatattgacgagtgtcctatattattacaattattttctacttattataggattatttcgttattttaaatatgtacttttatataattgtgtaatataaatatcatttgtaagtattatttttcaacaaaggtcaaagtgtgacatttgaccacctaagtttttttttttttatgcaaaagaagacttcattaaaacaaactaaaaaccagtagcaacaaagggtgctactcccctttcagtacatgcacgggatatgtcgttcacagcagcctaggctgcaagcttatgagccacaacattggcatcccgaggcagccaagagacacttaaaccaaaagaagttttaagacaagaatacaaatgcagaaaaagattagagaggttccacacaggtatggaacattttgtaacagcgttaacaagttgtaagcatctgtgaagaagttagcatccttgcaattcaacttcaggctcaaggagaaggcatgacagagagccatacactcggcatggagcgcagaagtagcatgcatcttggcagtgagagcgtccacgaaaactccgtccttgttgaaaataacaacagccacaaaggcccagcttccacgcaccgcagcatcagagtacaaattaaactccttcaacacctgctgaggttgacaaggaggatcacaaacctccaaattctccaccgatcgagagtctcaacttgcaagcgagaaaattgtttaccaacttcgagcaattggagaggacatcctgcgaacgcaacgaagagccgctgtggtaaacttggttcctagggctcgggtcgtgacacttctgctccgcttgttctattatcttgtattttggacaattgctttgtttactgaagttgattgttaaaaaaaaaaaattgtaattttcttttcatttcttttcatttctattttatgtgtatattttgtaacattatttaatttttgttttgtcatcatttcatagaattttattttattggtttgttatttcttgggcactaatttttccagtagtttgatcgtggaaataataacaaaagttgcttaaaacaaactaataagagcctacaaaataggagaatttatacgcaaacaaagaagcagagtgactggaaatagaatataaaaattaaatatatgtactatactgaactggccgtaaagagagattctgaattgctaaatttttttaagaaaatcataaggtaataagcaataacatattattaataaactatatatcagcatcttatttaaatgttcttattatgatcacaacagaagagtatactcccacaccaaatcgtttacatgatcagcaacaaaagtaacccaattttttttccaaacgtaaatatattatatataacatccgtgggctatattatcaccaaaacccccgggtaattaagaaaacaacagtcttattcttaaacttcatcattaatatataattaattaattataaaaccaacttataattagctttataattaggttctcaccaccttaccgttaaacctcctggcagcctcgtaacagtccatcactgcaccatgagaagaagcaacagtagatcccctcgtgtaaatcgaccccaccggcgccgccgtgtgcttattaatagtcgtcccgtacggactaccagctgcttccgccgtatagtgatgaccactagtcttgggtaatgggttgtggccgtggccgtagggcttcacagcatgagaattatcgctactaatggagctagatttcaagtaatctatagcctcttcgatactattcgtgggcatgctaagtggtccgctgctcgcgtgaccataatgagtagtaggattataattagtactaccgacaatcggggtcccatagcctcctcctccgatggtggctttgcggccgtgaccactgttgtgatcataaatattatgcttaattggtacgtgttgaatcgtgtgcccaggcttgtaataatcttcttctctctcgtaatcgtcgtcctcatcatcatcatcactgctgtaattgccatagccggaggttttgtggtggccgtaatcatgatctttcttgttatatcggccaccaccaactgagtgaggagcaatagttgggcttgggcggatattagctatgccatttgagggagtactgtacctgtgaggcgaaggtctgctggcttcgatctggactccagtgaggaatcggtcaatctcttgaggataatgacgaccgtgacccttgtcgtggccgtacggactcgagggcttacggtaactgtcgtggtctcctccgtaggaaccgtaattagttcttatcggttcaagcttattcggcgatccatagcggtagtcggaggtggcgatcatgggcgaggcagagaggatgtgctcggtgatctcagtctctacgacgtaggcatcagcgtcgtacggggaacagccgacgacagttcttttcctgccgtcgttgtcgtatatgaccgtacgacagagttgattactgtcgttttcgtagtcatgatgaccaccgccgtagttggagtgacctttgtatgggtaagcttgatcacctcccaatcccattttcttcttttttttcttaaataaaattatatatttgtttttttcctttgcagattttgaacgtgttgagactggtatttatatggaaagatttggttgtagttttggtatataacttgcaattgggaagaatcaggtactatatttatagattctttaagctagctattatctttgtcatggttttctttttatatgctgtaaggaaaatgacctccattattatcatgtccattagatatgagagatgtgagctgggttttcttttctttacttccagcttgaatgggaaaacgccactgattatatatatgagaaatcacatgatattctggttggtaagggaataataaaatgagaagtaggaatacagtagaaaaagtaattaaatgaaaataaaaaatacataatatggtttacatcacttattttctttattcagtgtcgttcacactataaaaaaacatacataatttatctttggttccatttggtaaattactaagggtgcgctctcaagccatttttttttgaatagatattttgtttttttctttaatcagaaaagaaaatatatttaaaatcatgtttagtaaaactacaatttcttaaattttaaaataagaatcaaaatttcgaaaaaaaa

SEQ ID NO: 69856 - DNA, 1598 bp, Cannabis sativa
  modified_base (27)..(71): a, c, t, g, unknown or other
aatataacagtataaataattatttannnnnnnnnnnnnnnnnnnnnnnnnnnnnnnnnnnnnnnnnnnnntttccaaattaaactaagcggtttttacacaacacctagtgtaatatcctgaactttgatcaccttccttcttagtcctctaatatgttgtgcacttttgtcgaggctagtgttgtcactttccataggtttcttccctttatccatcatcgtcggccacttcacggtgggatttctaggcggaaggaaatttgctccgacttcatttttaaaccactccaattgatttcttgtgttgaagcaactgattactgccgtctccacttttgtccacgggccaaacgccataacagcttttccttccaagggatatgcaaacaccgtcggtctccatcagtcgttcttatcatgtcctattctttcacagttgtagtaaaattttggcagtttgaagtagcggaattggatccactccttccttcccctcataatgtccaaataaaagccaggaatcaattgttgattcgtatatatttctacttggaatttaaagaatcagcgtctagagatggtgcgttgatcccatgtatcactattcatgaatgttcctactttagcagcaatgattgagatattagacctattcaggtagggagttgggagccccgtagcctgagcccaaaataccgtcttcttcatatcgactactgtccaatttgcatcctctagccattccctgataatcagcagcttcccattgatgatccaaggcctcctgtgaagaatctcaatgcaatcctcttctaaatcaaagaaaattcccaacatccctggtttcagtgttttgaacctccactgaccttttatcccttgtttccatatgttacctaaaatttccttcagcttcattctcaaaaggccattaccatcgaagaaacataccagtaccccaaatcttatcagctcgccatttatctcgaaatccggctccaggtctagagccattgtctgaacaaaagtgttctgaagcttctctagctccccatcgcaatcttcacctccagtctcttcctgtgtagtcttttgtaccttatcgctgttgctctcttcctaccttccattattatgagtattagaagaagaagttaatgtctccttatctgggccatttggagtagataagtcgacacctaccccttccataaattctccatctaccccacctgccacattctcaacattcatttcctctatgttctgattgctatcccccattacacccagcaacttacttcgaaagacccaacagcaaacctccgacaaacaagaatgtcaaagaaagaagacacaaccgtctagttggaccccaacactccatcaagggagaaaaaaggcttattccaatttccaaaacatcaatagcaaaatgtaattgcagagtgttcgactggatatttattgcagttgagttaactacttgtgtcgaaattttggtggcaaaataggtaagtagtgaattttgttgtacttaattacttatgtaaaaaaaattatacatttttatgtataaaatatgactatctaaca

SEQ ID NO: 69857 - DNA, 3130 bp, Cannabis sativa
  modified_base (2766)..(2767): a, c, t, g, unknown or other
tttttccatctttttcctctgatatttttctaatcttcttttattttaaatctacaaaaattaaagataacatgcgtaaaaatgctccaaacacgattaaaacataatcaaaatatatactaaacttaatttaaattaatactaaaaataacctaacatcaggaaaatcatctaacatcaccacttgttcgaaccaaagctcacgactaccaaaccatcgttgatatacagatgctttagaggcatcaacaaagccttgaacagaggatgggtcgactgtggatgtaggggctttcggaagttttgattttttagagcctttggatgactgtttgggagatgaggctgtagctgggactggaataggtttggtcttggattatttttcaggtggttgatacgtggtatcacgtgaagatattctttttggctgaaccctttcactgttttgggaaggaatagaaaccttagatggagcacgaggtggtcctatgggttttgatttaggcacagatgagggctggacaggagacgaaggagagtggaaactcgaagaggaacaagtgactctttttgacactgtcagagggggtgatgacagagacgaactagcctttttagacaggtgaggagccttaccttgaaaagtgcaaggtttctgaatgactggaggcgatgacggagacgtagtcgactcaagacatggaagacaagcagaagtactaacgtctgattggtaaggaacaatggaacgatatggattagtcatactagtctcgactacaggtgcaactacaggatcaacagaagttgacaatggtggaatgagaatggcaataggggtcaacaccatgggagcagtattctccattgtagatagagaaatgtgaaagctataggtcttatggtttctgagagtaaagtgagagagaaactattcactttccttaggccttcagtagaggcaccctgacaacggctgaccaagcaaagaaaaacatttattttttttttttaaatttgaactttgaaaaaatgagatgtacacgccaaaattgaatagtttccaccaaactagacggcataaaaagcgaaacaaacacaaaatcatcaggtattgtgagcatagtgaactaacaacttcaaatatgccaacagtatatacgaatagcccacacttgacaattggataagagatagaaacttagagatactcaaaaagtttagaaaaaaatcagttaacaactgatcaataacatgaataaagcctctgagcataaaaaaatatacaacatgagcaacagatagttcagcacaccaatccccagtgacactcattggaacactaagtcttgaatctccataagtgtgtgaagagtgacctcatgtcgtccagtaagagatgagatcttctggaccactccctcaatgaaacaaaaaaatttttgtgtatatacattggtttttttcatgccttcttttttttttaagaaacactctggctttttctctaatacccagacatggctttcactctcttccaaagatgtagccgtcctctttggaccacaagaactaatacagaaggagcatactacttattagtaaataggtttaagagagctcttcccattacatatggaagaggtagcctttttatctggagaagattccaaattagtatcattcgaagtagcttagaggagatggtgatagaaattacaacacaatgctcaagtcatgtcgttaagtacaagaatactcagagacaaacatatttgaccagatgacactaagaacagtttagatggtacagagacaaatacatgtccttaagtgagtaaaattgtgagtatctaaagctttagtgaataaatctgctagttgattagttgtgggcagatgagatattgacatcatatttgaatcaactagataacgaataaagtgctacctgatgtcaatgtgtttagttcgggagtgctgtacggggtttttagagatatttatggcacttgtaccgtcacaaaaagtggtcagtgtttgctatgggtgtccatgaccagtaagcattttgttcagccaaattaattgagtgcagcagctaccagctgcaatatattctgcttcagcagtagaaagtgagatagactgttgttttttgctataccaagagactagattattcccaaattaaaaacatccccctgaagtgcttttcctatcatctagacatcctgcccaatcagaatcactatatcccaccaaggtggtatttgtgtcacagctataccagacaccatagttaacagtcccagccagatacttgaatattcttttgacagcagagagatgggactgtttagggttggcttgagacctagcacataagccgacactgaaggagatatcaggtcgactatctttgagatacagtaatccatctatcatgcttctgcatagagtggggtctacagggtcgccagactcatctcgtgacaatttggttgtagtgcctataggtgtatgtgcatgttttacctgtgaaaacccaaacttctctaacacagacttgacatactttgagtgtgatatgaatgtgccacgatctagttgtttgatttgtagtcctagaaagaaactaaggtcccctatcaaactcatttcagactcactagtcattaatgtgacaaatgtgtgtacttcactttcacaagttgaaccaaaaatgatgtcatcaacatatatttgggcaacaaaaattcnnttttcaatatgtttaatgaatagagtgttatcggtagagctcttatgaagccatgggatataaggaatgaggtgagtcgatcataccaggcacgtggagcctgtttcaatctatataaggctttgttaagcttgtacacatggttgggatagtgcggatcttcaaatccctgcggttgtttgacatagacttcctctcgaatgaccccattgagaaatgaactcttgacattcatttggaagagtttaatcttcataaaacatgcaatgatgagtaacagtcttatagactctgatcgggccactggtgcaaagatctcatcaaagtcgattccctccacctgactgtatccttgggcaacaa

SEQ ID NO: 69858 - DNA, 2327 bp, Cannabis sativa
tatttttcttttgtgtaacacattctcaaaacgtatttataaatatatatatatcacaatatacatgataatgataaggaagagggttataattaattgtatgtaggattgatgtatagacacaatttctatcagcagagaaatcagagtcctgtgaaaagagcttttcagcctttaacctttaatggggagagagaagagagaagaagcctatagatatagagactagagagagattgaggaagagacattcggactgtcccactaactttatcagctttttcaaaattttgaacctcagaacattacttttatttttcaatggtatataattacggattagatgctatgactgtgactaattaataatgagatataagagagatttttatactatgatgatgactactacttctacttgggaaaagatttttgtcagtataaaactttgccgaatttattacactatatatcaagtaaattaccacacactcagaagaacaaagaaccatcaggcaaaatcctatgtttcaaaggatatatatgcttgatttttttattttttattttttggaaattaatggtatatatatatgtgcgtggtttctcctgtatatatgtataaaaaaagaatatagtacatggttgaatttttattttaatattttgaaatggtacacggttcattgcttgaactttccaagggccaaataaggtatcttgtttaattttctaagcctctcattattacacaacgaatatatccatatcggagaattacatggcaaggtactctcttcttttatgtttattttcgtttagagatctttttggataacagttcaccaggatttatgagataaaccctagaaatattaggaggcaccccatagtgtttaataacaataccagttcattatataagaaatttttttaaaataaatttcaaatgataaatttagagatggattgagaaatacttttatgttttgttatttattaatcaaaagtggttttatattatattttattaaattatatctacttttataagtgggttgtttaatatatatacttttatttttcattttagtttagaacataatttacataaatctaatgagtataatagagacaccatttataaaattgagtatatcttaaagaatataaaaataaaagtacaaataaaataaagtgaatatacaatatatttttctcctaaatttatatatactcttttatgtttcagatttatctaaaatattagataaatacgaactaattgaacaaatatacatcaaacagatctaaaagatagaactgatttattattccatctattatattagatgtggtctgaacatatataaaaatatggattactccattcattaaaaaataattttacgataaaatctcatgaaggaatattgaataatattgttatctataaataaattaaatataaaaatattaaatcatatatacaaaaatacactataattagttttgagataagtccaattatcattctgattgtcacttgaatattaaggcaaaggcttcattttagctcttgaaattttgcttgatcatagaaaattctgaaaatctttaattcattgaaatcttcagaattatttgtccttttcaaaatttagtaacaaaatgtagattaatgtgaacaagaaaaaaaaaatataaaataattgtgattaaaataaaaataaaccccatttcaaaaaataataataacaatattatttataaaagataaaaccctactaccggtatttttgaaagagagatagatagaggcacaaaaagtgggggcagaattaactggggttggaaatgggggagagaatgaagacaacaacacacacaaaagtgccaataaataataatattaaaataaaaatgagtggacagattgcccaaaattatttttaatcataattttcattatatatatacagtctgtagaaagaaattaaaaaaaaaaataattaagagaagtggttccgtgcccctaaggaagaacctttcgcctattctttctttctttctttctctatacctttctttctctctctcacacacacactccatcaccaccagttgacgcctggactcttccctcgatttgatcgttcctctctctctctctctcttaactctatttcttattctttgccagtaatggcagtacctcagctgttgcagtgcaagaaaagagggagagagttttcatcgggaaggtaaaattagctttgcacactcacacacacaccacaacaaacaatctctctctctctctctct

SEQ ID NO: 69859 - DNA, 1825 bp, Cannabis sativa
taaattttaataaaactaaaaattatttgtatttttcaaaagaaaacaaataactttggaatctcttgactagttgggccctaagaacaactccacctagctatgatctattgatcttactattagttgtcaacaaacgatctacataggttttaaccatagcatccggcggctatatatataattagaaacccaacagtacgtgttataattattactatatatataaatatattagttggtaattttgttccactagttaatattagtagtaatagaagagtagaagaagaatggtttagttgggttattagagatggggcttttaggtatatggttggatttttattgggttttccttctaattattcaacttgctcaggaaaaggacagtcaaggccagaaggggacttgtgtacgagacaaaatttgttccaacttttatcatcaatacagaaactagctagaaaggtctcttttcaaatatatataaatatagctagctagtcccccttttactcaactagattaatggggctaattccttttcttttttggcgagtcatagctagacgctctcccataaaaggggttctaaaattcatctaatcttctaccaaatgtaactatagctaacatctttttcttttgttttttccccttgaattaacacatcaatttgcatttttggggacatatatatatatagataagtatatatatttgcactatatttgttagaagaagatcgatgatcaactaagccattctctccacacatccacacaaagcaaaccaaagtatatgggaccttaaccaaaattaaattttggggtccctatttaaatttaattggtaaaggtttttaaaactcttaaaagtcaaatccatttgtaactacactttaaatattttctttaaaaaaaatacaaaaataaaaggtaagaattaattgatctaaagtaagactctttacaattacactaaataatctttattatattttatttatatattaatattttttttttcataattttgagatcctaagtgtgttatttatatatatatatattgaaaaaaatgataatatagtaatataatatgtaccaattaatgtgtactcatttgaggtgacacatttgaggaaactatcgttataagattatttaattgatggaatacctaactatatatttgaagagaactatatatatataggtaggataagaaatgaaagtgatcaggaaattttagaaagcgaccatatagtatcgtactcaacaaatacatttttgattaattattctaagactctcttgatcgatccaaatatatatatatgaaacaagtacattgattattattagatcctttactttaaaccatagtttagcaacaacgtagtacgtaggtacaataactataataataatgataagagtaataattaaagccctagagagatgattagattaattcgaaaacacattccaatgatatgatgatcattagccatttaatcataaaaaaggagttacatacaggaaatttaattcgagaggtacctaattattttggagttctcagtcttcctcaaatatatttattgtatgtctagttgatgtctcaatacaaattttgacatattgtcactaagactattatagaaactaaaactctagtgggaaatatcaacttgggcactggttgaaactctaggtgtccaaattggctttcggattgcaagttcgtgtaatttcacactacaaaagatcttacttttagtcacaacaaaatttgtgattaaaagtgaaaaaattat

SEQ ID NO: 69860 - DNA, 747 bp, Cannabis sativa
taatatatggttaattaatataattattcaaatttactaaaattatttatcaattatgtctaaacaaaaattacatgcaaataaatacctctaaatgaaataaaaatatttataaatagttttattattatctggtagaaaaaaatatttatattaaatgtccacataatttgacctaaagtttgtttttattattttgtaaaaagaaaaaaaaaaaagacttgtttttgacttttgttattgttttcattacatataaatgtcaatttcaaatatgtgaatgttaccaaaaataagattcatttatttcataatatcgaatatatcattttcaaagaaattataatagttgcatattattttgagtaaattaaaattattacttggccggtggttttggacgatgactttagctctatacccattaccaacatccaaaagctttttactttttatgtttcttctcttaattcttcccacctatccatcttatttcttttagttagagatgttcttagattttttttttcttaaaaaaaaaattattataaacgagggttcgtctatttaattttattttcgctaaatgagcaatataacttcatgtattagactatgtttgatttgtctatttgtaagatcagtcttataggtgtgcaagttaagctactgtacagagctaaaaaaaaaaaaaaaattcaataacaacctatcattagtcactctcataaaaaaaaaaaaaaaaaa

SEQ ID NO: 69861 - DNA, 1653 bp, Cannabis sativa
atgtaatttgatgtatgagagaaagggctcaattggatgagctgtagaagaggcatgacagatgtaatctgtcaatttttttggttttgtgacagttcggccaactcttgtaatggagggatgaactgagttttttggtgagaattgtaccggcaaaggggcattaaaaccagatgcattttcagagatttttggtgacacagttgctggttgtttggcgtgtttagtaccagaaatcggggagctttgagatgatatagttggtatgcagctcgtgatgtctggatcagcaagtggtgcatttggttcgagattggttgatgcaatatgacgatttgcaccagattgtggtgctggtgcagtacgtggatatgcatcagattgtgtggtggcaccagtttgagatgcgggtgtgactgctgggatagattgcaatgtgtggaggttatgtgcaccagtttttgcagcagtattagtttgtttggttgcatcagcgtgttgatttgcaccagctggtttgtgtgcattgggtgattgattgagaccaaaaaatggtgctggtttgtgcagaagctgagaggtgtgagtattttgttgtactggtttgtttgtaggaagtacaacatcaggaaaaagtgtgtcaatatcacaagaagaggttgtagaagaaagagggaaaattgtttcatagaaaacaacgtcccgtgatatgtacacttgttttgtttcaatgtcaagaagtatgtaggctttcatgccttggggatatccaatgaacacggaagctcgacttcttggtgtaaatttatgccgtttagaggtaagggtagagccataggcaagacacccgaaaactcttaagtggtcataacttggggaagtaccatgtaacatttggtatgaagtcatacctttgagtaattttgagggagttctatttaagagataagtggctgtttgaacaagataaggccaataaacgagaggtaaattagattgaaaaccaagtgcacgagcaacatttaatatatgttggtgcttcctttcaacaaccgaattttgttgtggtctttccacacacgaatggtagtttattatgcctttagaggcatagaaagattgtaaatttagttccttggcattatccgatcggatggcctttatatttgttgaaaattgagtacaaaccatgtgaaagaaggtgggaatgatatgttgaacatcggatttattcttgagcaagtaaagccaagtaaatcgagatttgtcatcgacgatagtaagaaaatatttgtaaccttccacactaattatatggaaaggaccccaaatatccatgtgaattaaatcaaatatattcttggaaaaattgttgttggatatgaatggtaaacgcttttgtttagccaaatggcaaatatgacaatgtaaatgtgaatctttatgtgaaatcttatggtctttattgaagaaatttgaaatacacatagaggggtgtccaaggcgattgtgccattggtttacactagttttattgaaaacaaaagggggaacagtcgctgctgcagtggggagattgtcttgttgaagcaagtacaatttgccatatctttcagctgtcccaatcaccacattcagagtaggatcctgaat

SEQ ID NO: 69862 - DNA, 3303 bp, Cannabis sativa
aaatattatcatatcgagatactttttgtttttgttgaaaagatatttacctagttttttctttttttttttttttgcaggttacctaattatgtttgattttatagaattttccctttattgaaagatctctttcatttgctatatctctatttttcattaaatataataagcagcagtcttgctataaaatttaacacaagaaaagaaaagggtaaaatgatttaatttatttacaagaagagagattatcttgttaattttatttttgtgatactaccattaccatgttggccaactcctaaaaaacaacagaaccaattaaacttcatattttagtttcaaatagttaaagtcaaacaacaaaacaaaaagtctcacaaaatccttataacaatgtcaccaaagcataaatcaagtaaggaaattaggtcaacctctcattacttgaacccatcaaaaaaaaaaaaatcccatctgaaccaataaggtaaacaaatccatctccaaatctaaaagattataaattgtccttaaaatttgacttaataggaattggtaagtgaaactcataaatgccacataataaattctcaacaactgcatgccctcttcgtgtctcacaaaacagtctctttccacgttttatctcttcccctaaatttcaacaactccaaatacataatattattattattagagagaataataaaagagaaggaagtgagagaaagtgatcatatcatatcttatcaccatgggaaggaagagaagctcacctgtgaatgttctgtttggttggttgagaaaacagaatatgaaaatcaaaatctttgttggtgtcactattgggttatttgcactaattgctttgaaattcactgtcaaaaatcacaaccatttctttgttgcatctgaggctgttcatgttgctggaattcttgtactcatttacaaactcaccactcaaaagacttgctctggtaataatatctacctttctttctttagattgttaaataattaaatttcaacccaggacaggcatacaaatttgtgggttttctccctggtgaaagaaatatgttgtatttttgaaaaacactaacaatttcttttaaaaagtaattttttaaagcacaagttagtatgaaaaatataaaaaaagaaaatgcataaggtacttgattaccacctcaaaactaattttggggtcagacctagctcgccttattagtcaacgctcctcaaccaataatctctctttgttttaataaattttttttttactgtggctcatattttactccataaaactagagagatgacatgttgacataattgttcatgtttattgggtgttattatggtaagaatctaaagtaattgtgtattattacaattcaggtctttcattgaaatctcaagaactcacagctatgtttctagcagtaagattgttctgtagtactctaatggaaggtgatattcacacaattctggattttacaacacttgtttccacaatttgggttatttatatgataagatttaagttgaagtcaacatacatcaaggagctagacaacttccccttatattatgtggtacttattcacattgtgataatttgaagagaaaaagaattaaaatatttcaatgtatgtgaattgataatctttatagttaaattatattgcatagtaatcacattttctttgtataatcctatgagaaaaggttgtgccttctgcaatactcgcggtggcgattcatccttcgacacgacattttcgcgttgcgcgaattctttgggctcttggtggctacatggaagctgtttcagttctacctcagcttcacttgatgagaaatgctaaggtttaaatctctgttcaattttcaaccatgataataatgaactttcttggatcgaaaaaatctctttattttttgcataacgtatggggtgtttggtgtaagaacttggtggattttatttgggaggaattgagatttaatcataaaccctccactaaaattatactatatacagatttagttttacattctcatttccaagaactaaaacccctgtatcaaacaccccaatatagttattggcaggctcggccctctgcataggcctgtgcttagggcccacctaaccagcgaacaaaaaatatacatattttggttatccttacaaaaaataaataagtaaataatatatactctttgggttcgtttgattgtggtaatgaaaatggaaatgaatcaattttcattttcatagtattggaatgtaaatgatttttcactaattttggtgattcatgttaaattttattcttattctcgttcttattcctgtgtttccacgtattcattatgttttacaccaaattaagttttgcctttgtttttggggcaacttgttgcagatggttgagccttttacagctcattatgtatttgcacttggtgtctcgagatttttctcatgtgctcactggattcttcaggttggttggtttatttccacatacatagaatataatgataataataataagatataacaatttttttcaatttgattggtacagatttatgagactggaggagggtacttatacttggttggaagtggttacttttggttcttggcagcttttcttgcagaaatggttcaaacatttatcttgactgacttttgttactattatatgaagaggtaataacttaataagtctcttttaaattacctactttttattatgttatctcatcaaatttgttcaaaaatgttaatatagtttttgcaccttatgttttgagttttgcagtttcatgcaaggacagcttataatgaaaatgccagtttagacatcaaaatctcaaaaaacaatgtttgggaaacaatgtttgtacattttcttttcctttcttatatcgaattgaaagtatggagttgttatggcattgcaaccaaattgttttgtcctgattttgtcttctttcttgtttttaaatttttgtttcattttgttatttatgtcatttttttgtgctatattcattgtcttgttgaacttagaatgacccaaattgaaggtagggactagaatttagcagtaataagttggtttttgagggagttcattaatgtttactggcatttttatgccatgtttggtacagagtaaaaacaatggagggagagataataggaatgaagggttttttttttggtaaaacaggagaatcaataggaagaatatgtaggaaaatttagtaaat

SEQ ID NO: 69863 - DNA, 1628 bp, Cannabis sativa
tgttaagttatatttgtaattattgtatattttacgtatatttttgaattttttttttattttttatttgtttcattgttgttttaattgttctgttttgttgttgtactgttgttttataaaaagacattatttttgtaaaaaattctatatgacagtaaaattataaacttttattcaaaatttaatatttttgtaaaaaccccataaatattcgtaggagagtatttgttgcttttggtatttattgagacatttttcttaaaaaaaaaactaaaggatactcatattatttaatattcttaatattactattagcataaattaatattgggtctcacttattctattacttgatatgattttacttgaaattgcataaagtatacgtaatacttgactttggtagttccgttttttcagattgactttggtagtttaggtagtcactagaagttgcataaattctaatgaatacctaaccaaccaaaatccaataactattattgaattataagcacaatagatcgattctttcaagggcaaaacacacacacacacacaaaatagatcgattgatgtgaagcacaatttttcactagtcaatgactcaatattatatactgcatactaactgtagatattatattaacatttttaaaatggatattaaataaagattaatgtgcctatttttatattatttttgcctccctttatttttcccatctttctcggccagcacaatgaaaatgaagtatggcatatggaaatgaatgtaattaatgatatttatggcatgatcataaatttatcttcattaataaatgaaattataatatttgtttatattttcaaagtatacattttaagctctctcaaaaaattaaaaaaaaaaaaagaaaaaagaatacattttgaggtcctatgattactcaatccaaacatattgtagtattatccacattcatcaacactgagaaagtagttgtattggagagaattacattttgttgacccaccaatttaaaggaaaaataatgctaaagttaatgcaattataaggctcaacaaaattgcattggtggccaaaattatatatagtatacacaacaaccactttgcttattgttatttaatgcatatgtggtatgtacacatacaacataatgttttataaatttgcttatggttataactctttgattgctttaagaaatggtagagtagtgggtcagaccatcaaagtttgggtcacatttgttgagtagattgctcagttggaccgaccaatgagatgcacacaatgaactttcacatttattaaccaaactaaatgtatctataactatatttaactagacctaactaaatccaaatctaacaaataaacacaattgaggtatattaattcatatataatgtgtcatgctttacatgggaggtacaatttaattacccagaaatgttaaaaggtatcagtggtaccaaacagctttttatgtgtcaatattattattagtccaattaagtattgagtctcatataatttaatataataatttttaggaaatattgttaactaatcgcaaggcgacatcatatctagaggtgtgctaggcatcatt

SEQ ID NO: 69864 - DNA, 2148 bp, Cannabis sativa
ttaaaaatattttttttcaacgacagtttttttttcattgttataatggaaaaatcagagaaaaatataaattttttgccatttttttcttgcattaatttttaattttttttacaaatttatatattaacaataattaaactaatacaagtgtcgataacttagttgaaaaatatacaagtaattagttaatgttaagtgtaaacatttatatattaaaatatacactaatcaacataatagctcttgtcgctccacctccgctttcacgtattcaatccacttatcatatataaaatttatctcatcgtttgagtacaaggtgttaagcatatgttgtaaaataaaattatataatctgtaaaaatacctattataaagccaaaagaaagaatactatttacattacttattaattatttaccatttctgtcaatcggtatattggatattgttcgttcatgaatcttttaataaatttcatgacgttgtatctacattgtttcccatctggttgttgtcgacagatcaaagttatacactcgatgagaccaacattgtgccagtttgtaaatatttatacatgttgagcgacctacacaaaaagtaaagttagcttataaaatatcaaacacacaattatatactgtgatgtgggttataaaacttacgtggtaatgatgaattgcaaatctttcgatactttaccactgttggaatctaagtacgccaccgtctgcatacttggttggatgagtacaagcatccaatgaaactttttctacacaaacaaacatgtttgaaattgtgaatacataataatttatattatgtagagttataaattatgaattattaattttaaatttacttaccaataattgtaggggtaataacccaattactcggatcgatttgggccatacgttcgaccaatactttacaacgggcacttgcattcccagcatcagtggcaatggcactaggatttaaaaatacatgttttctatttaatccattaaagtccaacaactgtttctcaagtgctcgattcaagcatgtactcccagttattatttctgaaacacatagtgtttttctctccaatttgcttatccaagaccacatcttagtggcttttaaacttgtacatgctatgaagcacaaagaaaagggtcggaatgacattgctgccttaaagttagatatgagcaaagtttgatcgtctggaatggagttttatagaagtagttatgaggaaaataggttttgctgaaacttggatatctatgatcgtggcttgtttaataataaatagtttctctttcctcctaaatggagaggtcactcgttctttgattctcactagaggtcatcatcaagactgctctctctctctctctccttatttgttcctaatttgctttgaaagcttctcacaactactccaacattaagaacaagttggaaactttagtggtttctcactcaccagatggccagcctctatttctcacttgttttttatggatgacagtctgctattttaaaatcaaaattcatttcttgtcgttatacgagttcttgatacctatcattaggcttcaggtcaagtcctcaagctgacaaatccgttatttctttctctcccaacataagtttagcatcacaaatctactttcataggtagcttgacatgccaatttatgagtgtcatgagacatatcttgtgataccttcttactctgaaagagataaaaagattctcttagtagaatcagagaaaaaaatttatgccttatgcacaaatagaacgagaagctcttcttagcaggggtaaggaagtgctcttaaaagcagtggtacaatttattcccacctatgccacgaccttttttcggttaccggtaactttttgtacgaacctaaaatatattatgtcaaaattttggtgggcatccaatgagaatggcacgaagatacattggcacaatatgaatctaatatgtaaattcaaagcttcaggtggtatgggatttcactcttttgtacactttaatcaagctcttttgggaaagtaagcttgatggatttcagaatccaaattatcttctcaacaagctattaaagagtcgatataactcacac

SEQ ID NO: 69865 - DNA, 2845 bp, Cannabis sativa
ttcggggctttatggctcgaagaattgcggcgattctcagactgtttggatgagccatggcgatgaggccgccaagctgcctgaagggtttgaggtggtggcccggagcaagcagggggtcgtggccgctattcagaatcagttgagaaggttttatggccttcagtatcatccggaggtaactatattcatttcgatttaggcttttatattctctatgatagattagaaatgtttggttgctttatcttttagtttcaaaatgtactgcctttattaaaaaagcaaaatggtacttttttttttgttatgatgatagtggatttgcatcttgacaaagattctttgaagaaagcttctttttgggatgtgtggataatttggtattgggaaagtttctgaatgagcaatcgaatccaccatctagcaacagtgtttggtcatgtctaattacttttgtgttgtaattgaacttcaatactataatctgtgcttctgtgtaggagttttagtttgaaattatatgtcatggtctactttttgtgaaactatgtgatttgcgcaggtcacgcattcaccagaaggaatggaaacacttcgttactttctcttcgatgtttgtggagtcaaggctggctggaaaatggaaaatgtgttggatgaagagatcaaagtgattaatcagacagtggcacctgatgagcatgtaatatgtgccttatctggtggtgtcgattcgacagttgctgccactcttgttcacaaggcaattggggatagacttcattgtatttttgttgataatggtttgttgaggttagactaagaacagtttctttttgagggaccaataatgttagatatttcagtacttgtggtatggaattctatatttatgttctacatcttctttcttggatttcttctctgtaggtataaggaaagggaacgtgtaatggaaacctttgaaagggatcttcatttacctgttacttgtgtaaatgcaacggaacaatttcttagagaactaaaaggtgtggatgatccagagaagaaaagaaaaataattgggaaggaatttatatgtatctttgatgattttgcccaggagttagagcagaaattagggaaaagacctgcctacttggttcaaggaaccttataccctgatgtgattgaatcttgtccaccacctggatctggcagaagtcactctcacacaatcaagagtcatcacaatgttgggggacttccgaaggacatgaaattgaagctaattgaaccactcaagcttctgttcaaggatgaggtttgcttctacattgcaaccacatttaattctcattttcccttatactcaaatttgtaaactagtttactttttctgtttttgtataaaggttcgccggttaggaaagatattgaatgttccagaaggatttctgaagcgtcacccatttcctggacctggtcttgccgtacgtgtcattggggatgtcacgctggagaattacctagatacactccgcctggtatgttatgctgaccatgtgctaactatggctaggaaattcatatttttctgttttgttttaattgattgctttttttcctgtcaggttgatgagattttcatccagtcaatcaaggatgccgggctttatgatgtcatctggcaagcttttgctgtgtttttacctgtaagaactgttggtgttcaaggtgaccaaagaacacacggtcatgcagttgcccttagagctgttacaagtgaagacggaatgacagcagactggtaagccttcagttgtccattatacatgatgcttgctgtgtagctttctatccattttcctttttggtgaaaaagaaatgtagatatagtcggctgcaattgctcttatgtaggtacttaagattccaacatgttccttaacttattttggaagtttcctgttacttagactgatcttgagttttgacctgaattttatcttatccaactcaaaaaattggtgggaaacgcagagagagaatgaagttaggtcctcaaatttattattgtgatccggcattgtacaaaattctttttaacaagtgcttctgctaatgtgctgaagatgctgctttgcatgccaattgattcatcttaaaccctttccttgattacctgttcatttatttacattgcttctgatcttgtcttgattccaggtacccttttgacggtaaatttttggccgaagtgtcacaaaagatctgcaacagtgttcgaggcataaaccgagtcagttacgacattacatctaagcctccatcaacaattgagtgggaatgaggcagtcaagatgttatttttcatcatattggaagaataacaaacattaattttgtatacaagctcaaggttgcagtcattcaaattcacttagtgatattctttaaatggggtattgtggcaaacttggttctcatatttatgatgagtttcccataattttactgtcttcttcacaaacaagcattgtttattagctattctgtcagccaataggtctaaattagataacttaattagaagtcttttaaatccatgatgcattgctgataacatgaaaaggtaacccaagaatattgtatagtgtagacattctgcaatttttataatgacaactttggttatagtttcaaccaattatacaagtgaatttatatgacaaacgtgtatcactaacatcatggtggttgcatggcaagagtggttgtctcctttgtctaaccagcaattaggatcgtcgaataacaacattaatacttgggaagtaggagccactaataggtagtc

SEQ ID NO: 69866 - DNA, 5711 bp, Cannabis sativa
cctgtgtttaatccaagatatagccatccaaattgctttggtttcagcttccagagcagactctgcctctgccaactgaaccttgaacctccaagacccatctcgcatattgatcaaaactgcagccaacccagccatgcccgcagaccaagctgcatcagtaattaaaaccagttcagtatctcttccgagaccacaagggaactggttaggggttcttgggcttaactcttccatctcggcatggcacatataatctccaaagtttttcctgatacgcattgaagatgtcgttaaattcggctgtccccctttgaacataataccgtttctcagtcgccatatttcttcaaaaacacacgccatgtgaactacaaaaacattcctgatgctaaccggtatatccaccatcaagtgttccacaaactctatcatggtcgtaccaggaaagttacctatcaccattggaaaactgcccgatatccaaagagccctggcaacttcacactctctgaagatgtgaagacaagactcaatcccccaatcacacaacatacattgtttatcctcagcaaaaggaagcctattccgggtagggattgcttcattcaaaaacctccataacgacaccgagattcttgggtgaatctctgcattccagatccactgccatatcttcttcttcggattcatacggtgttcttggtccacccaataagcactcttcacggagaagacaccgttcttgttatctttccaaatgatctggtccttttgagaaggaggtaatctaggaattttaactattctctgccccatagtttctccaaaaatttgaaataccacttctttgttccaagccattccaactgaaagatcagctatagttttaaatgtgtacctgttgcccctcaattgccccatcatctggtggaattcttcttgacttatccaagggatccagggttgtctccaagcatctaccaacttcccatccgcagccaaagttagagaacccttaagaattacatctcggacctccaatatattccgccagccataagagtcactctgccttggggagactgcccagaagttttcatatgagcaatacttgcttaccaggcaattaacccacggcttgttatctctccgaaccacactccaagcaagtttggacaatagagccctgtttaggtcttcaaaccttcttaaaccaaggccccccgacgacttcggttggcagatcttgtcccaggccttaaaggcaagatatctatccttctcggaagtccctatccaccagaatttcctaaccattgcatccaaagaacgagaaatggataaaggaatcttcatagtggacatattatagactggcaaggcagaagttaccgattttatcaacgtgagtcttcccgcataagatagtaactttagcttccagccctctaatctctttctcatattcgtcttgagaaactggtactcttcagatttccttcgattgaacacaaacgggtttccaagatgcttttcctggccactcacttgttcaactcccagcacttggagaatatcagccttccttgctgtgtttttagaaaagagtacacttgatttaaacttactacacgtctggccagaccaaccttcataagtcgagaggcacttcattatctccgaagcttccttaacgtttgcccgggcgaacaatatcgtatcgtctgcaaacatgaggtgtgatacactaggggctgtcctagcaatcttgatcccatgtatccttcctcgaccttccgctttcaataatagctttgataagacttcctgacacaacaagaaaaggaatggggataacggatccccttggcgaagtcctctaaaagggacaattttcttcaaagggcttccattaaggagaatcgagtaagagactcccgatacacaattcatgagcagccttctagccttatcactaaagccattcttctcgagaacttggtcaaggaacctccactccatcttgtcataggctttatgcatgtcaagcttgatggccatgagacctccttttcctttcgaacgctgaattttgtgcactaattcttgagttaagatcgaagtttcggcaatccacctccccgggatgaaggctgactgcaccggagacacaagatcctccataatcggtctaagtctgttcgataaaatctttgctataatcttgtactgaaagttacacaagctaatcggacggaactgctcaattttctcagggtgatccaccttaggaattagacaaatgaatgtatggttcactataggattcagaaccccggtataaaagaattcctgagttgatgaaattgtcaaaggaccgattatctcccaatacttcctgtaaaaacatccggagaatccatccgggcctggggccttgagaggatgcatctcaaagacaatacttcggatttcctctgctgatggtaccgcaacaaactcatcattcacttcactactaattcgattctgaaaaagactatcaaactcctctgataactccggattactggaagagtaaatgtcattaaagtaggaatttattattccttccaacttgctctttgagtcccacagaaccccttggttgtctctcagaccccaaatgtgatttcgtcttttcctaacagccactgaagcatggaaaaatttggaatttctatcccccagtttcaaccaaatgtctctggatttctgacgccacatatcttctttgcacttccaagccagggatagtttctcattcaattctgcttcctcaacagttaaaaccttctgaagctgttgtttttggatccatgctaatctgtcttcaatgcctttgatcactatgtccatttcgccaaagaaattcttcttccattttgcaagagcacgacgcgtataacaaatattgcgaagaaatcgcttaccagctgttgagccttcacttctccacgcctttttgattacttctcggcatgaatcatctcgggtccaagcatcaaagaatcgaaaaggtatgtggttctttttggagaaaagattcgtgtccaatataattggagcgtgatctgaacaagtaatgggaagattggtcactcctgcctcagaataaacagagatccattctattgatcccacagctctatccaaccgctcccggatgagcccatccttgaatctcttattgtgccaagtaaacttcccacctttgcatcgaacatccactccccccgtgtcattcaaaaaacctgttagccatttaagatcagaattagtgaccctcctaccaccgattttctcctcagggcttccaatggtgttaagatcaccaataacgacccacggcaaatcacatctactcacttttgaacttaaatcaccccagaacatactcttttctgacaggtaaggtgtgccgtatgaagcaaacatcatccaatactgtctggaatgataatcccacaccacagcatcaaaggaacccccaccattactcaccacattaaggctaacatcctgtttccacatgaggcagaaacctcccgccaagccaatagcaggttggcacacaatttcactaaaacccaacttacgggcaactccttccatatgatctctacccaattttgtctccattaaataaatactatctactctaaacttccccacccaggccaatagagcttgaactgtcgattccttggccaatcctcgacagttccaggagaggacgatcattgggaggtggggggcttgataagggccgcctcctcgcccatacaaagaacatcagaacttacaactcttacctccaccaagttcattgattcctccaaattccttgctacgttctcctcaggttcttcatcaatacttgcctccttcttcctctgagccgagccttgggatctagtcctcatccttttcttcttttcatttttagtagaagtcgaagtatgtcccgcccccactttgaataatgagttagaatgagaaggagagaaaggttccatggctggcacttccttggaaaattcctttgtattttctgcagtgcgagggacatacggcatcaaattaaggcttgctttcctctttcgggcttgggggcatggatggacctcctccgagacatctaatgggtcatgatacagtgttaatacaggctcatacttatccacttggattgggcccattagttcttcagcgagccctctatcctcagaagaagtgggccaagggaagtgggtatgttcagggaacttatggggttgtctggacttgcaaagttgttcatgaggcccatctatcatctgctcatatgtaggcccatttctagacataatagtggccaaaatcccattatctctagccgttggagcaggtctagaggagtatttttttaaaatttcttcatcagtcaacggtgctttttttccttcaatacgttttctacagaaccccggggaagtggaacacgcacgcctagccttatatatctcttcctgacttggtttatgtactgaatcagagatctgtatagcttttagatccgagccatcaatctccaccaccttcaatctatttcctctttccgctcctggtaaaacaccctgggttctgataaccttccttcttggtcctccaataggttgtgcaccattctcaaggcctgagttgtctctttccattggtcttttccctttgtccaccgtcgccggccgtttcacagatgttttcccagacttagtaaagttcactccggcttcattattgaaacactccaattggtttcgcgtattaaagcagcttattactgccgtctcagccttcgtccacgggccaaacgcaaaaacggccttcccctccaaagggtacgcgaataccgtcggtctccagcaaccattcttgtcatggcctattcttccacagttgtaacagaattttgggagtttgaaatatcgaaactgtatccattccttcctttctcgcaaccattcttgtcatggcctattattagaaaattttatgatctcaatctgtttcagtattttggagaaaattttaatcattttttttttaattgtgtagacatcgtgtaaaattttatagaaatttaaaaataatttaatatgctgaaaataggatttaaacagtttgttgcacacgtaattcttttattttctacgcgtgcgaaataaactgtttgaagtttgaacactgctttctatactataattactctaaatttctcaaaatttgtatgatattttaaataactataacgtacattgaaaaaaaattaaaaaaatttcttgaatcttgaaatactaggtaatgcatcagtgtacttttttttttttaaagggtgtattgtagacgcaccttgagttattttacattgttgttttgcctatttttgtaatcttgtttattgctgccattttattattgctaagatattttacggaacttagaagaatttgaaaaataaattagtggaactctccttttataagaaaggcgatcatattataatattaataaaataatacaaaaaataggaaaaagaattactttggattgatcttggctatagatgatgatctaatggtgaaaattgactcttgatgaaaagcgtcaattttcaaagcttgaatctc

SEQ ID NO: 69867 - DNA, 1812 bp, Cannabis sativa
  modified_base (1086)..(1096): a, c, t, g, unknown or other
attatattacacttttcccctcttaattactgtagttttttcattatgtttcaatttgtggataatataaaaaaattttaccatgcacaaacttaattatctccaatggtaatatcttttaaatagaaaattgctataaaagatactaatggtgcctaatatttttttatgtgttaatatcgctattaatctaattaagtatcggatctcgtataattataatctcacacattattatttgatatattatttattttaagtataaatagagtaatttgtaccataaatattccataaatatatatttgcaactaagagtttataagtatttgccccataaattaatattataaatattttcacacttattatttacctttcatttttttttttaaaaaaaagatagcatcaatgtcatgtagtggcatcaacataattttctatgatagtacctatttaatttaattccaatagtacagtattcttgtgttttgccgaataaacaactcacataaacaaacatctcccaaaatataactatttgagatgttataaaagggtgtcatcgatacactcctacttgtttcggcatccagaagaattatttagtctaattttttttttttttatatttgtatacattgtaaatatttaagataatttaagacataattttgaaaaaatttaacatcctaaaaatagatttcaaaatagagtgtctggttgaattttatttttgatatattaaatttttctaaatctctcaaaattttgtattgcattacaaaagtatctaataatatatattatattggaattgaaaatcaattaatgttgaccttgttataggtagtaataatatttaaattatttaattttgagcaaagctatttatataatcgaaacataaaaagaccaaacgacatgataaaaagattttgcatagcataaatatatgggtaggtactaatattatatgtatattttcatgtcacattacattattattataagacacacaatttggcattgtacaggtaaagtggttgtgtaaaattaagagtgtattattattattattattannnnnnnnnnnattattattattattatggttaatgaacaaaaaaaaaggttaattaagtaagaagagggtgtggaagcgattgcaatggttttttttaaaaaaagggttgggaaacaaaagcagcagtacaagcacagaggcatgattatacacgtgtcgaaaagtgatcaatactgtctcaatccatgtgagccttccaggtttcactttttcaagcatacaggatattcattaatatataaaaccatttaatataaatccattcttgcctatttcttttgttatagagtatagtattttttaaaggtgttggtttgtaattggttagtaatatgttttaaaaattaatatattaaattatatagttgaacaaaatatttacatatagaaaaatgctaatttctctttttattaatatatagtaactgcaatttaaataaacagacaacattaaaaaaataccagtcgaaataattagcacacagttgaacaaatattgtttaaaattttaaatctacatgtacccttagcaagaacatgtgtaagtatataatgtacactgttttgaaattaataggacctcttaactagttatcattcaacttaaagagtgtgtgtgtgtgtgtgaatatatgaaaattccttcaagtggtgatattgggcagtacttaaaaatacgtatgaaaatattatacatatatattaataagattgttttttctaat

SEQ ID NO: 69868 - DNA, 1870 bp, Cannabis sativa
  modified_base (26)..(27): a, c, t, g, unknown or other
  modified_base (1125)..(1131): a, c, t, g, unknown or other
atggtttgatatttttaaaattaatnnttatagttaaatttgtttagtaatcattcatgggtaatacccattaaaaagtgttcctatttattatatatatgcagtgttaaaagagtattatgataacatttactcaacatttttcacatgtaaagcaactaagcaaaagaaacattttatagtaatcaagatctaagagcactcacatattcctattagtgtatgcataatagctaaacttgtactgcaaaaaaagttaccttcaattacaatatttttagtcacaataaaaatttttgtaattaaaatggcattcgaatggaaagaataaaaatataagaatgtgaatgggaatgggaataggaatagaatgaaataaaattttaaatgcataaaaaaattattaaattttttcttatcatgcattagaatagtctttccttttatttcaaaatgaaatagttattctaccaaaatggtggaaatgccatttcattacaatgttattccaataccttaatatataaccaaataaaataatagaatgaagattgtttcttttctatccaattccatttcattaactccaaacaaatgccacctaaatgtaacttttagtcacaacataaagttacttgtgattcaacatagtatttaaatacaaattgttactagtttatttttagtcacaacaaacattgtgattaaaaatacaattagtcacaaaaaattgtgattttagtgaatattatatttagccacggaccttttagtcagaccaattaagaataataatttataattagtcataacttatttaattttaatcacaagttttattgcgactaatagtaagattttttgtattgccaaattatttagctaaagacttatataaactcttctatgagatgctttataatttagttataataaatttccacaaactctaataaaatatattttacatgtagctatggacactcaggagtgagcaaaatagtttttattaatttcataactactttatttgttttactattttttttaattatatattatggaatacttcttaataggtattacccattaatgggtaataaataaatttaactataaatattnnnnnnnaaaatattaaactattagatttttgtccgatagcgataataaaagagaaatttgaatttctatgcttaatttagctatttaattaaagaaaatattaaaaaatacatttttttacactatatcaaaaatatgtttatattaaaaaatatttaagtcaaattaaacttttttttatcactttttcacacaaaaacttttttttattattgtttttttcaactgatggaccaatttcagcccatataatgtaaaaatgagaactttttctaattaaatcaaaaaattaatcataaaaactcaaaattttctaatattacccattcaagagtaatacctattaagagtgcaccctaatttgatatatataataacactcttgttgatttttactttattcttcaaagtatctctttaaaattttactttctttattttagcttacacttttatattaatccatatattaatatatattataaactaaaatatatggattaatataaaagtgtaagctaaaataaagaaagtaaaattttaaagagatactttgaagaataaagtaaaaatcaacaagagtattattatatatatcaaattattatataagtgaaattaaatttaatttgaccattgacatatatatatgcacccatatgaaacatttataaatgggtattacccatgaatggttactaagtaaatttaattataaatattaattttaaaaatatcaaaccat

SEQ ID NO: 69869 - DNA, 3137 bp, Cannabis sativa
gaccggcgaaccccatttaggtgattcgtgttctttaatgttgttttaatgaaatcttcatctatttcctcagttctttttctaatatgaagtgttttgatctgcagtaggggaaggtgaagatgagcacccccatgagaagaaaacagtaatgcaaagggtcaaggcaagggcaaggaggataaggagttcgatcaggaaacatgttcacgatgaccatgaccaagcccatgatggtgatcaagctcgtgatgttcctcatgatgacgatgatgatgatgacgacgatgaggaatatgatgaggaagtggaggaagaccaagaaacccatggtgcaccaagtatgtattacattacagtattagtttactacatataatttataatatggttcatgtttgtgacaatgttggtttacttactgatttagtgttgtttcgaataactttacagtacacgaatcagtcccacttaagagtagtactgctactccagtgaattcacctatgacttctttatctgatcatcatgttgcttctaggaccattgagactggtgatggtaaaacctctgttcctggaacagaagttaacacacctctctttgcttcatctcttgaccatgggccttctaggctcagtgagactactggtcatggtaagagctcttctttatctcatgaccatggaactggtcatagtaaaacctctgttcctggaacagagtccactaaggtccatttcgaaacaccactgacttctttctctgatgatcatcatcatggtacttctaagaccaatgagatcgatcacagtaaagcttttgttcctagaacagaagccagtagtgtccatttggagggtccagatgtagatacacctctttcttctttctctcacgaacatatacacaaatcttcctatgatcctgagacagatcagtccagggtcaatttggaaaaaccagtagcgagtgatcatttctcttcttcgtctcctggactttctgatatcaaggaatctgattctgatgccaccagaaccattgttcctgggacagagtccaaaatcaatttggaaaaacctgttgggaatgctctcttgtcttctttgtatcctgggctttctgatgatgtcaaggaatctaatccaaccaaaaccattgttcctgagtctgagtcagagtccaaagtcaatttggaaagaaccaaggaattggagagggatcctcaagcccctgaggacctctcccataagcacaccccttccaattatcagactaaggtcactgatccaactggcaaaggtaactaaccagctgctgactaaggtcaagactgatctttgggtattatattttcttatttatatttttacatgtttgtttgcaggggctaaggaaatagaaggcactccaatactcagttccttcgataagatgaatatacatgatgaatcagaatcgaaaccaaagcaacatttaccaaccggaagccatgaccaattttcttcagaacattcatcactagatccaattagcacaacccaacaccttgaaacctctcagaaatcatcagcaccaatctctgagaaaatcccagctgtcgcatctgctctagctgacagtgcagtatcagcaaaggaagtagttgcttccaaagtcggccacggcgagaaaaacgacacggaaacccatgaaactacaggaaattacacaccacaacaccccaaaacagtggaagaaagcttgggtactcagaaacccgaaagcaacccagaacatattacctctccaaaaccagcatcaccaaccagttacgctcagaaattttcttatgctacctctgcaatatatggtacagcagtatcagcaaagaatgccgtagcatccacattcggctacggcgagaaaagcaacactggactccacgaaacgacaggagattacgacactacaagtaatgaaccagcttcagaaactgagactgaacacaggaagaagatggcttccactgagacagaccaacattctcccttgtacgagaaggaaaccggagaagggagcgaagccatgtcgaaaatgcatggtccagagaactcggcaagggaattggagaagagtagttctgagactaaagagcaagacaaaggagtctcgattaagggctacttggccgagaagttagtgccaggagatgaagatagagctctttctgaggtgataactgatacatttaacaagcgaaaggaggaaccggagtcagttccagtggggaaagtgacagtgtcggatcatgtggcaaaaacattgggtactgcggatgaggaaaatgaatccaactatgccattaagactaggggtacagttgcttcttggtttggattgagtggagatggtcagtctccggcttctcaagattcaactgctaacaccaaaggtagactatattagcatttatttaaattaaattactagtttgatgctacaaaattgtgtgtgttgaaagtggaatcattttattttttaatgacaggtgaaaaagatgacaaaacacaggagagggagtgagggaaccaaagatggtctctgctgggacagagagttgatatgttgattttttttttttttggttaaaatgtggttagtgtgttcactggagtcttgagaactttgtatttgttaagtttctttgggtttgtgtgttcatgtaaattcctatggatatttgattttatgtacaagctctcgtgttgtgtttggtgtaaaacctttgttaaaggttctggttgtgtgatcagttatttggtgtgacttggttgaataacaagctttcttatcagttacgctgaaaatataatccatttgcatatgtcagtgaattctcgggagtaattaaatagatggttaattaggaatctctctgatttaagaatttttgttaaaattaaatgaaattaaaataattctttaaatctaacaatctcactagttcaagaatttttaacggctaaaaaaattcaagagatataatttagcaccgttagaaaaattcaagaagtataatttagtataccttaaaatttaagggataaatattctaattaacataaataaattatcccttcatttggcttttc

SEQ ID NO: 69870 - DNA, 975 bp, Cannabis sativa
acaacccactactctctatgttggatttattacctgaattaactgaaaattccaattatatctatttctcccatttttacattattgcccatctttatttaatcatttaccacccaattaactcctttatttgatttgttttctccttagtatgaacattaatgtaataatatgttattcacaatcacacaaaaaaatcaaaatcaaaatcaaaatcattttttagtgagaaatgctagaggacactcatgttccctaccacacttatgaggtgtaatatcttagtacaactcaatatcaagtcaaactttttttactttcataaatattgcaaaaaatccctaaacaattataaagagacacttcatcgtgatgctaagcaacatatgtgcctcatagcaatgttcttttttattagctctcaaacttttgtgtattaattatttttatttgatagaaaatggaaacttccattaatagacaaatcaaacgaattttattacacaaagatattgctccatgagcaaaatcaacaataatatgcataactataatattcaaagtaaattaatgcatttaatgaaatatcgacgaaccaattgagagcaaactcaattccagaataagagttaattgcggcatcatctccaaaaattttattttgcttgcatttaattcctaaaatctaaattttgatagcaaaacctccaaaactactgtgctattagcaaaaatacaccttgcccccgttgaccccgttatttgcctacgtggcttagtccagccaatgtcaggtagactaatgcatgccatgttgttaataatttaatgatgtgacatgtgaggaaatgaaattaaaaaaatgagtttattttttttaaacgaatggctaattaaattaaagaaacaaataaaaataaaataaaaagaagaataaaaagaaaataaaacgggagatagaacaaaacaacaaaa

SEQ ID NO: 69871 - DNA, 1582 bp, Cannabis sativa
  modified_base (1547)..(1557): a, c, t, g, unknown or other
gggattgcacagcttacccggtatttccccttacagatcacgggactactgactttcacaacaaaactctatttttatttcgttttcttttgggttgttggtgcaagattgcaaggtgttattagcttatttgaagtgtgttaagatttattttgttaagcgttctataagtaatattgcacattgtgttatttataactcttgtttctatcttgttcgcatttttagtaagagcaatgctccttctaatttactctctattgtaatgattgaagcaagataattaataaaatctccattacttttttaaaataataataataataaataatgttcaacaatctaatagtaaccaaaaaaacttggaatctccctatcaaaaaacaaactaacaattccaaaatgcaatatggaaagtcttccaactcacacaagttgttcaacttatgcaagaaaacccaataaaaataaaatttactataaatgttggggatgaagaaatttaaaaaatatgaataatttctttttacttcaaaatgtaagttttttatatacttttttgtcaaatatttaaaatatattttattcatatgtattttttcaaaataaaagaatgaagaggaaaaaatatacctataagtattgttttgttaaatatatatttcatcttatttttttaataaaaatggggtatcttaatcaagttttgagtgcaaatataatatctctttatataatctttaattaaatatctttattttttaaaaggtatatatgagactatatatgatttgatttaagaaaacaacacaaattaattgttagtactattagaagtgacacttttaatattgttgtttgtgtttttaattaaatgacacatggcctcttcacagaataagcaacaagcccatcttcgatccatgtaagttcatttagaacgagattaactatgggtaaacttacaaaaaaatactagaatttgagttaatttttacaaaaatactgtcacatggaaaagttatcaaaaatactgtatttttataaaacaccagtagaatacaaaatagtaaactcaaaacaacagtgaaacaactaaaaaataccagtagaacaccagtgaaaacttaacacagtatactgcagcatgaaacttataaaaaaaatacagtaaaaaagtaaaaaatatcgcctgacagtatttttgtaaaaaaataacaaaaattagtataccatgtaaatttcccacccagataataatattactatgtctaaacaagtgatcaattgtctctaagaacaataatagtagtgagcaagataacctccctctgcgaaggttataggtaactaagaggtccatcaagaggtccatcaaagcattccctcataacaacttgatctattagggcatgaccaagaaggacatcaaggaggaagacttgaagggtagctcggggttgtttagctctaagtttatatttaattagtttttgaaaaacacggtaaagagatattaataaatattagggtaaataccattttgnnnnnnnnnnnttgcaaaagttacagattggaccct

SEQ ID NO: 69872 - DNA, 1237 bp, Cannabis sativa
ataatttattattataggtcccgcctccggtgtgtaattaaacttccaaactaacgaacgtcaaactgtgagaagagaagagaagagatcttgcagttgaaagctttggttttaagataaataccccttttcttttcttttcttttcttttctttagcaacctctttttctgccattgtttctccttggcctttacattttagattcgatctccgaatttttacaagcacaactgttttgtgttttcatttatctctttcttttctttttatacataaaaatcatggcgaagagtcagattggcggagcctttcgattctggttctgtcttttcacgattttgatctacgccaggatttccagctctgtgaggtccgataaagagatcagagagaggttctatggaaatttgttaaactccaccgcaccagaatcgaacgacaccatagccaaaatgttcgatcgagttctcgagaaagagttttccgaaaatgatcagcctgaaggttcgaatatatgctatttaacatgttgtctctatttacatttgaatcttgtttgtttggctagatagtatggtaaagagaaagctgaattttgaatgaaattctcaaatttcgattagtgtgtacgcgaagttaaattcgtttctgacattttctcgaattgaaaaattcgtacctggatcacacatcaaacaggaaaaaaagaaaaaaaattgagagagtaatagtttattttgctggccaaagttttttattcaactaggcgcatgccaaacaaaatggtatgcatttatagtgaagcgaacaatgtatgccttttagggttcatggaaagtttattattcgttttcttgtattgttgggtaactttactgattctgcacaaagcatgcatttatacattatgtaattacattttcagctgctaaccgtattatgtccaaaagaggcttctgttcttttttttttgacattcctttttttttttatttccttatatgctaggacctgatgcaagcagctttaacaacagtgtagctgatcaacaagtaggtctttgtttctctaccaaatttccgtaatacatagctttattattaggttaaacagtatgattcatcgctatacggctgcctaaatagatcaaagatatcttcatagcttttgcatttggggttctgcatatacttaaatgtttaaactgtttttttccactgcgttacccccacccc

SEQ ID NO: 69873 - DNA, 1112 bp, Cannabis sativa
ttttcttttcttctgttaatatttgctgcttctttctttttccagcaaacttcattgattttcttattcttttctttttcccagctttttctcagtgatatttttattttcactttggcccctaaactatctcttattatgaaattcgcacttcttatatttatttattttcaattatacaccactgatgaaattgtgtcgtacaacattaaataaacaatacaaaagtttcatataaaaacaaaattatacctatgtcactttgtgtaagttccaaacaaaaatatcagattttggtatttaattcattaaattttatggtctaaagaatattattatttaaagaaagtaataaaaaagagttaaaaaaaaaagagaagaaaataaaaattggtagaagtatatggtttttaattttggtccaattgattaatgctatttctttaaatggttttatgaatagtataagctattaattttgtgtatcataagattatgaatgagacaaatatgactatacttaatgtcacctacaccatatttattcacctctatgaataaataaccattaattcaagatccaaacaataataaataaatatcacaattacttttgtgtggtttctaccttaaaatctcagtataaatttttcaatgacattctttatttttattaaaatatatgtaaggatatttttttaaaaaaataagcaaccacagtcaaaaaaaaaaaaaaactcaattgtgtgcatcctcaatattgtaaatcatctttaataaagttttcaaaaaaaaaaaaaaaagaattatcatctttaataaagtattaaatttgtgtgatgatgttagtaaatagtcgttaaattattttatttattgattcatttaaaatttaattctaatataatttgttgtaaagtgttcattattgacttgaaatttttattttcaaaataacatgcaaatatagtatttaagttaaaactttgacttgtacgaaatcatgttactgaatttttaagttcgttaaaaatactcttgaactattgaaattgttagatttaaagattttttttttctaattttagtaaaaaaaatctaacgtggatgaa

SEQ ID NO: 69874 - DNA, 2463 bp, Cannabis sativa
tataaaatattttatgtttataaaaaaagcaacattttagtttttctacattttagtttttctacattttaactatgccattttgtgctagtttgtaaccatcggattcgataacttgcgccctatagaactgacgcaaacagtgttaaactaacatttttacacaaaaactgacacaaagtggaagaaaaaactagaaaaaataattcaaatctaagatatatctcatatctatattccgatccataacaaaaccatatttaagatttaaaataaatatataaacacatattaaaaaccctatcataaaaaaaaaaccattaattctgatctcaagtacagatctagaacgcaaccattttcgctatctaaaacgcaatcaatatgattcttgatcacaagccccaaatcaaaaagaaaattaataaatatataagatattaactaactaaagaaaatgaaaaaaaaaaaaatacctttcgcataaagaagagatctactatttttgagctgggagctacgactggcgacaagataactttgtcttgcccatggttggtaatattgctgggctaaattgagagagagatgagacggagagggagagattgatgttgttgtcactgcagggatcaccgttgtgacttgtgagacagagaagacgggagagaggaggaggtaggatcgtgagagagagaaagagagagagaatcgtgggtggttgtgtagtagcgactaatgtgaattttagggttagggtttatgtaatgggctttgcccatcttcagtttttttttttaataaataaaataaataaacaagtcatttgcatctttttcaaaaccaacgcaaacaaaccaatgcaaatgaagcgaatgtcataatttgacgcaaaaattctacaccacttaatagcgtgatcagttttgagggttgatcaatgggccgaagtagtaatttttgaagtacgatttgttcttactcaacctttttctttaaaattaattgatatatacatatgttttacgactagctcatctagtatactccatcaataaataaaacaatttgagaataaaaagtaaataaagccaaactatatatctttataggtcttaataatgtcaattattaatgctatctgatgtctaatacacatacgtatataggtctttattgtaatattaaatacaggaagagcttttgaagttcatactattccctcttaataatatttttatacatatataaggtgcagtgtagtcgagctatatatttactatagtatttaccgcttcatgtttttctgaatttgtgggggcaatgctgctagccgtttctgccttgctacgttcccatgccaacctacaattaattataaaaacagtagtgtgtatgttctgttcgatccaatatgtaaattggttaattaaccaaaaatgaataaatgataataataaataaataatataccaatagacatgtcaaggccatgacttttgagttgtcgatactcttggcacaaagagcattgttcgcagcaacaatggacacagcagtcagtgcaagggctctcctctaagaaatactgtcctcttaatttggagcgatagaagcaagagtacaagcacgcccaaccacttacgcacattatcaacgtgtacagagctccactcattccacaagctttatttatattatattataaagcgtttattggataattattacatttttttaatataattaaaacaaaagaagcattattaattttatataaaataacttacaagttgctccctggtcaaccatttctgcaatgcgtccgaatgtgacgcatggacaccaacatgttaagcagcctgaaattaatgtttgaccaaactccactaaattatatatatcataagagttgacatttataaaaacaaaacaaagtgaaaaactaaaatctttctagtagtggcatgagaactgtttcttcctttcccattatttatatataaacatgtttaaagcatcattaatcatcatttaaaaatacatgaaaatctagagatgtattatgcactactcacaagtgggaacatcatcaaaacaatcacagagaccagtggaccatgggacgagagcatgatgatgagaggttccattaatattattagtagtagtagtaatttgagaagttggtttggtaaggtattgggatctctctgaatttgaaacaagtgaagatgttggcaaaggagaaggattatgaggaggttgaggttgtggatccatctctatatcgacgatgtagtgaatttaatgtttatatgtaaatatatacctttgatgtgttttagtatatataactttattaaatataataaccacccacgtacgtacggttccaacttcaaaataaaaatacgtacgtacccctccatttcataaacggttttcttctttgcaggttaa

SEQ ID NO: 69875 - DNA, 2030 bp, Cannabis sativa
ttaaatagaaatataaatatgaatttaaatattcttatgagtacgctattataacatgatacagtcactaaacaaataatcctacactagtctggtttaattatagaatcattgtctataacaatctatcacctatactagtttcataagaggggacatggaaaaacccacttaagaaacttctttccacgctaagaattcccccccaatccaatatctcacagtataacactacttaagaacaaatcttttttgttttacactaaaaataccacaattccccacagaatcaaaaactgaacactaacccagtttctatatgcctgagaactagaagaagtatcagtgacaccaacaagaaacctacactgaccaacagaaggatctaagaaagtaaccataccgagcccgtcaaaatcgcaactttgtaagttctgcatttgcaactgatagtaactgttgaaagcataagaaatatttccctttgccccaagttcattacatgaccctccatagttgagtgttgtgcaatctgccatgctacatgccagcttcatgtggttagccacatctgataggtccctagatggatttgctacacaccacctagatggaagatattcaacattttttgcattcttcaaaaatctgttgcccaaaccaaggttcaatggatatttagcctggccgtcgaaagaaaatataccccaatgcctttcaaagtttcctggaagaatgctcttggctccttcgtcaagcaggctgaaaagataaacatccatgggcgggatacctggccttaagggggttcctttcctattcaaaacttgattaatgaggccttggttgaatgcttttgcagcgctgagatttgcaccaatggccccgtctgctggccaacctatctccccaatgataattggcatctgaccatatccaagtttggcgagagctgcaaccagagtgtcgaaatttccatcaaatgcatttgagtaaacattggccccatctgtaacaggatgggtagttccaccaaagaatgcatagtcttgagggaaatctgaattcccatacaggctgagaaaagggtaaatattgactacaaatggagatccatttgagttgagaaactgaacaatttgagtcataatttgtgtcaactctggtctaaatgcgccttgagaaggaagttcagcctcataggcatcagcattgcaagggaccactaactttatgtagttagcaaggttcaccttcgccaaggattgttgcagatttagcatggcaggcatcacataggactgaaactgacctgagtagctcgtgaggaagggttcatttccaactgcaatatacctgtcatcaagatatacatgttaacgcagaactcctctcaataaaagccaattaataatggtatctcatctcaaatagagccagcagaagcaatgaccataacattcgacaaatgaactgcgccctttgacaaaaggtcaatctctcttgcttaccacatcctttgtctgtgatcaataccaaggataccaggtcaaaaatttaataagtcaatcatgaaaatctaacttcaagttcatctatatgactaaaaccgtagtggttctgatacagcaccacttaaaacttttacaagcctctctaaatccatgtctatcaagcactttgatcactaattacaaatatttttttaattggaaacaaaaagtatatttataattttggatgatctgatcaagccataactccagaacgggactctatgtgcacggtgtcaaaccaacaagatgaatattctctagagaaaaaaaaaaaaaaaattccctcttttctgctagattcagccaacttagtgatatctcattatgaaaagaacacaggagatgattgccgatgaggctaagaatcaagatgaagaaaaaatgtctgttgaaactttcacgttaataaagctaagacctaaataaggaatttgcttatgttctgaacgttttatgtcctaccactagcatcac

SEQ ID NO: 69876 - DNA, 2717 bp, Cannabis sativa
tagcaaaaaaagtattagctaccaaatatagattatttgctaccaactttgtagtagctaaaacttatatttcttgtagtgaatgttgggactgacgaagatcgataatttagagttatttaccttttgaccaaaagcattttcaaagagctgaagtaaagtaaggatactatcaatagcacccctagttgcttggcaaaatacgtaaatatcattagcaaagaacatatgagtaatagaaggcacacgttaaactacacgataatcgtgaatataattataattatacatagataattttttttaatttgaataatttataattcttaaattaaggtaattactaaatagtttgttatatatatctttttttttatgcgttaaaataattatttatttttatttgaacacacatatgcatgatgtcataagaagtgcttatcataaactcaaatgagatgaagtgagtaaaaagaaattgtcactattgttaaattgatgccaaagctaagcaggacaaatatatataaattttttaattggctgttattgatagtaggtgttagagattttatatatcaatcgaaaataaattaagttaaattataacttaattataaaataatacaattaaaataagaataaattacatatatattataacagatatatataatacatatatatattatatattatatatataaaaaaaatagaagagatgaattacaacacaacacatgtaatataatataatatatataatacaatatgaagaagaagatatatatacataaacactcagtcacaattttgagtgtagattagtaggatacaccatgacttaaacaaactattttgatcacttttgtctaaaatcttattttccctatctctaagcactaagaaaatttactagaaaatagcttttagaattatcaaacattttaaaatttctagcaaagtgctttgttgatagaaacttggttgtcacaatatgagtacattggacctctttatatagtgtaggatatcaccatataaaattctaactcataactattcctattgagcttatggactcaataaataagtataaaattactcattctctaattaaaataactcttatagcttttaaaaattttaaattaagatgtgtaatactttcttacacatttaatattagtaataattgtaaaagttatttatagtaataagtaactttaccatatcttataaattataaaatgatgataacaaatatagattatcatacacacttattaatttcttacacatatttaatttattaatatattatttataaataatataacaatagggctattatcatatttttttttagatgttaccattagagatgcttgaaagcatcacaccaatgcatgatgctacaaaaagtgtttaggtccaagtgagatgaggtggaaaagagagaaaattaattttaatatatttaagttatacacataatatttatttaattatcgaaattaaattttaatagttatgagtataatatgaatctcacaagtcacttttatatatagatagatttgccaaaacgtgacattggtgccaactgccaagtgctaatacaataaatatactattaaaaaaaaatggttcttattgattgtagattcattttggcacattttttttgtaacatctttggagatgcaaatggtggcacccaaacattttaaaaagaatatttcaaaaaaaaaaatagcatcttcaacaatactggcacccaaaaaatttcaaaaatttgtattgtagtattatatattatatttaatgtaaaaatcccaccttcttcaatattgtcaaacatattgtagctagcaattgccagttgacatttactacgtatacaataattgaaatgtaaactttacaaaaaaaagaaaataataaataattgaaattgtaataaatgcaagttattaaatagtgtaccaagcaaactaatgtcaaatgactacaaccttttctacccttggtattgtttaggagcttaactttatgctattaataatttctcctcaagtttgattattagacaaataaaatgtacggatgcaaaaagtatatattataaaaagttaaagtaatttgtagtataaatagttaagtttaattttttagttgtaaataaatatttaaatttaatttttggcagtaataataccaaagttataattctataatttatataggtaccgggctgttaagtgttatataaattgtcacgtagtaattcctgattagtccaagtcattaaatttttatttttttaaaaaaaaattagtttaaatataccaataagaaaatgacacgtggaatatgatttaatatttaacggtcaaatacttacagagtttcaaaaatataacttaggcattattactgtcaaaaattaaacttaagtatttatttacaaccggaagttaaacttaaatatttatgccgcaaattactttaaaagttacttagcttctttgagggagatccttagtgattaaaacatctctagtagaataatataaatattcaatgtggtgtatatatattttttagttcatattaataaaattaaactccaatgttacatataatgtggtctaaatttggaacatattaaagctgtactaaatttagtacaaaatatagcattgggggggggg

SEQ ID NO: 69877 - DNA, 3613 bp, Cannabis sativa
aaagttcatgtaacatcataagataactagtttggtaacaaaatcttttctgtaaaaacactgaaatctatattttttttgttagtaaaaacactgaatattttaaccgaataagaaaatttaagatttttgtattgtaaaatggaaatacaaaatcctttttttttgtttaaactttttttcttcttttaaataaaaaaattgaatctatgaattgaaaatttgagatttttgcattgtaaaatagaatacacaatcctactaaaaaatcttaaaaaatataattactctaaataacactaaatcaaattttaaattaataataatattaattttttttttttttgtcttaaatcttaattaccataaataatatctatctagttcctttgtcgaactcattctcattctccgagaagatggagagtttgccgacgacgacgacgaaatcggagagacgatggagatcatcgaagcctctacagacatcgaaaccatctctccttttggctttgttctcttgcattgcttggctctatgtagccggaaggttatggcaagatgcagagaacagaacaatcctagctcatcttctcaacaaaagctcactcaacagacctaaaatcctatcactcaacgataaattatcagtcctaggctgcaatgatcttgaaaaaaggattgttgaagctgaaatggatctcacattagctaagagtcaggggtttgtgaagaacaatttgcaacaaacaggttcttctgattctgaatctcgaattctagctgttattggtgtttacactggatttgggagtagattgaatcgaaatgtgtttagaggatcttggatgccaaaaggagatgatttgaagaagctagaagaaagaggggtaatcattcgatttgtaattggtcgtagccctaaccatggtgatagcttggatcgtaatattgatgaggagaatcgttcaagttcagattttttgattatggaagatcatgaagaagctgaagaagagttgcctaagaaagctaaggtcttttttagcacagcggttcagaattgggatgcagatttttatgtcaaagtagatgataatattgatcttgatcttgaagggctaattgggcttcttgaacgccgtcgttttgatcagaaaaacaattcttcttcttctgcttatattgggtgtatgaaatctggagatgttgtggatgaagatggaaagccttggtatgaacctgaatggtggaaatttggtgatgagaaatcttatttcaggcatgcttctagctctcttttgattctttctaataatttagctaagtttgtttacataaatagtgcttctttgaagatttatgctcatgatgatgtatcaattgggtcatggatgatgggtttacaagcaacttatattgatgacaatagattttgctgcagtagtattacacaagataaagtttgttctttggcctaattaaggggagaaaatccaataattctttgttttttggttggtttgtgtgaagaaattgacatatttgttgttgttgttgttgttatagttttgcttagatatttcactcaattcttttttaggatttacaatctgaattgttggaagagttgaaatagaatatctgtattgaatcacttccattttatttatttggctaaatctgtattgaaactgtttgtacatattagtaactgatttgttgaagttatgttatttgagatatttattttgtagggtgataggaatttcctctattaattgataacagaagtgaacaagaacaattgctgggtattggagagacccaatactctccaagagctactgctcaatacaaatgaaccctctcccctctatttattctaggctaataaggatttttgtcctgaatttttctggtctttaaaattttttcctgaattattgagattattgaattgaaggatttttgtcaaattttattcaattttactaattctatgattatttatgtattaattcatgctcccgaaattttgatatctactaaatcatactcctcaaactttgacatgtaccaaattatgtttcctgaactttcatccatttagactttctttactaaaattgggctttagttctaaattcaacaatcttaatagttcaaagaagatttttcacgaccttaaaagttcaggaggcatgatgtggtacatatcaaatttgggagccaaaaatcctaattctctactgtgtatcacataattacatacaccttagtaacactcatacccctccccttaactaaccagttgacttgggttatgaaattgtcaagcagctgcttaaatcaattgctcaattgaggcatcttagctatttggacctctcttacattttacagtcattgaggtcttgatgcaaatgtgtaatctgaaaagccttaagaacttgagtgcatttatggtgggaaacaattgtagagccaaaataggagagttgggagagctttcagattttcagtttatagactagtgaaagcttatgatggacttgagatggggtgaaaaaactaatgtaacagaacatgaaagagatttacttgacatgttattttcaaacacaactttggaagagttcagcatcacatattatgggggataaaaggggtgttcattggaccacatctaatatttttcgacctattcagatatgatttaattatatattgaatgttaaattttactgtctcatctgatctaattattttcagtcatctaatcgatccaatatctgttggatgttagattggattggttttaaccattggatgtatttcatgtatatctattggtataatttggatttatccaatattttacacctagtattttttggatcggatcagatcaaatccatccaatatattagatccagtatttattcaatccaaataaaattctaatgttgaagttttatatatacatatattttattaagtacaacaacataaaatctaattactcatttaagcaaattgaaaatattaatatgttcgattgaatgttggatatattggatttttggataagtcatccaacatctaatccgatccaattggatatttaaaaataacattcaatttgaacccatcacaattggacatccaatgtttgacggtcagttgtaattagatcggtctgtggtcattggattggatggatttatgctcactcaagcttttccaaaaagcttgcttcatcaattcaaataatgccaaccatgaatacagcagcacttaactactacactaagcttgttggagttcaagcagttgtctccaaaatctgattatttgcttctgccaatgtttagaattttcatattgcaccactcaatcttagattgtttccttcctttcccaatgcacagaaagttgccaaaacctcgagtctttcaactccttatttaaaggcttaaaatctctttcatctgtgcaaatttaggaatacatatatacatatatatattttaatatataagattctatccaaggcagtggcacatgtcttgcagttattttctcttttacattgaaatttcaacaataa

SEQ ID NO: 69878 - DNA, 965 bp, Cannabis sativa
aaaaaaagtgacgtactttacttaaaacacatgaatgtaaatgagtatattacaagtataaccgacaaagacatttgcccaaaccaaatgacataactgtgtagacaatgattacaaatttggagttatgttattcaaattgcaaacgtctatgaatttctggattgcattcttatactgggttccctgaaaaaacaacacagaatttaatcaaagctggctaccaacaatatcaaccactatcataatcaacattatcatcatcaccatgcatgactccatttttgtcaaaagttcacacctagtttcaaagtgtttttttttttaccatatgacaaacaagagaagctacaagtcaaatcatgatcttatgtctagatatattttgcttaaaaaggagacttgttttagcaaacaaatttactttttttttttaataagtctttattgattgactgattttcttttttcaataaaaggggcttaatgtccaagtttgagaacctaaagataaatctctttttgcttctacttgaagtggggttgcataagcactaaactatgttgagaatgtaaagaagttgattacacacatcctatcctaccacaatcaacagtattcacatttattggagataatcaactttaattagagccccttttttcaaggacaactaaagggcttgttataataatatataataagtctcttgtatattgttattttctgtactgtgcacatgttccattggcttttgtccatgttgccttttaaataggagttttataatcaataaaaaagaaactaatgaagcttttctactaatgataagaaactagcaagtcatcttggctaaactctactcttcggtggtgaagaaactatagcaattacaatgttggtatccaagttgggactcgaacttaagcgatgaacatttgagctaccccttttggatacagtt

SEQ ID NO: 69879 - DNA, 1199 bp, Cannabis sativa
taaatgttcaatcataggggtacccttcttgaagtggtaacagaaaagtttcttcttcaagtagagttgattctctgcactgtttgtcatgtacttgtcctctagctttttctaagtagagttgattctccttcttgacaaattacttctaatcttttctcaaacacagtgagattgtgccacaagcttgagattgacaaaattccaatcttcattagaataatcttttagtatagactccaaggaaatattagatccttctcgaaatatcgatctgatactttacattgccacatgccaaaatcgatactgtcaaatttctccacctcaaactttgtatttgataacatggttctctttatagattctcttgactcgctagaactttttacgccaacttgtgcatctttttcagtttctctgttgtcaaccataagtgcaaacagataatacaatttttgagcttatgacttaaaataatgtttttcaaaattttaataccttattttaaaaaaacaatgttgcagttgaatttggaatggttcggttagttagaaataggtccgactcagttgaaaacgtgtgaaaaaagggctgactcagtccaaaaatcattgtttgactgagttaacttggttgctggcagtaacactcttacagctagtgacggtgcatcaaacctcggattgaggaaattcttgcggcattggatttgtctcgctgagagcttcaatttgatatataatattgctatatttgactctgataccaatttattgtgtgtagaagcaataaatagtgaaaattagcgatatatatcaaagcagtaaaataataaacacatagagatacgtagttcggcaattcacctactccatgagaggcagctaatattattaatctgagtagaaaatattcaaaatacagatacaaatttcctacaaataatatatcccaagtgtttctcaaaagtcactaaagtgtttcccaaaatttggatatataaatgctctccctctcagatttcccactgaacccaattgtaccaatttgtaccctggattgcacccaaattggtatcaaattttctaatgctcttcaaagagctcaatatttatataaggatgaagaaggtaaagaccttctggaaataaaaagctagaaagcaagagcaaaaaaataaagtaacaccaagaaaa

SEQ ID NO: 69880 - DNA, 2574 bp, Cannabis sativa
tcttaagcatacataactagaaacttctagaccaaagttttctaaaaatgcctatgttctattatatttttcacatgtctagaaaattctaaattattctacaattatttaaaagtttagagtaaattttctacaaatgtgtagaaaattctagacttaattgagtattgtagaaatgtatagcaatttctaataatatggataccaaaaaggttcaaatagattatgacaaataattatcattcattttcaacagatttggctttggagttggttgagtgttgtccagaattggttaaccataatgctatgtttgcgttcgctactaacagagactttactgcatttccaagtggatgtcgactcaacttttggcaacaatggatttacgactgtaagtctctaataaagttttagccttccatcttataatttttttttttaatttgacccttttatttaagaaattttttattttagtttcctttaattattttttttgcactcaagcccgcttaacattagaagctatcttcttttaatagggagtactattaatgtatcgaaaaatgttgatgccaatattcatgacactacgaggacgaggacgaatgatatcccaaaaatcatagaagaaaaccaaaataaaactcgtgagaaatttatcatatttcatgtactaaataaaattatactaaaagtatatatatatccaaaatcactaaatagatattgtgtattcttctttataggtacatttcaacaacgttttgcttcagttctctttaaaattttaggtacgaataacagttaattatataagggaaaaattataatgagggcatcatttttatttttttctttttaatcagagtcatctttatttttatcatagtatacattatagttatagtagatatttcattaagttttacagtactaaaagcatgattcatcaagtcagtccaatttactatttgaatcatatttttggtactataaattattcaaaacttcttaaaaattagtgaatatttgctataactacaatatctatagttgtataaaaaattgagttataatttctatacatgccaaaaagagacaccctttatagtaagagcaaaagtgacgctgacttaattaccataaaatcatgtctcgccttctttcactttctttctaggaataaagagtatggaagaaatgaaattacgacatcattacacgtcgagattgctaaactgcatgagccaagagataaagaagagaggggtctcagtttatggggccttttacaaatgtgctgaggaaggagtggttgagatctttgttagtttagcaaaaacaaatcctcaccttgtgctttactacaatgatataggaagaaatgttttcatggcttcaattgagcatcgacaaccacaaatttattgccttctgcatggggtttctactaaacatgtcactatagcatcagtagattgtggacataataccatgttacacatggctggattgttggcacctcctaatcaacttaataaaattcctggggctgcattacaaatgcaaagtgagctacaatggtttaaggtatgtacatatattataaggtgattttacagtgcattccaaaaaatgggtgcactaaatacatttctttcgtgtttttgatatctaaataattatatataatatcaatatttttttatataattgtgtatattatatagttatttaagatattttgtaaaatttaaaaaaattaaaataatttacaatataaaaaataaaattaaaagagtctattttacatgtgtataaaataaaaaaaatgcacatgtaacagactgtttgaattttattttttgtaagttaaattattttgaatttctcataaatttgtaaaatatcttaaatcaacctaccaaaaacacaaaagaacatcaacaaacctatttttggggatgaaccataaaatttcactgtattttaatcctaagaaacatctattaaaaactttttaaacattttggataatttaaggttttgaagtatcatagttcaaccaatttttatcaaactagcatgaagggtaaaaaatatattagtacaatagactgattttttaatttatattgcctaaattattatagtgttaattataatttttaagttaattttctcgtctcaaattacatgttggaatatttcttttaatttttttttcatagcggtattcattataattacaatatcattcctgtaaatttttgaaattttttgaatagtttacaatattaaaaacagaatttccgatattctaatttatcatgcgtgttcaaaaaactttaaacgtattttcaacattgtaaattattcaaaatttttaaaaaatttaaaaggacgatgctgtaagcataacgaacaccactatgaaaaagattgaaaaaaaatattctgacaagtgtttttgggtatagaaattaactaagggctcgtttggtatgccgtataagggtcgtattgtattaaataataaataaactatgtttggataaagcaatgtat

SEQ ID NO: 69881 - DNA, 1515 bp, Cannabis sativa
  modified_base (1022)..(1026): a, c, t, g, unknown or other
cttctaatgatgctaaacattgactatcctgtgtttctttgtaatgcataaaaaatgaaaaaaaaaaaattgaaatataacaaaaaaaaataaataataataatacatatacgaagtaacaataaaaatgaaaagtaataatcacatgcgaaatacataacatgatatatcaaatgtatgccattaatttatatttatgaaactacacagtgtagctccacaaaaatgggtaaaccaatacaccaatacaggaatagttataattatttatatacataatgatgcttattgtacgtacgtatttatttaagacaacactaaaaatagcattttaattttgttttggacattttaaattattttaaatttcttaaaaaaatttcaagatatattaaatagtactacaatatttagtgtgatataaaacaaatgaatatgatccattttaagggatgcacggatcaaattttggaatttaaactacgtatatatcattttgaaaatgaaagagcaattaataagaatattataatttattattattaatttcttactgtggtgtggaagaagcgcgtggagacaattaaggcgccagtgataagaaagaagatgaaaaggaagagagcattatgagatttgggcgatgatgatcttaaccaaaaccttctcgttctctcaataaccatttcctttccttttttctcttcttttgtttcctcacacaatttcaccaactactatgacaatacaattcagttaatcgtaggagtaggacccacaccattaagttggattggggatatattcctcaactcataagaaataacgtttattatatattcaagtttagtaattttttaaaggaggtttaatataacttccaatatgcaacaaaacaaataccttttccttctcaaaaaaatcattgagaataccaccaatctttcttacttttatttttttcaaagactaatcttctaaaaactttctaaatcacaatccttattattattattattatnnnnnttattattattattattattagcccaacttctttttctttttttggaatataatagccaaacttatttacaatgttctttctattaccgccggccaatattaccatcactacaactatgaagcattttattttattttattttcttctttatgaaaatttaatacgtgtgttgaccgttgaagaagtgcctgcttatttggatatatttttgctaaaattaattaaatagtttgtttattagcggagtgaaaacagatgacaaagaaatattgtcatgtcaaaagaataaataacatttttcttaaaagttagatctcatggttgaaatcagaataacactaatattttttttttaacacagacttagacacattatggacattaaaattacaagttttattaatagggaaatttgattttttatgcttacatttagttaaaaaaaaatttctaaacaaataataactaatatttgtaaaatatgacaa

SEQ ID NO: 69882 - DNA, 1458 bp, Cannabis sativa
  modified_base (1433)..(1433): a, c, t, g, unknown or other
ttattattattattattttgaactttaattgacaatgatattatgaattataaatttataagcatgtacatggacactcttactaaatattaaaggaaaattgtgaagcatgaatttggactcatgcatagctaataattcaacattttgtttttaaagaaactaataattcaaacattgattaattaacaaatgaattattttttctgacaaaaaaaaataatatcgagtttttgttctgataatacgccagatttttgttccatatcttatacgctcacatttagttcattataatatacttttacatgagatcagttgcaatttgaaactcatgtctatccacataaataaataaataaataaataaatcgataattggaatattcaccaacacttcatatacattttattttattgaagagtatagcagccagataatataagttgtagcattcatactatactaaagaagttctataatacattttatatatataattaattaaacttaactacaatcaacatatatagattttataatgtacattggcagtacaagttggagtgcatttggtatctaccaattcaaaatatcaaattgatcaatagtttatggacattcagtatctcacaaatatataccacaccaaaaggccatcaatcttaacaataagcataaaataaataaattataaaattatttgctataggctaaaaataaaaatatatataaaattttagtattatttttgtttttactatagggacatgtatatttcattcaatctttactagatgacaacctaacattttgtttatagatttgggtaggtacaatagattaatttagatttatgttcaaaaaattgttgattattcaaaacaaaattgaaaaataaactatttaatttgattatataatttcatgtaagtaaaatggtaaaatttaaagccaaaatgatgccgcacacgcatataatatgtagcttcagttttaaccaataaataaatatataattaaaataaaaaaaaattacacaaacaccacttacatactttcaactcagaatttatgcttcttgggatcattgaaacttttgtgtgatacaaccttcaggcaaccacgcagcaatccaatacaatcgaaatgaaatccaacgagaaagagaaccaacattaattccggcgacttcacctgagaagacgattagaattaatcaaaacagggactttcgaattcatgaaaaaaaaaatgcagaaaaactactacaaaactaaaattcaactagaaatccagtttaattcgcataaaattaatgtcataacttcaattttcagatctatgaaacgcagatctcaaaaagttgaactggaattttcaaacaatttaactcaagtataatccaaaaaaaaaaaattacatcaatacnatagtaaaatatttatcctggtgta

SEQ ID NO: 69883 - DNA, 2016 bp, Cannabis sativa
attgggatccctgcagaggaaatagcaagtggtttgtcagatatatctaccatctacgaatcaatggatgagcttgagcaagcactgaaattgctagagaaggcattgaagatatacaatgatgctcctggtcagcagagcacaatagctggaatcgaagcccagatgggagtcttgcactacatgttgggaaactattcagaatcttacaactctttcaagagcgcaatatcaaaactccgtgcaagtggagacaagaaatctgctttctttggaattgctcttaaccaaatgggacttgcttgtgtacagcgctatgctatcaacgaggctctggagctatttgaggaagccagaagtgttttggaacaagagtgtggaccatatcaccctgacacactcggggtatatagcaatcttgctggaacttatgatgcagttgggaggtatgcctactctttatctaaattcgtccattactgcatcatcatattcatacatgctagtttgatataatttagctgtacatgcacacaaagctacttgttaaccatattttacttggccatttaacttgaacataatgagggttgaaagaaacacaaagtcagaaatgaagattcaaatgcggaaatgaaaatgttcaaagtcattgcttcatttttgtttcggtttgctgctttcgtatttcttacttaggttggatgacgcaattgaaatcttggagcatgttgttagcatgagggaagagaaactgggaacagcaaatcctgacgtggacgatgagaaaagaagattagcggagttactgaaagaagcaggccgagttcgaagcagaaaaggcagatcactagagaaccttcttgatacaaactcacatggggtaaaagataatggcgttcatgtgtgaaatataagatcttcatgaacaaatgtttttgtattatattaacatattcatggaccaaagaagataaccaaaaagaaaaaacaagcaaagataacacgacccaaaagaatgaagaaacactttatgctcatcattcatgttatggaagatggaaacaaaataacccaagatgaagctgggttttgtccgtacaattatttatactagatacaaaatcattttgttaggtcatcaagtgattgtactaaacttggttaccttttattttcccactatcattttgtattttttgactgttgaagaatcatagatttgttgatactgtttatcaatttgaagattgttttgtatttatatcaaaccatatttgttgaaatatcaatttgtttcattgcattggtttgacattattatatatatgacaactatgttatcatattttgaatgaatatttatgaaacttaaaagtagtggtggtgaccatgttacataccaataattgaataataagaattataaagattgtaggttttgttggtcagttgttgtcctagtctgtacaagattttctctgattttaattatttatattctcactctgtcaaccttctgacttctgagaaattaatggtggagggatttagaaaactatgttggagacatattaaaatcccaacaaatgacaaaacctccaacaaccatactcgtactcatctttcttcctatattctcggaaaaaactgattctgaatcttgtttgtcctttagattcatctaaagtagaacagtgcaccatgtttggtaaaggaattttcggaaagaaggggatttttcctagagaattttgttaaggtgatgtttggtaatttgattaatgctatctgtgattaaaatctatgtaaaagaaaaaaaaaatgtacgtatttgttctacattatttgtgtgtaagtgatttgtaaaatttctattacactcatagttattaagtcttaattctatgatagaatttttgtatttggatcattattatatgtattgttaacaacctaattactagtgatatcattcagttatattttctcttgtattagttgttaattctttct

SEQ ID NO: 69884 - DNA, 3033 bp, Cannabis sativa
ttatttagatgttacttttatgttacttttatgtaatttttctgttgtttttgtgttgtttttataaaaaactataaaaatatataaaaaaaaataattctataaacatatacgtgtaattttttctacaaaatatagtgtcttatgtaattattcctatataatatatatcctaggactggcctaagaatttcggggggcttaattagaacaaaagtttaaaattaggccctttaaataaaacaaaatttgtgtgcattactaactttttttagatacgttctatcttttttttttctaagacacgttctaaatgtgcattacaattctattaccaactttttttaagaaaaaaaaaattctaaaactttcaattataaactttttatttacgtatatataacaaaaaaaaaaaaataggtcattacataataagaaaataaataaaattgagcctcataaaatggaggccttatgcaatgattcaagctgttgcaaaatgcttatataaaaattattatcaaatttcgtgataaattaacgttcttaattggttaaaaaaaaaaattcagagcatatttggagctgggagtgatacatcatcagtaactatggagttggctatggcagaaatgatgagaaatccaagagtgatgaaaaaagctcaagacgaggttagagaagtctttgccgaaaaagggtttgtggatgaatcttcaatcaatgagatgacatacttaaaatcagttgtgaaagaaactttaaggttgcatcccccagctgccatgttatttccaagagaaagtagagaaaagtgtgatattaatggttatgaaattcctatgaaaactaagatacttgtaaatgcatgggcaattggaagagatcctaaatattggattgaacctgagagttttatgccagagaggtttcttgaaagctctattgattttaagggaaataattttgagtttatcccattcggcgctggaaggagaatatgtcccggaatatcatttgctctcaccagtattgagcttcctctagcatttttgctatatcatttcgattggaaacttcccaatggaatgaaacctggagagttggacatgacagagagatttggtattacagtctgtagaaagaaggatttgtacttgattccttctaaatatgaaccaccttctatggccaaagcaatgaatataaagtagttttcgttttcaaattatattatatcaataaatatttactaaataaacgtaaacgtttgtatatcaagtaactttgtaatataaattagcaaatctgtatcactttcaaataattatatcaataaataatatttactaaatagaagtactagatatacgtttttcacttattattctttattctctgctttcatagttgctgcccatatcaaacatgaagctctggccccaaaaaccccaaaattacactacatacaaaaaactgctacttttagtgatgcagaagcttaaccaagcttgaagaaggtaaaacctgatggtatgaaccagagagaaaaccagaagcaaaacagaacaaatggcagagaaaagctcaaaaaaatagtattgagctgagagctttatttatagggatcattagtacaaggaatatgttacagaaagaaaagagttagttgacaactaactgttacaacagaaataactaatcaagaaaagtaaagctaattaactaattctttatgtgtaacatcccccctcaaacgaaaaggggtgaaatccatttgaagtttgctcctgagatactcaaacctttctgttgagagagctttagtgagcagatcggccacctgatccacagcaggaacgtatctgacagacaaagtttgagcaagaatttgatcccttacaaaatgtaaatcgatttcaatgtgttttgaccttgcatggaagacaggatttgcagcaatggcagatgcactttgattgtctacccaaattactggtggatgagtgagagagacttgaagttcagatagaagattgacaatccatttaatctctgctgccgtgtttgctaaagctctgaattcactttcagagcttgatcttgccacaacctgctgctttttggcagaccaagagatgatgtttcctccaagataaacaacatagccccccgttgatctacgatcatccacacagctggcccaatcggcatcggagtaagcataaaggtccatagtagtggctggtttgagtaataaaccatagctgagagttcctttaagatatctaagaagtttcttccaagcttcccaatgagtaattgtatctacaaagttggcttttcccaacggttaataagggggtaaattatgaaaaccgttggaaaaggtaaagggagatgtttcccaacggtttagaaccgaagcaaagaaaccgttgagaaaaacaaatgccaatggtggagaaccgtgggcaatactaagtgacattttttttaaaaaaaaaaaaaacagtaaatgccaatagtttataactgttgggaatacttagtaaccgttgggaatactaagtatacccaacgatttataattgttgggaatagttactattcctaaaagtgataaaatattggaaaatattcttttttaacataccaaaaaaaagttttagatttaaaaaaatactttttttttttgcttaataaaaaaattgtattttataaaaaaatactaaaaaaattttcaaatttaaaaaaagaaaattgtacattttctcttaataaaacaaatttgtatttcataaaataaaataccaaaaaaagtttcaaatttaaaaaataaaaaaaatatatttttttttttgcttaataaatttataatttgagaataaatagaatttatatatttttaattagatgatagttttagaaattagttgtatttaaaaatttattgtgaaaattatttaaaaaaattattgtaaaagagaaaaattattggaggactaaaaattattgtacaatatttaaagt

SEQ ID NO: 69885 - DNA, 3362 bp, Cannabis sativa
tttgtcttaaattaactaacaaatatgtaataactagaaatttctagaagtttagaggaggtgatgacttctaacattataatctactacattagttggtcgtttaacaaaaataatagaaatatggatgcatctttgtttgaggggagcggtcctatggcgtgaggatggtgactagagattctcgaggtatacttttagaaggttgcactatgcacttcttcgtgtcggtggagcttgtgctagtcgaggccataggagtttgagaagccttaggctggattaatgacaaacaatggcagcaggtttgcttggagaagaactgcttttgtgttgtgcaagttttggggagttcatttaatatgttatctttgtgtggttatcttattcaatattgtaagaatttgcttgctcgtttgagtaatatttcagttggtagatttttagcactagtaatcatataataaaaatactaagagcactcacatcagattctctattctatattttaaaatacttcactaaaactttactttctttattttacattacaccatacatctgtttctttatttttttttctctacattcatttcaattatttttattttaatgactcctttatattaaatgttgctatctaatgaaatatttaatttaatagtttttttattattatttttctattaaagttaacgattaaagctcacacctttaaatcaatcaattaattattatttttttgaaaaaaaaatatttatatttaatttatttattaaaatatctttaataattatttaaaagtataaaaaaaaatacttattttttttaaataaatcttaatttaaatttgaattagataactgataaatttattagttatattgattaaaatatataaatttatttgcttattttatttagatattataaataaatttaaaactagattaaaattatatatattaaaagtataattaaattgtatatatttaatttttattattattatttaaattaataattaaataatagcaattactaatacttagtatataaaatacatatcgataaagtttgaataaaacattatttgaagaataaataattctttctatatgtacagaagtattgtagtatactttaaaatttgagctaaaagagctcatctttttttggaagaacaaacagctcattaaagagaaggatagatgggaatcacagggggaattccctccccttggaaacattcagcaccattgctagaaattatagcaagttttgccaaaccatcaacaaaagacaaaccattacgattaacaaagaaaaactgacaaatagaaaagttcttgactaaatctaaaatagcaatagatattagattggtaagcttccaattaggaatgtattttctttgctccaaagcttgagtagccatcttgcaaatctgataaaacatgcacctcttgccaattctcatgaccagcccacgagagagccatataaactgcttttgtctctgcttcgaccgccgagtaagctttagctctttccatcttgacagcccaactaccacaagacaaattgaccattacagctgctaaacctgcatccacttctaaccaagaagcatctgtcatcaaaatgatattagcagagtccaccttccttcgcatgccttcaggaatcgacataacatattccttagccccctcagcattggaaacttcattccagagatcagatattttcttttgaagaaggggaaagaaaatattacttcccttaaagagcttatcattcctcacattccagacattttggaataaacatcccaagtaattgataagagtggatctgtcactaccagggaagattgacaataaattctgaacatattccttcatgttgttacctggaatgttagtgcagaagattggtatatcccccattatccaaagaatcttaaccacactacactcccagaaaatatgtaagcagctttccaatccttcaccacaaaaaaggcactctttatcaagagagaaaggtaatttatctcttgtaggaaggacttcattgagtaccctccacataaacatagtcatcttagggtgaacatccgatttccaaatccacttccagattttacttcttggactgaatctaaagctttgatctgcacagtaggcactctgcaacgtaaaaatcccatttaagttattcctccaaacaacctgatcatggtggcttagaggaattctcggtatctctactattctctgaccgagttcttccccaaagatttggaagactatttctttgttccaaacattatcacaagatatatcagcaattgttcttacagtaaacaaacgtctgttcaaaccttccattagatcccgaaactcttcataactcaaccacggaatccatggttgaatccacatatcactagaatctcctctagctgtcaccaccattaaaaccctgaagcacaacacctctaacttctaacaaacttttccaaagatacgaatcattactctttggagagactgaccaaaaattttgctgattacagtatttacttagcaaacagttaacctatggcttatcctcttttcgacccaaagaccaaaccagtttcgctagcaaggctttattcatatcttcaaatcgtttcaaaccaagccccccagaattctttggttggcaaatcttgtcccacgatctcaaagccagaaaccgattcttttccaagtgccccagccaccaatatcttctaactaacacatccaaatctcgacatattgaaattgggaccttgttggtagacatgttgtaaacaggaagggaagcggccacagatttgattagcaccaccctcgccgcgtacgataaaagcttcatcttccacccttccaatcgtttctgcatattgtccttcagcctttgataatcttccttcttcctcctactgaaaacaaatgggttgccgagatgtcgttcatcccccttgatctttgaaacttccagagcagccaagacttcttccattctttcctttgataaattattggaaaatagcacactagatttaactttactacatcattgacctgaccaagcttcatataaggaaaagtaacacgaatctcatttatccgtctcatacacctactgtgcttctttagtccctttctctttattctgtaatagcagtgtttagtttgttagttggcttaactattttatcagttaaccgtttagttagttggttgttacaacatccattaggggtgttcattggatcacatccaatggatttggacccatccaatccaatccaattatttatt

SEQ ID NO: 69886 - DNA, 1010 bp, Cannabis sativa
attactccaaatttggtcatgatttgcttgtattatataataaatttctcaagtcgtgatccctcttctgtttttcttttttgattttgacttcaatgtgttgtgtgcttcttcacatgtgtttttttgtgctatttttttcgattctttaagagaattatcctacattattcaaatttcaaagttactttaattgtctttatgtattcgacattattcaaagttattttaatttagtgttcttcatgttcttcttccgggggaagcagagcgatacaaagcaaccataactagaacaagatcttgttcagatctaacaaaacaaaatttaacaaccataaatagaacaagattttgttcatgatattacagagaaataatttaatacatatataaaattatctcttatgcgtgtatttagcttctatcaacacttgttttttctagattatatctcttgcacgcattaaagaggatgtgtagtttcctttttcaatggtacaaatacaattacacttctgtatctcaagccgtgagagtgtaattatttatgtgaattgaagaacacaatgaatgtgtttttcacaataggggtgacacaaaggaaaagagagagaagggttagggttgggcctctatttatagaagaacattgataaggaccaagtaacaccaatacttagggttgggcttcacagtccatggactgtgctagggcgctgcctaacattgattgtggtggtctttttcttttatgcagtccaatactacattattttctcctttttatttataccatctattatttctcttaaaatataaattgtataaataattaattttctcaaaattaattctttataaaatatcactaattttttttttatatatatttcattattttagaaaccatttttctcaaaaaaattatttttttataatttatttaaaataaaataaatttaccattttattcttttttcgtaaataacagtcattattattttttt

SEQ ID NO: 69887 - DNA, 2082 bp, Cannabis sativa
ttcatgtgtacactcaataagtgtaacatctgagacatcataacatggattaggaaaaagtgtttttcccgaggcatttcctgttagggcatcttaatatagaatgcttcttaatttacttgcaggagagttggcttcctacattgagaaaccttgttgctcagattaatgagacattcggtcgtaacttcaaagaaatggctgttgcgggcgaagtttctttgggtatacattgtttagttcttagttaaatatttattaattgagtttccttttgcgcactaacctctttatttaatttcatcttcttcttcttcccagaggagcatggcatggactatgaccaatttggtatactgataaaagtaaaattcaggtagcctgcaaatttgaagttttgtatacatgcaatcatgggtataatgaaaacccttttatatttgtgtcttccttgcttacaaatttcttattagttgacatattcgttcggttttgtgacaacagacaaacgggagagcttaaagtcctaagcgcacaccatcagtcgggaggggtatgcttctgactaaatgttgggaattttattaatgaaatgatagcgcttaatctcactgtaactattcaaatgtccttttcaggaacgctctgtttcaactatactctatcttgtttctctacaagaccttacacattgcccctttagggtggttgacgagataaatcaaggttggtttatgcatgtagtaagtaatattgtcacattttcatatacacataaccacatataacactgatttacttcttttacagggatggatcccattaatgaaagaaagatgttccagcagttagttagggctgcaagccagccaaatacgccacagtaagtatcaattacaatatcaagacatagaataaatttaggaaatataatattttagcactatactatataatattttgtaagttgtcaaatcaatttacaattgtatctttccacgaattttgatataatttttgtttttttttctttacaaaaattgctgagaattttgaactgatttaccatattgtaatgtattaaaatggtgttaattaagcaatagaatattgtattggtttaagaacaaatgataaagtactaaaacagtatatccatttacatatatgttgttggacatacttgtcttagtttttattgccatgaactttgagttgaacttgtgtaatgacgattattcaggtgtttcttgcttacccccaagttgcttccggagctagagtacagtgaagcatgcagtattctaaatataatgaatggtccctggattgaacagcctgctgaaggtactaatgcctcactcttaactctaatttttatatataaatatgggaaaattctaaaaacatttatagtacgatctacattgtagtcatagtagacattaataatttaatttaactgtatagaaaacaggttcaaactcagttgcacgtgtgttctacaattaactattttgaataatattttcgatattgtaaattattcaaataaaattttattataactataatgtagactagtatatgaaaaaaattaggattataatttctctaaatgtagactataggctaataacttagctatatttgtttatatactcagtttggagtggtggagaatgctggaggaatgtgaccggcgttaaggcgcagtaggaaaatgttaatatcgaaacttcttactcccttgttcttgtacttctctactgataattgtcttagaacataattttgatacaagaatgtatgtgaaatcatttcttggccttttttgtaagtaaccacaacagggttgattgattcaaccaaacttatcattgtcattattttgtacagaaacttcaagtttagtattctgttagtttatcaaagcattgagtattaaaattttaactattttcacttaattatggatcatatatgtatgtacaatgttaccattatagataagccttttagcatttctcataagctaataatagaaaaaatccaaatcagcattattcccaaacttggatt

SEQ ID NO: 69888 - DNA, 6070 bp, Cannabis sativa
  modified_base (88)..(100): a, c, t, g, unknown or other
acttgtgagtagatctaagatcttcgtaaaataatttccaacaggaatgataagagaaaatactaaaaaaattcaatcctaaataatnnnnnnnnnnnnnaacaaactgatatcagtgtcccgaaaggcaatggttgattcttcatatccactgagatgtttgggtcgacctagaaaacagtagtggctagattcatgttgtttgtccagatggcaagattggccacatctgtagggttcgttcaaattccagttgtgattggaacacaaacatcaggatctgccatcatagggtcgcaagggagacttgatgaggaagaggcttgagctaaagttctcctcgtgttaagcatgatgtttgataagataaattacgaactcactcttagtgaaagcaccaaactgctgacctcaaattttgccaactgatagtggagtcgtatttaatacagatgcttgtcacgtgttaaaaaaatagaacaataaagtaaatagacacatgattttatagaggttttggcccccttagttaacgagtaatgaccaactccccttttagttgtattgatacaggaagataattctacttagatcactatagtgatgggatctaaagttactctctaaacgttagaatgtaggaattagagttaacaaatctcaagtatgagtatcgcagtgggcttgtgtgggagagattagttattagacttagagctagggtttgcaactcaatgacttatgacttagaactagcacttatggttttagggttttggttaaggctctttatatagagcttatacccttcaaatccttcagaaataggtaaaataagctattatttacatattaaattagtaaaacacaaatgacaaaaatgccccttgaaaatagatattttcccactattttctgggctgttaaggcccaatccatggtgtggcttgttgtccatgtatgaagctgcgcaccaaagtcctgccaagccaaggcaaccttgccatgcacctacaaaatgcatgttggccaggcatgggatgtgtagaacctactcgacctatgctagccataggcctggccagagccagtcagccaacccccttgaggtggctggttgtcacttcgttatctcgcttgagtatttgggcttctaattggttaaagtgctaagtatatgacttagcctccttgttagcgagttgtactaccacgtggcactactgttggccacatagacatgccatgtgtggtgggtaaaaatattgataacaaggtccaaatagtaaagaactaatataaacaacttaaaaaccagttcataaaactataatgctactaaaaacaatgaaaatactaaaataatattcaaactcgagcattgcatgaagctctgttgtggcttaagccacaacagtttgaataatggtgaggttctacaactttatcactactagatggatatcgattactctatattcttcccgagttgctcttcctttgatgacctacggttttcttctccactggtaccccaactctcatgttctacatgtgttctagaagcacccaatcgtcctccttgccaatgaactctataaccgttaaacaaatgtaaccattacattggacacttctgaacctaccatccttgtgtggccctaccaaatcatccccaaaagtaattacaaaaggggtagcacacttactttccttttcgagacagttagtaaaccaactttgtagtgtgaaccttatgaactcaactagagtagttattggatatttccttaattctttcatcacgttgttgaggctttcaacaacattggttgtcattatggtgtatctatcgcctagacaataaggatgcgcccacttttccaatcctatactctcaacgtatgaggtgatggtatgatccatccatataagtacatgaaaatgcctatcatatttgctttttgaccatgcataaacaaccaaccgtatttacttgtgacatacatcagtcttgaacttgtgggcaacattcatagtaatatgtttatagcatgcacattggcatgcttcggggaaaacgacctcgacaacacgttcaatgtttagatgcctatctgatacaaatactaagttttcaacctcctcaatcgcttctcttaacttctacaagaaatacttcaaagagtcatgattctcaatgtcaacaattacataggcaatcagaaacaattggttgtttgcatcgtatgctacaacaactaacattgtcccacaatactttctcttcaagaacgtgttgtcaatactaatcacatgacaacaaaacttaaatctcctcttccaacatctagtgactagaatcaatacttgaacttgttgttctctatgataatgtatgtaatagtacctggattcttctgttccaccatgtacaagtaacaagataactacgtataagattttgctagcgtacccctaacatatgtaagatccatgccttctcataactaattaattttatttccatattttttttaaaataaatctctatgtatttcttttgccttacacttagttctatctgatgtgtacttctccttaataaggtggccaacaacccatagtgctgcttgatggttatcaacatgtttaaaatccgggatgtgtcttcgttgtggaatagagtgacctcaaaaattttgcaacgtgcattcttcctgcctttcaatctccatttgaaatttaaatccttgcaaattacattaaacacatcggtgccaaatatcctcacaatgaactcaaaattcattttcaatgcaaaccttcccactacatttttcaatttagtcttgtttgtgtgcaacttgccaccgtgtatttcccctaaaggtgtaccacttagagaagttgtataaaaattacttttctctttgtctttccttgtccacacaagagatttgaattttgtacaaacttcaaaatctgatggtacactactacacggatgacctggcctactgctactagtgtctgatgtttggtgattttcactacgataggttcttctttcttgctctgcactatggttcctttgaggtagttctaacctcaaattaggtatctctatagcttcatcaacttgaaactccatatcaccatcctcgttcaaatctaccataggatcattgttgtaaaatggagcagtaaagagatcaaatacattatcaaccttgtgctcatttatattagtaggggcgtactgattcaactctaccgcatgatttatttctaggacaaaacccccaacaacgctttgtggggcgacaattggcagagtaggccctaaatttgcatgcctcttaaccttagttacacatagtggcagctagttctgcactcatttttgccttcattcttaagaacaatcttacttgactatcttcactaaaacctccaacattatcatattacatttcatgttcatgtaacacacctctattttccattcatacacaaaaagggtctatatccaactttcatagaaaatttcgtgcatcttttgtaaagtagtgtcaacctcaaacatcagcattttacttttcggttattgaatatccagttgaaaccttcaagtacccaagcttatacgtacaaaaacaaatacaatggaatctacaaaaaaatggaaaaaaattaggtaaggaaaaaatttgtcgacaaatgtcatacgagatattcaccaaacactatttctaaaactatcgatgtcgcaacatgtcgtgaaccatgtcgaaaactttattgcaacaaattgctactagttgctaaatttcattctctacttcaccaaacactatttgtaaaactgtcgacacatattgcaaacaatatcgatagacgtcgcaaaatcgtaagtagataacaaatatttcttattgcattaaatttcgtggctacatgtcattaaaagtcatccttaatctccaacatactctcatgttgccagatattaataatggcatcgctaaatatcgttaaaactcaaaaactaaaaaaatagaaaatgcagaatgtaagtagttcaagttttaggaactaaacaaccaaatcaaaagaaggatatgtccagatctattcatatcaacctaaattcaactcaatgtaactaaatctaacaataattactaaataaattacatacccattattttttttcaaaaattatgttggtgagagtttgagttgctcctacacacttggttgtcaagctaagttgatggaatcggagaaagggtgattcggcaaagggtgctctggcaaagggtatgtgtgtttgattttctagaaagagagagacgataatgagagagggaatagaggggaaggggtttagttatattatttgaggggtatatttggtactaataaaaaaggtagtatatgttagggtatcaacccaagtctcacattggaataatagagaagagttgtcttagatataagtcttccacctactccattactatgaggccttcgggaaggtgcccaaaaacgaaatcgtgagggcttaggcccaaagcgtataatattatactaatgtgggagtcaaggtgaggtgacagcccgacaaagtggaagaacgagacctaacaagtggtattagagccaatggtttgggatagtgggctgcattagcgatgtgtgagagaagcccttattgtgatgacctagcgattgaagatctatatggtgtcttgtatcgaaactctatctgatattgtggtggtcaggcgacgtatcctgttgatattacggcaatataagatggagatctatgttaatacctttattgaaagtcttcctaacaaagatgatggtcaggcggcggattttgttggtgatagtggcggcaaaaagtggtttccctggagcggaggccacgagtatgtggtacttactacttggtttgaggggtggatcgctagggtatcaaccccagtgccacattagaataataggcaagagttgtcttggatgagtcttctacctactccattagtatgacaccttttggaaaggagctcaaaaataaaattatgagggcttaggtccaacgaacaatatatattatactaatatggaagtcaacctgagatgtggatcaaagaaggaaacttaatagtatattttgtttgatgtttaataaggtatatatttgaggagtataattttcggttgttattagaccatggaacacatttaattaaccatggattttcaaattaccttcatataattctaaagtaagaatcctatatacagtgtaggttaacaaataaagaaagaaaaacacaacttgagtacggaaaagtatttaaaagggcctttaatttattactctggtttaatcaacatcaattcaggaatggattgattgatacagaatcgtgagtagctgagtagattttatcaggcaaacagacacaaataaagtgatcagtatttatttgtgtgcatcatgttaattaatcgtgttcaataaacactagctaattaataattaatatatttgttagcttaattaatttttaatatactagtgctactgattcagtactaatagtttgttctggagtttaataaaatattgttattattcagatatttaataaggatcaaatcaatgtcttatcgtcgtataagatctaggtaatttgtttatatcccgagtctattggaaagccccatttgaaacataatataaatgaatcaataatttgtgcagatttatatatatatataatatatgtaaacgaagtgataacaaccgaagattatatatatatatatatatatatatatatatttttatggaatggtatagcaccacatatatggatctatgatttagttggaaacattggacactttcatgaaaatgaaattactcaatatttcgtttttacttaaattgtacataattaaatttattatttccatacaactatattgattaatatatatttatttataaatgagcataattttcattatctaatatatatat

SEQ ID NO: 69889 - DNA, 1951 bp, Cannabis sativa
agagagagaagaagctagaaaacctaaatgtctcatcttctctcttcttttcactttgaattttcgaaaaatcctatgccatagaatttcaaaaatttaatttctctctctcaaagtatgttccaaaggtgagttgagtatcaccccccacactattcaaggtgatactcagaccttttgtagaagattatgaaggaaattcaagttcagtacttgttactactctgcaatagaaatgaataagggttagagtactaaacgaaatgagacattatattcttccgctgcaactaatgtaaggataatatctaatctcttatgtatttatttaccgttttagctttattcatatttaggatgtttgattaatagaatataattaaatatacatgttagtaaattaagattttgataaaataagtttcaacaataatagaagaactaggtgttgattaaggttcttaatatccaaagcaatataaaaatatgtcttaataacatacataaaagcgctataaaatgcattaatatgaaagtgtaaagaaatacttacattggttgttggtgctataactggcaatggtggactctgatcttcagggaaagagtgaattaaggggattgttatttctcctccctcatccaaatagctaaaattttcctcaacaatatccatgatgtcctcctagtgagaaacatgttctcgatcatccatgttatcatcgtgatcatcatcatgtaattcatcatcttgtttatcatcatcctcaaaatctaatgatatctctactgtctcagatacactattaccagattgcagactacactcacaagttcaacttcatcattctgtgctagatcaccccacttcacaaacttgttgaaaaaataatcatttcataatgcccttgtggacaactacatatgcagttaaatcacaatctgatgccaggtcctccaacttttcaactgttgtttcaggattatgcctaacaactccatcaactgtccactccactgcaaatgttggatctggctagaccatatatatgtttgtcttcctgtaacttcgagaccttagatcttccaaaattaaattaattttaggctcttcaaccaccatggaacccatatttaagtgtttcccttttggcttaaaaagaaaacaaaaaggaatctgtatcccaactctctaactatttcttccagcaccaatctagtgaaacttactgtagttgtgggagcatctacttcgagtctgcaacaatatggccttttgaagcctgagaatagaggtttgcctaagaatggtgtgggattgttcaactgggaatggtggttcgactctttgacttcgttgacaatggaggttcgaattattcgtagttcgaacagtttgtaaaactttttttagagagattttctaatataaatttccttttcagtattttatattgtttttaatttaattttgatttaattatttttcattcaaattaagtagcatttagttggaggtaatacaatagactaaaataaaaaagaaacaattttcattccattcctttaattgcattttaaagtattaaaatatcattccaatagaatgatcttcctactatttttagtagaatgactattccattttaaaaagaaggaaagatcactctaatacaaaattttagaaaaattaataatttttcatacattttaaattctatttcattttattctttcttattccaactcatatatttatatctctaccataattttttttttcttgacatggcctttaggatagtggcctgacagctaaaatataaatccacgtaggcattaacaaggtcagatagacaggaaagtgattttgttaacagttgttcagtaaatttgaccataaaaaaattaattgtagtgaaaaagcattaagggtcaacagatgttgaaa

SEQ ID NO: 69890 - DNA, 2073 bp, Cannabis sativa
aaacctatatactataataagagcacaacttgatagtataaaaaattaatgaacaaaaatactaattttcctaaattcaaaccctaactaaaatccctaaaagaaaattctaataagattctttatgctccatagtaacatccgattgattgaaacaacttatgtattaaacatgtaaaaatcaattcatcacattcatacatcacatatccgatattcacaatatattatcaaacgactttaagaaagaaaaaagtattaattaaattgacatgtttaccaatcgtgatacatgtatatcccttaactaaattattattgttttcccaacaattttttttatttatttgagttgttgaacacaatttaatacatttttttttttttttaattttaacacccaaaatcttgatttttccaaagtagttacttagtctactaaaaagaacaaaacaaaacaattccatatattaatcaaacaaagtgactaactttggggcaatctaagactaagaaccaaagaatatcttgttaataacttaaccatttcacccatcaaaatttctctcctaacattttggctaaaagagatttatttcactttaaacaaaataaataataaaacccactaaaaaataggctaaaacttctgcaatattacccaaaaaaaaatgaataactaagtccaaattaccataataaaccatttagtaaaaaaaaagaaattaccataataaaccataaaccccacatgacacgccttcttcaacgcttaaatgccgcgtagcacgatagccgacaactaactttttgtctgtcattacaaccaaaaaaacaaataaaaatcccattttcctttttcctaagttttaatttttttaaaaaaaattgaatctttttttattatttttcttttatgtatatataaattcaaaacccttgtgagttttagctttgtccacctttttctttgccatagagccaagttttgtgaggtgtgaacaaaacccaaacatggcctcaggtgcttcggctgatgggttcttcaggtgtttctacgaagggtgtatctcaggctgtgacacggccattgaacgccgtccgtaccatcggaattgtagctgtgctttacacgaatctagcaagaataagaagaaaaaccattgttctcatggtggtttgcctaaggtttcttacccaataagaagggcttggagtgaagggtctttggctttggtggctgcggctgctgcttcatcttcagctcagtcttctccgtcttcttcttcttcttcggtggccatggttggtggtggaggaattggaaggaggaattctcaatctagtctttgtgatttggaagagtaaaaatcactagtacaaaatataataataataataacagggtcttcttcttcttcttcttctttttcttaaaggttggatctttttctggtttttttagagtattatgatttgatttgtttattttgtttgaataacaagaacccaaataagatttggaagaaattttgtgatctctaatgtttttttttttgatctggagagattgagggaaaagggtgtttggataggtttctggatctggatcaaaaaaaaaaagtgtaattgatggaatgatgttactgaaatcctctcaattgtatttactgtaaatatggttccagttctatatgttgatcgatcttcctttcattttgagaaatataatgaaaattttcttgtagtttctgacaattaattattagtaccaaaatatcttgtattgtttatgtataataatttacagagttgtaaaattttgtaaagatccattttttcactgtttgacatttttagtactaatttaaagaaatggggtatctatgttggggtgataaaaataattaaaaactatttattttgtcatcatcttatgccattttaataaaacaaagatattagtttaatacaaattaagagtattttccaagatcatgggctaccactgtaaattttctaaagatcatgggaggcactgtttaagcgtagatggactaatttggtcggcta

SEQ ID NO: 69891 - DNA, 1684 bp, Cannabis sativa
ttttattttgactcacaatttgttgtagagaagtagagaaaactgctacacaagcacataaaaggcctttggcattaattctgacatctgtaactgtacagactcctacacctataaccacaactgctacagccattttcactttggttgagtaatgttttccatttagaatccactccattatgcacacaacaggaatcatgctcagctttgatatctacaccagtgaacaagatcagaaaaaagaaagcatactaatgttttcaagacaagaacaaaaaataaaagggggtgttgttgtatctatggacctgataaaatccaactgagttaagcatgagactgaagttcatgccagcaattgatgcattagcaacaaccgaaaacaagacgagttcccataagggaatggcatgctttgatgaagagtaaccagcagcatttgacaccaaaccaaccaaggatgtcacagtgaaatgaaagccagttagagttgttgctgtacatcataataagataaccaaaatggttaaaatctatgcatatatgaaataaattagtacactaaatgatcaagaagaagaagaagaactgaccgaaaccgaaagcaaaaccttgaggagccataagctctttgttggccatgatgattccaacagagcttaccacattcatagcccatgctccaaagttacacacttcaaacttattagattttttattctcacccttgttgttattgttagtacacatattgtctactttctctacctctgtgataagtttaaacaaagtgttatctttatatattatatatgggatataagagagggagaagaagctaatcaaaagggggggagagaattaaatcaatctgtgtcaacctgtagtgtgatcgagttttgttaacatatataaacttaaacaaaaagatgctaactttacattcacatacaaacaataaaaaaaggacaagagagaaagccaagtgacagattttgctggcttcatattcttttctttcactttctgtctctttcagcaaccaccatgttactctcattctcatccccgtaaaatcatcaatgataacattacaaatgtcaatcaatatatatatatatatatatatatataaataatcaaagtactgtgaatgaaaataaaaaacaaacctttataaggtacaaagacccttatcataagaaattaaggccaaactttctattcacttttctcataaaacaatcttctctttcacaataccttacattcccatgtaaaaccctataacagcggagacactctaaatttatggcctttgcgtttaattttgaataagaatagtcaatacacatggcgttgacctaatttcgtttgttataaagatgggccagaagaaaatattaactgggcttagaagggtgagcaaggcccatgttatagtggatgatacttattttgactaagaatagtcaatacatatggcgttgtagtgcaatattaagttgggctgatgaaaatattgaactgggcttggagggtgcgccaggcccatgttgtagtgcaaaacataggcgacgcgtaaaggcccgagtagcaagctactgaatgggcctttccctttaaaaaattaatttaatatcgtgtgggccgttggcccacatatcagatattaaactga

SEQ ID NO: 69892 - DNA, 1226 bp, Cannabis sativa
tacaaatattaattattatgtgtttagggaaaaaaatttaaccaaatataagcataaaaaaatcaattttttatttttttttttttaaaaaaaaataaaataaaatgcatacaattttctaagaaatttatacatacatgcagtaagatttttatatattttttgatcgatcaaagaagaaaaaaatattcattaatcaccaactgaagaagtataaaaatttaattgatgttttgaatgagtaatttttttaaaaaaaatgaatacatacaataaagtaataaatatataaatgagtaagctaatacagcagggacacaaagttttgtatgaaactatcccaaaaaagttgacaaaagtagacattttagaaaagatacaacatggcttccaacctctgtttctattcaagataaaatatatcactccttccacataccggcaaattcatcagcctccaatggatactttattttgtcattttctcacttcctttcacttatggaaggattagattttgtataaaaggggaaagcaaaaaagtggaattccatttcttatttctcaattggttattggttttgtatagtagagaaacagttgacaaagtcagtcaacgtacacattttcttgcagtcctacttttcttttcttctgtccaccacagtttaaggatatggattcagtggtgtacaagacagcttctgaaggcaaaattggcgtctttaaggaaaagcgccaaatggggctatacatataaccatagtagagaaacattaacatggattacatatgaagtagacaacctacaattaaaattttccaatcctacttaatttcttttcttctccaccacaacagctccatattaattaagtttaatttgaggatatggatccagtgctgtacaaggcagcctctaatggccaaattgacccctttaaggaaaagtgcaatgaactcgatcttaccaaagtaatcacccgaagaaagaacacagttttgcatctcaatatcatttatggaaaaaccacagatgacgaaattagcttcgcaatagagatcttggatatgtgtccagcactgttgatgcaaggtgatgcaagagaggagactcccttacttatggcagcaaggtatggtcgtctctctatggttaagtttcttattgaaaaatgtgaaaacgaccaagtgatgaaatcagagatgatgaggatgaagaatat

SEQ ID NO: 69893 - DNA, 3323 bp, Cannabis sativa
  modified_base (770)..(770): a, c, t, g, unknown or other
actcagacccgaagtcgagactcgagatcaggacctggaccctaacccgggacccgaacttggaccaaaaccgagacccggacccggacccaggaccttaacactgacccaaacttggatccggatccaaacttggacctgaacccagacccgtaccaagacccgaacccggacccgaacccaggaccctaactcggacctggacccaagaccctgactcgaacccaaactcagacccggacccaacccgtagttggtgctggggtcgattttattgcaaaaatatattatctttacacaatctattaatacatgtcaataccacacatagtattgtattaaataatactaatacatagaattaaaatggacataaaattataagttaatattaaaattctttaaaaaaaaaaagagtggggtcggatcagatccaatccgaataagtctggtcggatccaatccgatccgagtacgtatctgatctagcggggcggggcaagacagatccttacatgatttggatcaggtcggatcataaccggatcagatccgacccggcctatttacactcctagaatatctatataacaatattttttattgataaataatttcattgtcctatgtaaattgttaatatgttataattatatatgtgtattctaagtttattgggactacaagtatatttcaatttttttattatatttttttttcttcactaaattccaataatttatatggaaattattttatatattattttnttaattttttttttaaaatttatagtttacatttttaaagtagtttctcaggtggtttctatgtaggttgctatacgatttttagttgtgatttaggttgctcccctagttgcaatatgaatttttatgtaaaattctgtaaaaatacaaaaaaagaaaaaactattatgaagtgtaaaaaaaaaataaaaaaaaaaactccttatttatatatagaaaattatttcatggaataatataaaattatatatatatggaagagattttaatagaatattaattaaaaataaatcataaattatttgtaatttaatactaattttattttatttattaatatattttgtttctttataaataataattaagattaattttttttgacgaaataattgaaattagttattaaacaaaaaaccaaaaaaaattataatatattctcacaatattcactatttctctctttaattattttgaattttccaagtgcatattaattacaatatatatatatctcatgaggacaaatccacatgacacaagaagtggccctaagaaaaccctaaaataacttggatccttatgatcatataatgaaaaagaaaattaattaatgatcaataatatatataattaataatttactttttttttcccacagattggtagaaaattaaacattataaaaacacattgactgactgatccacatatatatttatatatatatataaatattaaaatatgtgatgtgctttcatttcatcacacaaaacttggatatacttaataattacttgagagcattattaattataaattgattatgattttgaatcaataattaataattaataatttaagtttttgtacttgaatttctccaaatttgctccaattcagaagcaaaagctttctggcgaccaacaacaatagtaatgtgatcttttttgttgattactttgatatgagctcttggaattttcgcctttacattgtgactacactcgaccggtatgagctcgtcgtcctcgccatgaaacacgtggacatcgcagcttaaccggtcacgaacgacggtcagataagcgtccaatttggccgcggtcccgcaaattatattgtgaagtgtatgccatgcagcattgtgtgtgtggcaaaaaaacccttcaagcaagaatgttctcaacctgttcaaattaaaaccaaatattattattatattaaaatctaatatttaatttatttagatattttgaaataaattttttaattgtgttatattattaaatattatttttgtgcagataggagtctctatcatagatctaaattctaaggagttaataaattggacagctgccaattaagctaattaattagatgagaaaaaaataaatattaaataattaaattattcttcaatcttagtcaattcttgtctgaactatacataccaaatttttccagcattacaagaaatacataaatatatattatattaattagtacttttaaatcttagttaattgttaagtaactaatttaaaatgtttaattatatatataatagttattaaagtacaaaggaatgttcacaagaatcacaaccactcaatttattaggaaattttataatttttattattattattttttttttaaaaaaaaaagttttataaataatccaccttgtaaatgtgtctctgtctcatctcaactaatataattaacacctccaatatactaattattatgatcaagagggaccatctttaatttggatgacaattttgttgtttatactaaaaaaataaaataaataattcttaataaataaagcttcatcactactataattggtacctaaacatttaaagctattgatactaagattggtatatttctatttttaattattattgtagtttaggctttaatgatgatttttttttttaaagaaagaattgacttaaattttcaacaataataataggaaaaaatagagagtttatctaaccaaatatcataattaatgctttaaattgatgaaccgtacatcattaatagttccaatttatataaataattcttaaccatacaaaaggatacacagcttaaaaaatcactaattatatatatatttagacaaaaaaaatattaaaaagtaccaatagttaattaatattatctaacattactataatttaatatcggaatgctacataatttagttcaataagtataatagaaaatttataatcactagtaaaatgatattttattaaaaattaaggtactactaatatctaataataatgataaagagttataggagcctaataatatgtgacactccatttaaaggatgggaattagtatattctaattaccatttaggacttattttatatatatatatgtattacattatatttatactattcatataaattatatatcatattttgatttatataatattatgttattaattaagtattatttgcttgtattaaaatatatatatatttttttatttttatactttaa

SEQ ID NO: 69894 - DNA, 1709 bp, Cannabis sativa
tctttggtggaagattaagcttgttccggtgccggaaaaagtttcggtttttacagttgctaagacattggaacaaggaggaactaagttactttataggtggcaacaagttgtggacaagcttgatgagaatctcttcattagagccattatacaaacggcccccgcctccgccggcgataagagtaaaaaaactatagccaccgcttaccaaggcatgtttctcggcggcgcagataaactcatcagtgtcatggaacagagctttcccgaattgggtctgaccagaaaagactgtacggagatgagttggatcgagtctgttctctacatcgccagtttcccgagtggaacgccaccggaagttcttctccaaggaaagtcaactttcaagaactatttcaaagccaaatctgactttgtgaaagacccaattcctgaaactgggctggaaggtttgtggaagaggatgacagaggaggagtctccattaacgatttggactccttacggtggaaagatgagtaaggtttcggaatctgaaacgccatttcctcatcgaaacggcaccgtttttatgattcagtggctttcgttatggcaagatgaagagacagattcggttaagcattttgattggattaggaatgtttatagctacatggctccgtacgtgtcaaagtttccaagacaggcttatgtgaactatagagatcttgatcttgggatgaacaagaaggatgagaccaactttattgagtctggtggttttggtaataagtatttcaaggataattttgataagttggtacttgttaaaaccatggttgatcctgataatttcttcagacatgaacagagtattccaccacttccaaactcttcttctaaaaaaatgggttattgcccttcagcttgatttaagctcttttgttttgggattaattagtttgcttcatgtaattaattaatgtgtactgtacttgtttttggttataagtttatcaatgttggtatatatacattaacacatgtatggatgtattgtatgtatagttgtggttggtacatgtagagactctgatgttcattctttctttcaatacttatttactatttagtgttatcaaacacaatctaaattgaatttaacgacaccacataaaactacatgtttatgataattttcgaaaggataccactcaactcaacataaaatcaatatttattgtgtttacaagtaggtactgttaaaagatattatgagcaatcattaatcaatactcataatattatctaagttcaaatattttatttagcgcacttaatctacaattacacatacctacctctcatagaaatttcatccatttgagccattcctaatttgtggaaaatatcaactcagacacaaaattaaaggtaaaagcaacagagaaacaaatgtagaacaacccactcaatccttaccataccattacaaacccttataaaacaaaatatataatccacccttctaatcttaaggggctattggactaacaaggtataattaatagatgactatgacttaataggtcaattataattataagagtctcatgtgcctctaatataattagtaactattattgagaaatacttacttatctgttattgtatttctctagtttatttcctaggctaatctagttgtttcttttctctta

SEQ ID NO: 69895 - DNA, 2011 bp, Cannabis sativa
ttatcaaaaaaaaaaaaaaatagtttatatggtaattaataatacgtgtataataccattgtttctcctaaaaatcctctccacccttgtcttgaaattaatcaccaaaaaaaaaagactctttcaataacataaaacacccaacctcctacaatccctcactatcgatcttttctcaaataccattgtcaatcccagttgtagcttctgttttgccaaccttaattcttttttggtttgttttcacatctttctcatctgttacaatcattttcttcaaaacccagaatccaaataacattcatctcacctttttttggccactctctcttctctgtccctctttctttcttctatcatgggcaattgttgctctcaaggcaagaccaatgataatggacaggacaccattaaggcaggttcaaccccagaaaacaactcagacgacattaataataataataacaatggtcgtggaaaaaactctaataatgcagggccagctaatggtaataacaaggccaataaccaagcagcctcagcaggttcaaccaagaataattcgaagcctgccccgatcggcgcagtgttggggaggcctatggaagatgttagatcgacatacaacattggtaaggagcttgggcgtggacagtttggggtgacacatttgtgcactcacaaggtgagtggggagcaatttgcttgcaaaacaattgccaaaagaaagcttgtgaataaggaggacgttgaggatgtgaggcgagaggttcagattatgcaccatttgactggtcagcctaacattgttgagcttaaaggagcttatgaggacaagcattctgtccatttggtcatggagctgtgcgccggtggtgagcttttcgatcggattatcgctaagggacactacaccgagcgagctgctgcctctcttctcaggactattgttcagattgttcacacttgtcattccatgggagtcattcatagagatctcaagcctgagaatttccttttgcttaataaggatgagaattctcctcttaaggctacagattttggtctctctgttttttataaacaaggtttggaatttgatcattgtttcattccatttaaaacaacaacacaacaataatgtgtgtttttgtttaccattattattatgacaggagaagtgttcaaagacattgttggtagtgcatattacattgctcctgaagtcttgaagagaagatatgggccagaagttgatatatggagtgttggggtcatgttatatatccttttatgtggtgtcccacctttttgggcaggtatatgtataaaaaaaatacttgtatttgattgcttgattaatagtctagtttttcttttttaattaatatatggttttgatagaatcggaacatgggattttcaatgcaatcttgcgtggtcatattgatttcacaagtgatccatggccttcaatttcaactggagcaaaggatcttgtaaggaaaatgttgcattcagatcccaaacagagattgacagctttccaagttcttagtaagtacattagttcctctattataatgtagatggatacatatgtgtatattaaatctcctttctgcagctcatccatggattaaggaagatggtgaagcaccagatactcctcttgacaatgctgtactcaacaggctcaaacaattcaaagctatgaatcagttcaagaaagttgctttaagggtaatcataagatttatactatctaattataaatcccattattagttaaggtaatctaaatctaatgtcataatctctatacatataggttattgccgggtgtttatcagaagaggaaattatgggattgaaacaaatgtttaaaggaatggatactgacaatagtgggacaataacacttgaggagctcaagcatggattagccaaacaaggaacaaagctttctgaagttgaagttaaacaattaatggaagctgtaataatcctc

SEQ ID NO: 69896 - DNA, 2497 bp, Cannabis sativa
gtgtagaacgctaaaagaagtgtacggacttagaagagaagggtataatggacggtgcacggttccaatgctatgggataaggagacgaaagaagttgtttgtaatgagagctacgatatcatccaattgttcaattcggagttgaatgggttggcccgaaacccggatttggatcttaatccgccatatttgaaggatcagattgagaaatggaatgggatcatttacccaaatgtaaataatggggtttacaggtatgtatgaaatttttttgtttgtttgtttaaaggattaactttgggttgagaattgagattatttttctgagaataattaacattttttaacataaatttttttacattaccaattcggcatctaaataattaatatgattcaatcctgatgaataataattaataaatagatgaaaattaatttaaaatatgaattattataaaaaaaataaaaaaaaaaaataatttttttatcttattttttattaatataaattatatttaatttacatgtcaattattattcatggcagataaaattgaatagagaatgataaaagaattgattactatttaaatttagtattaaatcaacataaaaaaataatattattttggcattaattttttttcaatttaaaccacaacattataaattacagaaaaaagtattttctttattaattttctatttaaataatacatatatgtagaaaatttaattatttaatcattatttaaatattaaaaaaaataattttaatgtagtttatagtgtactgtagccaattttatatataagatagcttttaatgtttggttggatcaattttagtaagaaacaatattaaatttaaatttttagtgttctgttcaattatttttagtaaaaaatattactaaattttagtttttagtgttaggccacataaggacacaacttagtagtgtgaaacactaccaatgtggtattcttaaggcaaacacacacacacactcattcttgctttttttgggggttgagaatagagattgtttatgttgattatacagatgtggatttgctcagagtcaagaagcatacgataaagcagtgaaggagttgtttaatacattagacatgttagataatcatttaagtagttcgagatacctatgtggacataaacttactctagctgatgtttgtttgttcactactttgattcgatttgatcttgtctacaatggtttgtttaagtgcaccaaaaagaagatcattgagtacccaaatctacatggctttatgtgtgacatttatcaggtacaactacttgctactactatttattacatcttcattcatttactttctaactttttatttctgattgaattgaataaaaataatgtttgatttgattattggaacagattcctaaggtgggtgaaacttgtaactttccagcaattatggatggttactatggaacactttttccacttaatccaggtagcattcgacctattatccctttgggttcagaccatcaagttctatcttctaaacctcataatagggattcaatatcggttagaaatcaaagtagtgacatttttgtatcataataaataatatacaaatcttcttcttgttttcatacaaaagatttattcttgtataataatttgtaatgatctttgaagttgctaaactcatggatagggatatctgtaaatacatgtcccaacaattttattaagttggcacagtttgtaaattcggtattttgtttttttgtcgtgttttttatttatttttgggatttttttatttttatatttcaaaatagtttgtttttaaattttttcggaaattgacatagcaacccacatagcaactaacggaacaacttaaattgtaattcaaattcacatatcaaattacataataattattggagcaatataaactgtaaatatatatatatgtttgaagtgattctcctttattttttatattaggagagtagagatttgaatttgggacttcatttttgtatgttcaatttggtcatttcttaaaaataattataataatttatccttttcttatgccaaactcggcatagtactacagatatcaacttgtttaccaaaatttattaatcataattctaatcgatttattgccaattaattttttaacgaaaaacaaattgtagtcttggaaatttattattagtgcaagttgttggaaattgcaagttcataaagttgttaaaatcttttgagcttttaataaaagtaaaatgagcatatcttgctttttaagaaatggatttggattccaaattcaacaattagctgtatttttgtacatacgttgaatttccaattacctcacattttaatattattattgtatttcctaaaaagataaaagaaataataatattgaggtcaactcaagtatttgtaatattttaagactcatata

SEQ ID NO: 69897 - DNA, 2629 bp, Cannabis sativa
tccaaccaattatttgcttagggtatttttgaggatcaccatgagtcatcttatttctcgctgtcaatattgcccatgaaataataattaatctttcgaaggaatttttctccacaatctcaaaagcatatcttattactttcttaaaagataaatcttcctttgcctcgtgaagggaagggtaatctaataaagtccaaattccttgagcccagggacaccagaaaattgcatgtgaatttgaatcgccccataaccaaaaataggacagacagttagttgttatgaggaataaccttacgcacgctgaagaaataggccaccattcgagggtataatctcatggaaacctcgccatacaaaatgaagaattttccgtagaatttttaaactccagaattttcctccaccattattggagaactcactagaagaggaaggcaatccctcatctcttgtcatggtcagattgtaaccactttttactgaataattaccatgttctgtgtaatgccaacaccaattatcctcatgctcaaaaatacttaatgggatcgataggatgagtttggcatctagtgcattgaatgtgctattcaccttagaaacgtcccaacctccaagaggatcaatacgttctgatattgtgattacattataagtggcttttgtactaggaagaaaagatggtggtcgtggtaaccaagaatcattgaataccctcgtagaagcaccattaccaatatagtgccttaatcctttaataaacatgtctcttcccccacacgatctctctccacgtcatagatcgataataaccctctcctgcctccaaaatagccgagtctctaaaatatcttgccttacacactttagccaataacgaagatggtttagttaaaattctccatgcttgttttgccaataggacttgattatattgactgaaccttcgaaaacctaatccaccatcactcttaagttgacagaacttatgccaaggtctccaatggatactccatcctgtatccacagaaccccaccaatatcgggctatcaaactttcaatctcttcgttcagtcttccagaatttggaaacaagacatcaaatatgttggcatcgcttagactactgcttttactaaaatctccttcccaccttgcgagaatagttttgcttgataatcatgtaggcgattccaaattttatcttttattggtctaaagatttcatttttattccttcctccttgcattggcaatcctaaatatttctcaatgacatctgtcttttgcatgtttaatacttgttcgaacaagccactgacttcatttggcgtattaggtgagaagtatagaatggatttagaaaagttaataacatgcacataaagaaaacctgattacccaccaaaacaaaatattaatgctaaaaaacccattctaataaaatcataatgtttaagtttctttcattatatcatatcaagaaaatttattaaaattataaaccacctctacaacatatatatggactattaaatctaagtttgaaggaaatctcgataagacctcctagataaaatcaactttcaaaaaatataccacaatttatttaaataagttgttactatatcctttaaataattagcacaaagtgtcattccttatctaaaggataaaaactataaagcaaccttctcaaattgtgtctttaataaatagtttgtttttgcaaattaacacaaagagaacgaaaaagaatcccaattaattagcattaatatatattattaaaaatatttatgatgtataaatttaatttcataataaatataaatttaaaatatcgaagtgatttcataataaatattttcaaattttatatttaactttctattttatcactttagatttttaaaataatttattcattaataataatttaaaaatataaaatataattaataaataattagaaaaataaaatatctaatgtaactcacgaaataattatttaaaaccaccgcacgaagggtatttatattacatagttaataaacaaacaaaatccattagaccatcatcaacgaaagcaacataataaattgctatttgagactcacgtaaaaaaaagcaaccaattaatatatttcttttattaaaaaaatataaaaattgttgggcatcgaagatgtaataggatgcacatttcctccatgaggataggctctacggggacccgccaatcatggggtggggattccccgtctaaatggggaacagaacagagacaaagattatttttttcccctaaatattaaacggggcagggatagggatcacactccccaccccgacggggacacgtttagtattttattttatattattaataatattttattatttacattttatatttgcatttgtagtatattagtataatttttatgacttttaagttgtgttatggtcacgattgctttattgaataataattattgtgtaatgtttaaatttttatctagtttattattttatatatttaaatttttattataaactttattttttattagagaatttcccgccttgcccccattaggggattccttgccccattcc

SEQ ID NO: 69898 - DNA, 1629 bp, Cannabis sativa
taataatggtaaagaaagagtaatagttgagcattccacgaattcagatacaaaacccgtgagaatagaggctaagttgctgaaaagagaaagcattgaagtcaatgtagaagctacattttcattgtaaaaaatatctccccaagtcttgaggataaggtacacagtaaaaaaagacaaaagaatatcagttcaggtgcatagagccatagactgttgatatctctacttaaatgttaagtaaaccagaaataaaagcaggaaacagaagaaggagagatagacacaagcaattctgtttggtgtaccttacaaataaacaagaatgatttgttgtaatagggaagtgaggacttaaattgctagttaaagaataagctatattttggaacaaatttttttttttttttttgaatgaaacaaattttgttactaatgaagcagaataaaatccagactaaccgaagcaagcactaagatggtgaggaagttcaaatgttgagcatgcgatagaagccagcgcttgattttgttcaaatgagtagctataaatccactatcctcatttgaagagccatccaattcttccatggcatccaacctattaccagacatgctagctgcataaaatggaaagttaaaaaattatgtctcgtgaatctggaacagtaaacaaaaataacatttcttttttactaatatatttattccgtttgggctattaacaagcaactttgatatttatgtaagtaaaaagcatttgttcctgacaagatctttattagctttaactgaaagacagaaaatggccaagatacattgtgtacaggctattcaacctcagtctacctaaaggaattatgattccaaaaagaaccacaatattcaaatgaaatgtaagttttatgttcactatacaaatataaaaggcatatgtgatgttagcttgtcaaagtaattttgcaataatcctaggattacattttaaaccacaaacaacttatggaaattgcaaacctactgtttcatctccgtacctgcccgtgaaataaaatatggaggaagctcccctattgcagtcccaatgccccataggacagcctctatctggacctgtgctaatatgttcctaagaggaacccgcaatccatcgactaacggaaacagtgggggtccaaactcagaacagtccttatcaagccacgatggaccttttttcagttgtattgtgtcatatggagcagtttttaaatcaacacgtccacactgcattgctttaatggtgaagaaagcaatatgaggaccaaggtagaggacaaaagtgtgcaacccagatcctgagagacatgaaaatatatgttacattttgcagtgataaatgctataaggtcatgaaaaaaacaaaaaaataccaaacccaaaatgtacattatgtcactatgcaaaactttcattgcaaatgtaccaaagctagtataatgaaatgaattaaagaaatggcacatgccctttctaatctaacagtccctagccaatggatggaatttcctcaaaatctaaattttggtaacattagaattcaaatatattagactaccctttgtctttttcatctatatgcaaaatgct

SEQ ID NO: 69899 - DNA, 1256 bp, Cannabis sativa
agggcacaaaacccaacaataattggcattcaaatacaaataaatatatagatcttggaatgagctttccaacaatatatgaaacatcccgaacggagttcagatcaaaaagttatgaacaactaaagttcaacatgtaatctacccaaaaatactcaagcgggccacgacacttaccaagcatgttgtgggcttctaggtagaaaaacccaaaattcacgcgagcgggctgcgattcccccctgagcccgttgccgcgtctgggttgaaaatcaagaaatgccaattcaacaactcgaatttcaagcccaaaacacaccaaactcctaccgaagcctactcaactcaaataaatatttcaataatacaagcccacaatatcagagagctaaaagcacttattcaagccctttacaacatcaatgtatgcaatttaaatcaagcttaacaagaattaccacaatctacaatcttgaactcaatatcacaaagcctcatccacacatatattcaaacacaagctcaataatatcagctcaaactttcagctcagaaaatcaaaacaaaacttaaaatcacacattcaaaattcatccaaagcttccctacaataaaagcatttaactagaactaccttactagcaagaaaacctagctagaacaccataaattcaacccatcacacacacatacatttcaagaattcaacaataaaataaaatgctttcgagcttaattaacaataactaaactcagcaagagaaaagaactagaggcttaccccaaattccaaaagctttcaaccacaaataacaccaattcaagctacacatcaagttccaattgattaagcattgacgagaaagtgaaggagggaggagtgggtcggttagggtgtgtaaaatcaaaaaatagagttttcctgttaggctatttttagcctatattttggatcaattttatgtgcatttttcgctgtgttgggatagaattacgcttgttttctatgttttcagattctttggagtaatagaagtctcgggatgaaaaagtccaataaaagacgagttgggtcaagaaaagtactttttgaggaaaaatgcatatctggccgcagctagatacagattggccgcggctagattgtgaagcaggagtaggattttcgaggctacattcgccgcggcgaggggtaatgccgccgcggccatttaagacttacagaaccgtggattttaggcatttatctggccgcg

SEQ ID NO: 69900 - DNA, 3089 bp, Cannabis sativa
ttatcactataagattttagaatatgaatttggtttgtattgttagttctttacctgtacatatatatgtccttgccgtggagtgttttccggcacaaatgacaacaactgagaaaatccgaggtgggaaatgaacaaaattcttcaccggagatcgctgacggcgaatcaaaaatacccttttggttactacaccgacccagatcgattttcaggtgattttttcttccatattcaacaccatcgtaatagactttggtaaacgttttgtcattcggtaaccgacaagtgacgtaagtgtaactctcttcgtctaattcttcgcaagctctgaacttgtccccgttactgactatattcaccggaattggattcgaccgatttaaattcaagctgcaaatcgcgtacttggctggaaaatctcttccactgtcgacggaggatttttccaaagcagctacaattcccaacccaactccgccaagatcgtagtttttcaaaccacgaggagattgcatcttgagatctaatgggcttcttggactagtcccgatttcaatggagccggcgcggtggccgggaacaagaagctcggaaagttttccgatcattggtctagctcttttggtcaagttaaccatataaattgaacggaaaaaaaccaattaagaagaaatggaattgggaatgagaaagaaaacgttttgtgtttatattttctttttgttactctgaaatgggttttaagggtcttaaagctttgtgagtctaatttatgatgaagtgaaagagtgggtgggatttaagcccatggtttgtttttgctttggaattatatgagtcatgatttgttcaagttagaccaattaatcatttaattgctttttcttttctcaaaaaaaaaaaatactattttctttttgcaataaaattattttaaagaggtcagttatcaaatggggcccatcttgatataaaataaagttgtccatttgtaatgattgggacccattctcgggatctggcccaccacgggtcttgttcggcgacaataaagattccttttaggaatttggaccgttagaccatttacacgtgttaatcatccaagggtcagtagttttagtagcaattattgctaaaccactgagaggacctatgtaagcccactaaaactgggtgaggcccactaattttgtgtttgataacgactcggcctgccctcaaatgtgggtctctgtactctccctctctaacttattgtactggacttctttttctcaaaattacagaaacacccttttaccttttttctttgaaagtgaaagccattacagaaacatccttttacctcttttctcttttttcatttttctttcacttttcaaaaaagaaaaagaaaataataataataaattcacttcacgtttatgtctttattacacttttttctttgctccatcttttttttcctaagaaagaataaaaagaaaaaacaatgcaaaattgctccatgttccccaaatttaaaaatttacaggaaatataatgtagtttctttcgaaaatttataatttcaattacttccatctataattaatgtaaaatttatatatttttctaaataactattattataattcggggaaccttttttaacaaaaaaaaaaaaaaaaatcagagggcaaatttatataagggtataggctatgttgaaggaaaaaaatcacatttatacagaattttatttaaattattgtataaaatatagattttacatataccctaagtatctaccatacatctatcaaaaataaaaaagtatataacttttttgtagaaaaaataataatactaattttctctacatttctatagactataaataaatttacagaaaaaaaagtatatgagtaatttgtggtgtaactactaaaatttaatttttatttttaagtaaatttttaaatattttacggtaataatacttaaaaattacatttttagaatttctcgtcattttttattagtatatttaaattaattaaatgacctaaaaatcatagactatcatcacatggctattaacttgactcttaatggctaagtacttacaaaaattatgaaaaatattatttaaatattattaccgttaaaaatataatttaaatatttattcataattaaattagacttaaaatagttataatacaaattattttcaataatattatttttatataattatagtttttgtatagttattggcttgagactttgtgtgagggactcgggtcatgtctcaattatggaagaccattatgacttgattaagcttttgagcatataattacttctatgtattctatatatatatatatatattaccatttttgttaatagaataatccactttaatgttcaaagattatatttctattcctatcttatgattttatgttatgttacaatttaactttatttttttagtagtggagcatctcggaataaaaacatagacaattcatttagagatgaatttccactaaacaaataactttatattaaagaaaagccaatattggaaccactcaagaaaacctatattgcgtatgaattaataatttcagtttgcactaacttatctataaaagatttgatacaaatattcatgtatctattaaaaataaattaaacaaagagatcatgatggtagtattttttttattaatatttgtgagtagaccataaaatattataatttaatgtgtgatttaatttctaatatttatgttacattaaattataatataatttttttttttgaatgtagcgcaaatttaaatttactatacatatatttatttttttatcttatattaatgtgtttacatagcataaaattttttatttttaatattgcaattactcattatacatattttttaaaaaatatctttctattatcatatttgttattattatttaaaagaaaaataaaaagtgtatgatattttaaaaattattaaattaaaaatattaaggttttaaattaaaataataatttatactatttttgaatattatta

SEQ ID NO: 69901 - DNA, 2563 bp, Cannabis sativa
taaagatgaattggatttgaaaaaggatgtcaactatgccatggaagtggaaaacgcggggtcaaggaacgatgtaatttgccaagcagaaagaacagctaatacaagaagaacatggagtacaccgaatttcggtgctttgaagattgtaatagcagatgaatgtcaagataataatagattgatgtcggaatatgagagcacacctaaagaaaaggggtctaagcttgttttctggaagaaaaagtcttcagatctttcccaggcaaatggagcagttagtttgttgaaccaggtaatccttatgttgctgttttaaagagaaattcgttatcgtctttcaataggaaattaacttgttttatgtatgttatgcagctttatggttgggttattgggtcacagaggcaattgcagaattcacctcggttacactatggtcgatcgattcaagtaacgcttgtgttaatgctgactatatttttgatcggtgagctcttgattcccttaaactgagttgtttgatgttagtctggagtctgtacatgcttattatggtcaattttgggttgacttcttcaggggaaaatttgattgctcattgacttttatgccatctgatgaaagagtatagtaaatagtctaatgtcagatcaaatgcacaagtctgtttaatgtctaaaagtcatacttataattcaatactatggacaagagtgactagtaaagactatgattgaacaaactttgttgttttatttttcccaattgctaatgaagggttgctgtctttttgcagtaccatttctagtttattcaaattgaaatgaagctgtgcttttgctgcatctggaatcagatacagatgtcgggtaagtttcccgcctttattattattattttaattttcgcgctagcagtttcgccggcctccaggtggccccaaggtgtttttgttgtgtctgtcggaacaaatgccaactagcactatccaacatgtacactctctattaggggtagataacatccaaatctagttgaaccgatccaatccaattacaattagattggattggatgctaaaagttgcattctaattggattggatcagttattggatttcaaactcaaaatttaattaaaaaacctattcaattcaattgcatttttaaaaaacttgtttatatttatttatatttatataataaatatattgaaaaaataaaaaaaaacatatatatttttagtagctatttgttttttaggtgtagaatttgtaacacttggttgtttggttctattttattatttgccagtgttgttttagtaattttaaacttttagttacattaaacatgcaaggacgatatctctatagagtattaaacttaaataaagggtgatattttatttttaagtatttttcttcatatttttaagctaacattaaaaattaggtgtgtaattggattggattttgagatctaattggattaggtcggatgatgatttttcaaatctaattaataattagattgaatcagattaggagtaaaatgttagattggatcagatacccaaccctacgtccttaccacgagaccacgctttggtctcccagaaggtttgagtttcgagtctccttcgagtaaactaaatagccattgccagtccttaggtggtgagaggagtttgctctcaaatcccatttgagttctttatcaatcttatatggtggaagtttaattttgtgtttgagtaccaagattagatatcattgttcaacttcaacatgatacttatcatgcattcaatcatgtgcaggtattgaatgaagctgttcagaatcgggaattgcctaacgacgaggacaatcctcctcgtcaccttaaaaaatattccggctgttcagggaaggaggggctttcggcggtacaaactatttcccagaaagttgtatgagtgagaaaggcaacaggtttcttggtgccacaaaagtgtaaatgttattattctcatatatatatgatatatttatatgtagttttcatatgaagaataatgttttctatagtatatatacgtagcatattatatttggattatcattaaggtttgaaccaagaaaagaaaacatgcaataccattcctgaattaatgaagatgtaccatatgatctcatatacaaaccagttttatgggtattaattaaaagtaattaattgttttttttttctttcaaaattgtaaggttttttttttttttttttaaatgatggggaattttatttacactacattttatttatttttgagaaaatacatcataattttaattttacataaaaatatatttttttaattatattactttgttatatttttttaatgcatatttttttaaaaaaaaaaatagacttaaaaaaaattcattagaaaaaaataaaaaaaaaagttaaattaataagtaatgaaattagcactaaataatgtgagacaaaaccctcaaaagtttaactttactagcaattaactctcaaatctcattttttgtgataaaatc

SEQ ID NO: 69902 - DNA, 1904 bp, Cannabis sativa
gaccgtcactaataaaattaattgaatatttaaaatcgacgcttataattgagaatatattctcgtcaattttaatcgttgaaactaggcaacaattttaaagcttactaaattgaaacttcacacttgtaaaatagaatccctaacaattttcaaacatcgactatacttggttggcagtttaaatctcatttcatttctctcatctctctattattattattattattattattattataactttggactataactttatcacttttcaaaaaaactttattttttttttcatttttcataaatttatttccaaataaagatttcatatctctttctctcaaatttattttcactatggtctcatcttctccttcttttcttcttgttcgagatcgtcaatttcatcttttttctttttttatattcattcttctcattaacaaatcgcaaatttaatatgtgtttttttcttcttcttttctgcaggtgagcagtggttgttggttttttaaaccttaacgcctgcagttatgacttcgtttggccactgcttagaaactggcagagacaaggcttttcgagtcagatccgacaaccttgggtctctttgaggaggatgagcattcggtggtggttgtgattcgatgaacacctcagtcagctgccatagttgacattctatattttattttggtttggttttgcacagttgactgtgcaaaatcgtcgataataatagtatagtcgacaggtttaaacgtcacctatagtataagggactgtgcaaaatcgtcgacaatttttttttagtattgtcgacaattttctagtatcgagaaaaacttctttcgatatatttctaccaatgcctattctatttagttttgcgacagttaaataaatatcaatattagagaccgatataaatactataccctacaaaaaaaaatcccaactttttagtaatgtatataagtagataatatatattatcattaattaaacaaccgtatgatacatgttatgggaggagagggatggtggagcccaacaatctcattgaaaagttgaaacaaaattattgcaaatcatattacgttcatgtgatgaagctcatagaaagaaaaagaaagctttgattttgataagtactactattacattactatatataatattgtggcaagaattggagtgttgtcgtttcaatatataataatagaatatagaatagaatagaatataacatcattctcatcttggtggattcatgagaagagtattaaattattttgttaataaagactactaattaaagtgacttattgcctaaaaagtctcaaggaaataagaaatattgtaatttgtaaatagtaacaataaaggttattaatttatatcaatttaagttttgatgtattttggtcatctccaatgtaagatgatttgggattttggactgtgtgtgttaaatctttgttggtataaaaataaaattttaaataagtacaatatatatttttttaaaaaaatgtttttctagtgcatcatctattttggagagtttttagaatatataaatatatatatttataattgtgtacgtaattatttttcataattatgtgcgttatacttatagttatttagaatcatttataattgttcacaaaattttaagtaatttgtatagtgtaaaaaaataagatttaaacaattatttactatacggataagaaaatataatcaggcatacaataaaatgttttaactttaattaatggtttttggagtaaaaaagaaaaaggccaaatgtgggaatgttaatgggcctataactagagtagatggaactttggatttgagtaggaatggtcatctaaaaaacttagaaaaattta

SEQ ID NO: 69903 - DNA, 1476 bp, Cannabis sativa
ggcggaggtatgacttccagcagccatagcagttccagattggaatgatctacggggagagtggtgataaaaacgatgcttatacgggggttgaaatagcgaaagagtgacggtggtggataaggatggcgagtgaattcgaatgagtgcgcttactataaaagagggtgattgttgtagcgcagccaacatgttttggacttggtttagtttcctacgataaattattattattattattatacatatgtggtaatttctacgaagacagttatttttttatttttttagtacaaatatgaagacagttatgggttgtttggtacaagggcttgatttcatatgaaatatctctaatcgaatcataaacattgatagtgtcacctcttctgattctgtgctcattgtttcaagatcagaatctttgagattgtctggtgtattctcagtttttaattttaagtttttaaaagtaagcatagaaaataatttttttttttttttttgaaagaagaaaataattttttttgttattttaaaaatttaataatttttcgtctcttgtttttaagattatttttagatttttaaaaaaaaaattaaaaaaaaaaaaaaccttcaatattttttttatacatgaacctagtccatcacatactcaacttttgaccccaaatcccaaacctcatttcgactcgtgtttgaggtctagggtcagtcctagagtccgggattaagttgatccctattccaagtctagactcgaggttgggccgttcccagggccaagtctatattagggtcgggattgggatccaaggtttgggttcaaatctagggtctagatttgagtcaaaatttgagtctacccgattatgtgaacaaaaatataaaaaagaatatgctaaaaaaattgaaaatagttgtcaaggtatgaagctacacagcctcatgatttctcgattttttttttttcatggttacatcaatttccttagtgagctttcattttttccatgtgctttatttggttttattgatcttttgtgctatatgttatttaattattgctccaggggaaacccatttaggaatttcattgcttatattacaatttttcttttcttttcattgaggctattttaagatctattttaagttcttttgcacgttttattttgagcattattattgggcactaatagtgtctagcatcttctagacgtgtcgctttgcgattagttagcgatactttataaaaattattatattaaaatatatggaacccgatattaattgcaccaataataatatttagaggatgttagatgatcactttagcatttctcttttattctcttcttttcttggctttgctttaattgaatttttcggaaattgaaccaagaggtcttggtggttttaaagaggtctcaagctttagtttaacttcttgaaatgggagaaaaattgtat

SEQ ID NO: 69904 - DNA, 3258 bp, Cannabis sativa
aaacatcaacacaatgcaagacatgttgagaaacaataatgaggttgcctcaaaaaaacacaaagcagtagggttaaacttgaaggactttttgttggctggaatgtttatcttctgatgattggagatgtttactgcagcctaaaatgattttattttaattttggatgactttatggttgtgtaactactgaaatggtgcttttttttatgattttaagtagtgattaggttactgatatggtgctctttttgaggcttcattcaataccatattttcatgactttgtgctgttatttaggtggctggaatacttttgttgaagcttttttggggcttgaatgccatgttttatattaggtgaactcatgttgttattaatggttgttgaataaggttatggaacactttcattaatgaaaaatttgaatgttaaattagccttggagactattgaatgttgttattacaggttgttgagttttaatttaacttatatttatattcagtggacataaaaaatgatacaccaattaaattatccatgtgatacaaaatttgattaagtatgttcacaagtcacaactgattcaaaaattcattgccattgacacttgtatagttcattcacttaaaatgttgatataacacactacctcctatcactacaaaataaatgggattgcagccattttgcctattggaaaaacatcatgagcttggttttgatttggaaacttatagatcagatcagctcttgcaaagggtggtgagctttgtgttgaaacttcatatggtaattaattatatatatacatatagatagaaagatatataattgtccaatgatatgaaaatatttttttgtgaacattttaataggggattttttggagaccaaagttcaactctttgtctcaatttttataagtagtactaagctcactgtgttgaaaaagaagaaagtatgccatgtttatttaatctattaattcttgatttacatgctgaactatacaaggattcaaatgatgaagctacaaatgagacactctgaactataaaaatgatttatgaattgaatgaaaattgtagtgtacagataagaaagaaccaactatatataattatatatagttaaacagaagaggaaatacaagaatacgcctaacttaaaactatctaaccaagcatgttaatgacttggtcaacaaataaagagaaaaaaaaataacaataaaaaacatttataaggaaacttatgtatactaatagttacacttagaaacaatgtataaaaattgacatgagtggaccaaaatttgaattattattatgagtacatgaaaagaaaactacaacaaaatatttgaagcatgagagagagagagagagagagttaattgctttcatggttagaactacaaacaccaatcaaagcttgtatatcattgaagatgatggtcactggtctgtcaaaacatagattttgaccgaaacttgaagatcacaatccactttgaagtgagcatggaagaacctctgttcctgtaatatggttacttgtctaaactcagcttagataaacaaaagttgctagtattagaaggagaatatgagattttgccttgccaagaaaaataaatcctaattgttgcagaatgaggaaaacaaagataaagaaaaacacataaacgaagatgaagaagaaagagtaatttgcggtataaatacctaagtttaacctctgcttgcaaataagtacttaaatttaatttttgacagtaataatattaatacttaaagaatatttctggaacttcagtaggtacttgcctgttagttgccaagttaatatctacgtgtcattttcttattggtatatttaaataaaaataaaaaatttaatgatttaatgatttggaccaatcaggactgtcggactgtcctatggctattgacttgacatttaacagtcaggtgcgtacagaagttataaaattataacttaggtattattactttcaaaaattaaacttaggtagttatctacaaccgagagttaaatttaggtatttacgccgcaaattactcaagaaactgcacctattatctctcaccttttcttcgcatatgacagtcttctttttagtattgcttctccttttatggcttccgtcatcaaagactttcttaacgactatagcctgacatctggacaataagtcaattatgttaaatcctccctttacttctctcctaacatggatgagtatactaaacgatccatcaccaacattcttaatgttcctattcgcgaagatatcgagaagtaccttggtctccctcaatcttttggcgctccaagaaagaagctttcaatcacctttatgaccgggtctgggctcatttaaacaaatggaactctactttcttctcaaaaggtgggaaagagatcttgctgaaatctgtagttcaggctatttcgtcctatgccatggcttgtttcaaacttccttttagcttccatactaaactataatctctcatagctaacttttggtggggtggcattactcaaaccaggaaagctcattgggtggcttgcgaactctttatcgctccaaatttaacggtggccttggctttcggtctataaaagccttaaaccaagctatgctggccaagcaggcttggcacctcatccaatctccccagtctttggtggcctctttgcttaatgctcgttatttcccccattctacattccttactgttcacaagggtcgatgacccttgctggtatggactggtatctcttggggtaaggaacttctcttgtcagggcttaagaagaaagttggtaacgatgcaaatatctcaatttatgattatacctgggttctggggtatggtaagcttgcctatctcaacgttccttcaaatcgagccaatattgtatccactttaatcactgccagtgacacctgggatgttacccaacttcacaaccttttccccaatgacatttgccatgccattctttccatccccctccccaacacgcacacaccagattcagtctactggccctttacgcctcatggcaattacacaatcaactcaagttatcaccatgctcatacccttgatatccaacaagaacattccccctcagactcgtttaatcaaaaaaattggtgaaaatatttttggttcttacctatcccctccaagaccaaatattttgttgggac

SEQ ID NO: 69905 - DNA, 4052 bp, Cannabis sativa
cgggtcccgggtaccgggttcgagtccgggtccaggtccgggttcgggtccggggttcgtggtctgggtcggggttcgggtctggggtccggatctaggtccgggtccggggcgggatccgggtcgtggtcccgggttcgggtccggatcctggtcggagattggtgttgacttcaaattctttataatattataatacaagctaatacggaccatttattatatattaaataatacaacatacattgtattaaaaaacttagtcgatcataataattaatacaatacattgcgtaatccaaacatagtattatttattattttatacaatacaacccttatacggcgtaccaaacgagctcaaaaagtgataatattattattggtgtaattcaatttctgccaaaacaaaattaggagtacataatagggggccaacatcgattagtgcatacaacaaagtctattcaagattttggtaacggagttcctttttatgaatagaagaaaatatcatctttttaatgtttgtaaatattttagaattttttttttatttttacactttaaaataatttttttttatatatttattatagaaattcatataaaaactcacataacaatcaatggagcaactttaatcgtaatttaaattcagataaccaccggaataacccaaaccgtaaaaataaaaaataatatatagagtgattgctaatattttatacaatagattaaaaatatgaatcaagaatttaaactaataaaaatagaacgtgagtggtgctttaataacgtggtaaggatactcaattttttttttcttttttttatcaagaatggtactgaatttaattgtacaaaaatttactaatttatgaaaaggaaaaaaaatagaaaatgtgtgtctagcctttatactaatatcaatttaaaaatgctctattttgttaattccattaaatattaaatatagaattagtgcactaatatatgtatctataatataattgaaattagagtccgacatccaatttaattcaataattttttcctgatcagatccaatctacttagtaataagatttggaaaattatcatccgatctaatttaattagacctcaaaatttaattcaacccaatcaaatctaattagtaattggattagatcgatttttaattggatattaaatttcacacctaatttttaatattatctaaaaaatatgaagaaaaaaaatacataaaagctatagatattatccttacaagtttaatactatataaatgtatcatccttataagtttaatgctatatcaaaagtttgaaataactaaaacaatactacaaactaataaaatagaacaaaatatcatgaaagtaaacacacaaaacaacaaatcaattttgttttttattatatataaataatttttaatatgtattagatgtaattggattggatcgatttttaattagattttgatattcacatctaataaccgatctaatccaattaaaatataacttttaatatccaatccaatatccaattttaattggatatccaatttttttgtaatttgattgaattggattaattcaattcaattggattggattaaattatgtccacccctagtttaaatttgttacatgtatataatattgagtgtagagatgcatcccgtattgttttcgcactaaaaaaagatttttagtcaaatttttcatggtcgtatacattataactatttaaatcatcttataaaatttttagaaatttaaaataatttacaatatataaaacgtaatgttcgaacaatctatttcacacgtataaaaaataaaataattaaatgtacaacagattgtttgaaccctatttacagtgtgtttaacttttatgaatattttaaaatttttacaaaatgtcttaaataactactacatacccgatcataaaaaaattaaactaaaaaattatcctgtataccaaaacaaataggaagtagattagtgcatactttttaggtgatataatagttaattcaaataaagtgaataaaattagaatacacaattatacattaaatttttattttaaaagatattataataagacttacagttagttatatatatatttgaataagttaataacaaagttagtgtttatgctttggtagctgatttattagtcatttatactttggtgaataaagttagtgtcatatagattgggattctccccttatactcattaagctattgagggtggcctgccatttccttgtaattgttgatttaattaatgaatcttgtttaaaaagaaaaaagaagaggaagaggaagtcaacaataaacatacaattgtatcatatattttccatcaaagaaggaatgtcacccatgtgcacttgatctgatccaagatagggttgcttgtgtgtaaaatttgtcgaatttgtggtgcagtgagtagtggcacctaagtcagggtacaaggcctcatcataaacagtgtcaggtgtagcaatttgagacgaatactaagtgacattagctgcaccagctctagggaaatccatattgaatcttgggtagcatcgagatgcagtacgactagtccttgagcacaattgacagacttgtttggatccagcatgctaaggtatattgactccgagatttatggaggagcttgtggtgcctcgaccagttgagtgattggttgagttgggactagcattgttcgatcgacgattaacaacatagggactccatgctctacgaccataggtgttggagttagatccacgcgcgatctgagtaagatctgttatctacagagttttgaaagatagaaaaagcttgtggttttgcacaaagaccacaattaggagcaagattaacataatctggctctttgttgtgattttccatacgatgtccttgagataacagtaaggtctcaatttctgcaacagtgtattgatcatttctcgagttgaccaagataacaaaagtgtcataaactgatggtaatcctttaaaaaatgcagaaacatgttcttttatagaaattttgtgaccaatagatcctagacgatcaacaagattctttattctaaataagtattcattaatggtgagagatcctttcttacagttttgtagttgtttgatgtatcgccgacgaagaatacctccagatctgagctgaagttttagctctaacaatttgagtaaggattccatcagacattgaagaaagcagccaagagtagaggagctaatctggaacctcccattctagaaatcttggatttagcttacctcgagcttcatcttcttggttaagatacttgacagggggagcgaaggtctcagagatgatgttttgaagtcgatgtccatgaattgcaaagtatacttgaggatgctagaggataaaattattaccatcatgtttgacagagactttatgcgagaaaacaactagattgaatgttggagtacatgaacaacgatcaacgaagaacagaaggattgataatggtggaagcagagaaaaaatctactctgatattgctatcccaattttcgtcctcatgacgtggtatgcttacgtggatagaacttgtgccacgtggcagtacaactcactaaaagaaggaccaagttagcacccaagaaaacaaagacctcaacactcaaatggagatcaagtgacagatcacctccctctcagatgctggccaaccctatggccggctagcccagggacaacaccatggctggccagcacaagggcctgggcggccaaggatgctttgcaggccccacaagacactcctgcacgtggacaacaaagatgggctgctaattgagccccaaaagcccaacagaagatgaataatatttagaatcaaggaaaattcagtcttttttaaatatctaactaactatacgatttttaagggatttgaattgtaaccctatggtttaaggcttcctatataaagtaggcatgtcaaaaagatc

SEQ ID NO: 69906 - DNA, 1410 bp, Cannabis sativa
  modified_base (1242)..(1252): a, c, t, g, unknown or other
aattgttttgaagtgtaaaaatgaaaaagcccctaaaaataatgccaacccgcccaatcaatctaaactaacccaactaatccgattgagaggatatatatatatttttattatatatactctatatattatataatttatttacatatttataaaaagttcaaactattatattttttatgggtttatgtatatttgttttattatcacaattcactaaaatataacaattaaatgtgaaaataaaaaaaaaaaaaacattagtgttcgatttgggtaagttaacctgaccaaatcgacaaattcattagacaagttgaaaattttcttttcttaattaagcaagctacacttaaaattttataaatcggtctttatattaagttaaataaaatataatgtaaaccgaccaaattgaccgacatacatgctatgacataaactatattttaaaaaacacacagactgggtacagttcacatttacatgatatgcaacccaaaaccatgtgtggttgataagagttgacacatgaagacacgaatcactaaaactgaacaaaattattttaaatatttttgtgggccatatatacaatatcaatatatgtacgtaagtaagaaaataatgaaagccaccatttaaattcattcatatgaatatatgaataagatatggaaactcctaggtagtttctttgaaattaattaacctatttttttcccaattaataatcaaattaaagtctattcattgattagcccaccttaattgaggttatgctaagctgttaagttgtgtgagaaaaaagaaaatcatgttaaaaaaagagaagctaccagccaaatatttgagaattgattcgataaaaaatcatgttagatattattgttgaaagcatatgtgaggaaatatcgtaggtaacttcatggtgaccaccaagccgaaaaagaaataagaaaatatatgattgatgtgatataagtgtgggtgaaaatgtgtgcttctccattcttaggtagaaatagtgttttaggttttttgagatgacacaaaatcggtatgagtctcagagggacgaggatgacttggcatgaaaaaatatgaatttgtatgacatgacacggaaaatataggtttagatacgatatgataaatccgaacacacagcacacacggatagattagctcgaatgaacgacacattaataataataacaataataaatatttatttatcannnnnnnnnnnagtaatatttaaattctaataattataattattttttatatgattgtgtataattattttgaaaaaaaatgtaacaataattgaaacaataaaatacgcatatacgcatatgaagcacgaatttgagcatatataagaaaatagattggtctatttaa

SEQ ID NO: 69907 - DNA, 2095 bp, Cannabis sativa
tatgagacccaatacttagttagatcaagagctatattaacacataggagggtgttgtgccttttaacatttctcaatcaattagttaaaaactaggcaatgattgagttttgtgggaagcaagtgagtcagcaatttaaggagctagtaaatcctcctatgatatagattggcacctagttttactaatctaactcaatcactgacagaaaagactacgccgcaccccaaacccaaacccacatttcattatttaaattccatattttagaaaggttcgaattcgaaaattttgaatttttgaaaaaagagcggccagtgggcctttttggttttgaatatcagctcctcttcaacgtcttgtacaaaacaaaatttaatatatattattttctaaaaccaaaaatatatgtatttttttatttgaatttacttttagtcttctctctcttttctttatcttaaaacatttctaattttcaataaaaaagaaaaaacatttcatacattttgtccagaaaaaaaaaaaaatattaggatacatgtatatatatagtgttaaagctttaacgggtgtcttcgattttgagttaaatatctaagagagctatagatccaacttcgacttcattcaaacttgcatctgtgagttctcactctctctctctctcttaaaggttttgaactgttgcaactacttaattatctatttacagtttgatttctgtgttttcaacagcttcatgtggattgtctaagatccaaagaaaagtttatatatgtatatattttcgttttcaaataatttttgttgttatttgaatctacttttcgtcctctcttactgtattcttaaagctttgtatatatatatatttatacacacagtgttaaagctttaacgagtatctccgattttgactaaattaataatctctatagatccaacttcgagttcattcaaatttgcatctgtgagctatctatctctctcacacacctttgctctagaagttttgaactgttgcaactactaattcatttgcatttgcattttaatcttgttttgatcacttatctgggttttctacagcttcaatgtattttgtttcatctgggtattctaagatcaaaagtaaaaatttaacgttagttgatgcaagaactagcttgacttttatttttaatctttgaagtttgcttttctgggtactacatatcattttccggttgatgttcttaattacgtttaaaggctttggtatcggtttgattattgccctccatttttcattttagaaaactctacttttttttttccttgtgatttttctgatttatgggtgctttctggtatcttgttattcacagttaacctgtttgagttttgttatcatagaaagtagtcattttagtgattttatatttttcgtttgcttgtccgagtagtttttgttgataattttaaagatcattgtaatgttagctaactatttgattaatgtcataacagaatggagtcgctccctgatgcaatggtacacactgtattatcatacatgaataatgcccgagatgtggcaatttgtaactgtgtatctaagcgttggaaagatgttatgccttatattagtaggctctacttccctcgcaattgttttgataatctttcgggcagtgacagccctgatgaaattgttttgaggatggtttcctcgatcgaaaggttagaagagcttgttgtttatagtccattctcaggtgctggcctctcctcgtggctatctgtaatgggttcctctcttaggcagcttgagcttcggatggacaatctaactgaacagcagggttgtcttgaaagcccctctaagttggattgtataagctttgcaaagaatttggaatctcttaaactttggggtgtcttaataacccaacctcccaagtgggaagtttttcaaaaacttaaaaaccttgaaattgttggtgcaagattggacgacctagcattgtctgcactgctaacaatgtgtccttatttgaccaatttgctgctgcttggttgtgaaggagttagatctgtatcaattgattt

SEQ ID NO: 69908 - DNA, 1486 bp, Cannabis sativa
atatatatatcatcttatatgatcttgattatcttggtacttcatcaaccagttaactacttttcatattattatatatattcatcacataaatcaaatatatattattctttacttaattaatggccaacaacaacaacaacaacaacgatggtgatagagatcatggaatcgaaagtttcttcgaggaccacagattaactttcttcctaatagcagccggaacaatctctctcttcattaccatctaccttctagtcactatcttcttatatagccgggatcaagctcgagagcaaccacgcgagccggggaatattaatagcatcgagatggtgtctgtggccgaacttatcccagcgcacaagtataagaaaggagacggtttggtaggaaatgacaacgccgacaaagatgaagacgtggtttgcgcggtgtgcctagcagaattcgaagagggagaggagctccgaactttgccagagtgttttcactcgtttcacgcgccctgtatagatatgtggctcttctcacataccacttgtccggtgtgtcgtcgtgatgccacaccttccccctctccaaggatcggatgccatggtgagtccagggtggattaattctaaagcattgctattagtcactactagtatataaacaagatgacgctttgcgtatatttaacaatattacattaaaacctatgaaacctttagcaatataaaatcttataagaatgttaaatactattagtaacttttagtattttactttattttaaggcatattacacatagctattaataatatgaaattttgtatttcgcttcataaatttgtcatgtaatgtagctcatgatggcgatctaacaaaacctaatgtacatttttaggcatagttaaaaatatagaataaaatattttttaatcaatattattttcaaagtgttttaatagtactttttttatttaattaaatttttaagagtaaattataaattaagtaaagtattttaattgtgaaaaatagtttttcaattttttttaggagtggagtctgattaatattgttttttgtttttaattttcaatattgtattttaaaaaactaagaacacaaaataatttttgtaggtttaaactaattaacaaaaggtcttcggttgattttttttctaaaatatatttttgatttttatttaaaaaaacttcaataaaaaaataattaataaacatgtttataaaaagataaacattttaaaagtttgtaataaacaatgagaatatgtaattcaaaagaaaaagtgatgaaaactctagaaaactaactttttgctctcctcaaaaaattatttaacattttgtctctggtacaatttatatgttgttgtgtttcttaattttcttttgttaaaatagttcttgaattatttacaatattataaaagggactgaagttccatttattttctttagcagattgata

SEQ ID NO: 69909 - DNA, 1653 bp, Cannabis sativa
actatatttgccaaggattgaataaactacttaatagacatgtgaaaaattctagtcttttcagaaaggcagctggaaaggcttaaagtaaatgatcacttgaagttgtcaagtaatatgcattacatatttttagttatatttcttttatttggttgattctagaaacagtatgctaattttctgagcctccaattattttaatgcctgacaagaactctctcttcctgtcaactgtagatcaagtgcaaatgccggtgctgtaggtgaggagcatgggcaagagggacaacaacagcaacgtcaacatcaacagcctgcacctcaaagacaagttgctgtaagaagatttcaaattgcatttcagctggatttgttgcttattctgaagttggcagctgtaatctttttgtttaaccaagatggatcaagacaaaggcttattgtacttgtgttttttgcttcacttgtctatctgtgagttttcgactttgtttcaaaacagtgtctataattcttaccctttttaatttgaggtttctaatgggttgaacttctgacctccatcaaggcattcatcatcatatgatctacatgatacatattgatttgccgtataataattttcctaaaagctgatattaaagacatacagtggaagcttaactgtttagacgaacaacgttgcagatatcaaactggagctcttacaccactgatacgatggctttcacaaggtatgcatagggcagctgctcatcctccgaggccccctccagtcagggctgataattttctacctcctggaaggcagggacctgaaaatgctgcttttgcaggtagatttttgattttgttttgatatgttggaaagtttcttaggaaaattgtgcttatactaggaatttctaaatacaatgattatttgtgttaattttgttttgatatgttgcatagttctttaggaaaatggtaattattctaaggatttcttaatacaatgaatatttgtgtagacattcaagacacttgctactattggaaaacggaaataactaattttagtagttttaagaattttttatactatttcatcaggttcatgaatagtgctagtgattcaatgtctcgaattggtcctcacattgctagagtgatatatagatcagtttagttttgttccggcctggcgtatagaatgtcatgtctacttctcaattcattgttagtattatgaaattatttactggaagagatcaccaatttcagctaggcaccccaatttgctcggttattatgaattccaatttttgatatcacaataaaaagtggttcgtgtggtaactttttgcagagggacagccgggaattgagcttaggaatgtgcttggagacaatgcagatcaagtggtggaaaatgacaatgtagcagcagaacccgaggctgcggctggcaatgggggtaaccagtggtggggaattgtaaaggaaattcagatgattgtttttggcttcatcacttcacttctcccaggtttccataacatagattaagattatatacatggtgattgacaggtttacatgaactgaactgactgactcagaatctgttaagtgttacatgatgagttaattttaatcatagatata

SEQ ID NO: 69910 - DNA, 1696 bp, Cannabis sativa
agggcataaaacccaacaaggcaatggtatttgaataccgaagggttaggcatcaaaagtcacgactattagtggaaactgttgttagatctcctacttgtcgattgtcttattagacaatgatagagatatatagatgctgagttagggcatcaacttttcttattaagcaatgtgacatatggatgccaggttaaggcatcgacttgccttgtaggtaatgagatttatgaacactagagaatgaatttaagattgtcagatttgacaatgacaataacatcaattatcaattttgaatatcagggtgattctgttaaataacgacaagtactttatgaattaacgattatagttattataattggattggtaattgtgtataactgtgcatccttctattaacattaattatgcttgaatatatgtactgacctaaatttaaatatatgagtatgtatgatcatttgattataataatgtgagttttcttgctaaaattgtgtggtgaactatatgattgttattattacttttcttgttgagtccttgtgactcacagatgctatgtggtgcaggtaataggtagaaacatttggacaaccatgagtcaggaatcttctccaaaaaatatacatatcaacttatccgataggtggtgctgagttatcagaaaatatatatcaaatgttttgaacttttaattgtatctcttttatattaaaacttgttatactaatattttgggcagcaataagaagttgacacgtgtatcgaagctagaatataaactagctcaaaccacgcattattaaatgcacttaaataactcgtctcggaaaatatagttaatagagatactcgaacttgcctccatgtagacaatagcaagacgtgagtaataaccattgactgatgagaccactgaggcaaaaaggtccatctcaggataatagaatacacaatgaaactgtttataacgagtggacaatgagcttgcagctcattgatccacatgcttattagtatgagcttgcatctcattgatccacatactcatgagtatgttcaaggaatgaaaataacttcaacattcactcacctcactcttgatgcattgaagtaaccacctcgttaatacctctctcaacggctaaggaaggttgcgagacacatcataactcaacacttaatattttattacgagaatgtgggagaaagataaacattcaaataacgagaataatttagcacaattagcataactatttatagataaagataaagagctattatgcggttatttattattatcccataagcacaaagatgaaacgtggggaatatccacattttatgaacgattacgaatgattagatctcaagggaatcattgtcactctatatatctataaatagggacagaacccaaggaacaaggggagagggccaaccttgggaaaagtagataatattgtcattatttatccctaaaaaacagtatcattgtattatatattcaaacacataaatccttaataaaatagactagtggactataaagatttaaattcaaaactacgttaaaactttcttgttatttattgcttttcatattcttaattgttgtgtaattaattctgtagtttattttttacaaaaacaggctaaatattttttataagatcggaagagc

SEQ ID NO: 69911 - DNA, 1503 bp, Cannabis sativa
  modified_base (50)..(61): a, c, t, g, unknown or other
gtgaaccatgcaacataaaagcaatttctgatcttttattaattagtaannnnnnnnnnnntgaaataagttttatttagggcacaaaaccaaacagcactttttacagcgcttttttcatactcctcacatatccaggttcgatgttcaatcgatgacacatgacattgggctgtattccaactatgtttgaatgttctcatgcgaaaacatccaaattctgtttgaggaaggtgaccatcctttctcactactatatggtagttgagagccaatttttaaaacttttgaaatatcaaaagaatcaatgggtacctcaattatttcttcagctgcatgcgatgtgttagtgtagtcgataattctgagatcaatatcgagcttttccactttatcaacctcctaaatttagaacaatttgggtcacggtggtggagcttctagcatgtaaatcatgttagacattgtcttggtcgcactttctcgcaagtttatgtcatgcgaggatagttctactaaaaccatatattgacacgtcatcattttttatcaggaaccgagtccacgtattaactatttacgagattgtattcgtatttttaagcaaaaaattcacactataaaatactccatcttgagggtgagtattaaacttagattggtaagagttagttagctgagttgtattggttagttagttagtaactagttactgttagtaacaaattgcctcttgtacaagctgagttatataagcctctatactctatcatattcttccttaatatcaaatacacagacaattccttttgttatttttgcttccgcattcccataactagtatatgaggcgcattttaaagaatagaaactcaaatttacctttggagttctgtgtcgagagaaggtgagagtaaaaaaaaagtgataattgaaaagaaatgagtatgaaaaatgcatttttttcctcaactaaatgcacaatttattatgatatgataggaaaaatgtgtgtgaattgaaatggcagggttataattgaaaaagtagcacaatttgttatgtgataaatttaggaaatttcttagatatgggttcattttaaagtatagaaactcaaatttccttattgatataggtagttatactgtggtcccatactcccattagaattttccgttaattttatcagaattgctctctataaatatatggtcctttattttgtcgtcctcacagtttcgcgtctcagtaaaaagtattgctatggcgagcaaagtattgttggacgacatggagccttggctggaccttcaggggaaggtcgtgatggtgaccggcgcctcctctggtctcggccgcgacttttgtgtcgatctcgctaaagccggttgccgcgtcgtagctgccgctcgtcgcgttgatcgccttaagtccctgtgtgacgaaatcaatagcctctctctatcgactccgtcctcttcttcgggtagcgtcagagct

SEQ ID NO: 69912 - DNA, 3157 bp, Cannabis sativa
acagtatttttgaaaaaatttccgtgtgacagtatttttgtaaaaattaacccatatttcagtatttttgtaagtttcccaaacaaattagacttaatgggcttttgttgattattgtgtttttttttttatttttaaataaaaaataaagtatattgtagcaaaaactccacaatagtaattaatttttaaaatttattttttaatggtaaaatctattagattcaagttctattactacttaaatcatttttatctattttatccatgtgtacataaagttattgtcaacataaacacagtgtacaaatgacattttattatttgtaaataaattttcaaattgcctcttattcgatccttcactgccaacaattcataacaccaaaaagaattttaggaccatgtgcaataaggggagttcgcctcaatgagggccttcacttccagaattgtctgtggaggtctagcccaactctcaacaatttgaagctaggattttcatgattcttttcttttcttgtggagataggaaggttcaaccctccacaggggaaccagtatcaaccacacgccaaataacaatagtatcacttagaataatgaagtttctcaaaatgaggatcatacttgtttgggctctcaatgaataatgaaacttgtgattatattatatattttcatgtgttataatacaaatgaattaatgaaataattttggatcctgtattttggactatttattttgttaaatgacaaaatagatcttgtatttttcaaaatggtacaaataggactctgaactaattttttgttaaaataaagggacctatttttaccatttcagaaaatacaaggtccattttgtcatttaacaaaacagagagtctaatctgtaacttttgcaaaacgtagagtctaaaatagtatttacggttggtacgtaggaaatccgcataaagagaatacttattaattgctaaaaatgcattaatataaacagtggatccttttcaccgacattgtattgtatatattcatattaaaaatttaagaaatcacctaatataatgaaaactataatccaaaatatgaaactcgatcgagttaaagttcttgaccaaataagtttttattaattaatatttatcaaacttaaataataataatgaggatgagaaaagaagaaaagtaacatattatataataaatttgtttcatgattgtatacatttttttttcacaagtaaaatttgattggtctaataatatatggtaatcatttgcaggccattgttatctattaatgtctcttgtattgttagtatcgtaacactttctaataataataaaaaaaaacactaaaatttttgcttaatttgttataacttattcacaacatatagtcttagaaaatgtgcataaatataaatttattatcattaaaataattcgtagaataaatacttaaagttttaaatttgtatgcggtataaatttaataatttttttagcaatataaatattcagtatttataaaaattttatttttctctaattgtgggtacatgctttattttaaatttattataagaaaatttgaaaataaatggtactacatgtttccgttcagatccaattatctattatctaggctttatatgtactctgtttaagataataacacaatcagataaaattgaaaaaaattataattttacaaacatcaaatacttacggtgttagaaaaaataattagttaacataaactcaaaactttgtgtgtaaccaaagttttaaaagtatatctaatgtattattaccataataaattaaacttaattatttatttataattaaaaattaaacttaaatatttacaaatccttcaaactaatatcatttgaatgaatttataaccattcatttttcttaacaacataacaataatcttaaaggataatgaacatttttttctcccatctatattatatttatttatagagaaattgttaatataatccatacagctaataaattaatcaatacaatatcacccttaaataaatttaaaagttttcaactaataaaaaacgtaaaattaaattaaattaaatgggactaacaaattaatgaaaaaagctattatttgtgatatttatttaatagttattaaaaaaatagaaaaaaaaaaaaaatccagtacatctcattccacaatatatatataaataaaaactgctccttccctgtattactctgttttaacgtaaaaaagaagtttttatcctattcggagcttcagttacagaatatacacacatacatatatgtataaatatatattgatatagagagaggttcataagtggttctctcattgctggttttctctttttttttttttgggtcgaaaatggagaaattcttagtgtttatagtgatgtttagtctctgctttgttccactcattcatggaggaagaaaaattccaaagaaaacccaagatgggtctgaggattggggttacgttgaagtcagacccagtaagccattcttccaaagttgtaaacttttcttcattttgttttctgggtaagaaaaaagattggatttttatttttgttttgttgagaattgaatttcgtttgttaaaattttctcagaagcccacatgttttggtggctttacaagagtccttatagagttgaaaatccatctaagccttggcctattgttctctggcttcaaggaggacctgtaagtttatatgtatgattgtgttgtgtttgtatctatgtttgtgtgtattaaactatgaatcttttcatttgtttgtttcttgagaaaaaaagggagcttcaggtgttggaattgggaattttcaagaggttggaccattagatacaagcttaaatccaaggaattcaacttggttacaaaaatcagatctattgtttgttgtaagtgagttaattggtttcaaattaatattgtggaattgtgaattttgattcttatgatttttttttctttctttgttgtgaaatttaggataatccagttggaactggttacagttttgtggaggacacaaagttgtttgtcaaaaatgatttagaagctgcagaggatcttaccacattgttgaagaag
